United States Patent Application Publication US 2008/0114160 A1 - sequence listing, part 4

SEQ ID NO: 2629 - DNA, 23672 bp, Oryza sativa
atctatatgaatatggataatgctaaaaagtcttacattgtgaaacggagggagtatatgtattgtagcagtatataacgtagaagttgcagttttgtaataatttcatacgctattattgcagcaaactaaaacatgtcactaatgttgcagcaaattaatagttttatcactaaagttacaattttctgaaatttactttatttataaatattgtagtagaatgaatgttattgccgctaatgcaaagaggcgaggttgcttcccgtatcatcggtgtaaacgccagggttcaccataccgccggtaaccgcgcggttaccgggcttaccgcgggggtacggtaatgtaaataccgcggtaacctccttaaattcaaataaatttaaaaaataatttgaatttttgatgaattttacacggtttcgtacggtttttcacggtgcttaccgccggggcgcggtaactccggccctggcggtttgaaaaaccctgctaaacgctgccttttgggctgggtggggtcctcaacgttgtcattccattcggcaggtacctctgataggttgtgtcgcctctactcttttaactactccctcatcctataacgatcgtcatacatatacatatttatgtatcaagaccaataataattttattcgtattaattaagataccatgcgcacattttcccgcaatgcatgcattgattaaaacaccataccaattacactttagcatgtacacattctcccatgcttcgttaattgtattttaatgaaatccgtgtccatatgattatatgatgatgaatttgagaaattttggattccattatacgatgatatgggaaggaggaagtactaattaattaatcccttggtttgtttaagtaaataaatatatagaacgatatgcatattcattcagttttgagactagccgtacgtgcaattgggcctggcctcccctaattatgacatactaattaatcctctaattatgtaattatgtcaagcactgtgttggttccttacagttttgcaggcccaattaagcaggctagtgattaatgtatactgggctacggtggcccccgtcatcggagatgtcactgctgtctccgtcttctaaccacacgcttcgctttgctctcgtcaccaacactagtaattaatcactggttatcgatcccatatttttgatggtgccgtcgtctcccacgaccatccatttaagaccggtaaattcttctctcttccccctttcctcacctctctcccaccctgtctaaacccaggattttaattattgattggccccaccgttatttcgtcggagtcaccgccatctcgccatagctggggaagaaggcatgtaggatgaatcgtgacggatccaatgatggagggttcgacagaaatccaccccaaatttacatcaaatggaggttagcacttctgataatatatagatacgaaaacatacttttgttgtactttggaatggagggtgcatgctcaaaacatatagaacattatattgatacgatattcctttagagtaaaatgcttaaaaatttgtgtgtattatggtacaattttattttataatcatcatcattcagtacatatcttttaagttggtatcttaagtccaaatcctggcttcgccgttgtgtttgatttaaataaatgcatgaaaatgatcctaacatctactccatccgtcccaaaaaagagcattcctagcatctcaagataaaactggggagtcaaaatgaccaaaatacccttatgattggaaaaagtagtaagggtgataggtatgtaaaatgtattcaagacatgattggaaaacgttgtaagggtgataggtatgtaaaatgtattcaagtatattcaagacataaaacttcctgctttatgtgttgagtgtagttaggatgatagaagttatattttttttttacaaaattcaaactctataagttactactccccccgtctaaaaaaaataatttaggtggagatgtgacccatcccctcatatacatatattaatctagtgggggtcatacatacatcccctcctagattgattctttttggaacgaatggagtaagtttttaggatggagagagtactatatattttgattttacatgttgtttgatgaaggcgggacatagatgacactactgtgagcaggctgctgcccatgattacagccacgtccatgcagatttgtatcaggtgcagttggtactatgactgcaacttaggcagtccactgccacctgttagatctgaatctaacggtccacatgcacccggatactgtagaacattgtagcaacaaacattctctattcctactgcaggtgatcccatatcctgtccatgcatggttgctgctgctgggccccccggccttctggggatgtgtttttttgttgctttcggaggcaaagatgagggggtgttttagtccctctcacccaaacactctctcacaggaggtgtttaaccagttgtcagttcgctgttagtttaagagtatattattatggttaattaattaccggttatgtaagagtgatgtaatgcatgtggtggagagaaaaaaaagtactcttcaaataaccactactcgcaagcattgttggtttataaataggagtacattattttcatgccagctgccaggtgcccagcttcttttattctaagtagttattgaattgcatggtgcaactaaggatcattattttttgagagatcgatgaacgtgagcatgaactcttgtaaccaattaattaatctattgtttttatttaattaagtaaggtctcctttagaacgcaacattcaaaaaccgcaaaaataggaaaaaaatgtagggatatattgctcttttgaatattttgaaacacatgattattttagctagtgctttaggatggtttacatgaaatagactacaagaattatacaagaatcacttgtggaagagtgaggaagtagagggagtgcattatattggacttatcaaaggggaaaaaaaaagagctatcacacaggattttatccaagtttgttcctccaaagggccatatagaattaaaatccgtagaaactcaattctctaaattcctataaaaatcctccaatccaaaggacacgacttaaacaatcctgcgtgacaacttgacttaacgatcttaacatgcagtactgtatcaattctctataattccatgcatggatgaatgctacacgagacatagtgacataattggatttgacacctagtgcatttcctagctccgtatttgttcttgatcgatgcacttgcacattagtatgtcacctcatgattaaactcagggaatcaaactctcaattgcagctgaattgagcattcagctgcaattgagaggcattcctccggccggtcgctggggaacttgctgcagcacaagggatccttgctctctttggagaggcctctggtcttcataccaacttcaccaaatgctccgcgatcccgatcagctgctcggaggaagaggtcgcagtacttggtaactccttcccctgcccagttgaggagttcccatgcaaatatttgggtttgactctttccatcagaaagctgtgtcgtgagggcctccaacctctggtcgataggattgcgcagcggctgccgctgtggcgatcggattggttccagccggccgggcgcctagcacttgtcaaagcagtgctgagtgcgatcccggtttacctgctcatcgccattgcccccccaaaatgggtgctgaaagccatcgacaagatatgacgcggcttcctctggtatggtcgtgcttcctctggtatggtcgtgcgaatgctcagggtggccactaccggctggcttggtcccgagtctgcgcgccattggaatatgggggacttggcatccacaacctggagttcatgggaattgcactccattctaggtggctctggggtgctgaaagccatcgacaagatacgacgcggcttcctctggtatggtcgtgcgaatgctcagggtggccactaccggctggcttggtcctgagtctgcgcgccattggaatatgggggacttggcatccacaacctggagttcatgggaattgcactccgttctaggtggctctgggctcaacgcgcctcccaatccctatcctggcaggggttgcaaatctcgtgctccagacaagagcgcgagtttgtggccgcttgacctgtgtccttggcgatggcaagtcgatcctcttctgggaggacagatggctacagggttcgagtcttcactctttggcacccgagctctatgatcgcattcgtgtccgccggaagctcttggttgctgatgcattggccaacaaccgttggatccgcgatctccatggctccttgggagtccaggcaatcttgcaatacttgcatatttggtcgttgctgcggacaacaactctctccgagggccatcctgattctttcatttggaggtgggagagttcggggttatactccacccggtcggcttaccttgccctcttcgtgggcaggatctcatttcagcacctgccaatctggcgatcttttgccccgcctcggtgtcgctacttcctgtggttggtcgctcaccgacgctgctggatggctgaccgtttggagaagcgtggactgccacacccagcctttttgtgtcttctgtgactaagtggaagagacaatcaaccacattctgattggatgccccgagtccctccagctatggtggactgtcctttcaagcctcggcctccctcagtgtttctcctctggcgctgtttccttccatgagtggcactctcttgccggctcaaagttccgagggagcgtcgttgtgggttcgatacgattgtgactcttggcgcttggtccatttggaaagaaaggaacaaccgtgtgttcaacaaccgttcccggtcctggcctgaggttgtcacagccatggcgcaagaagccgccctgtggcgtcttgcccatcccctgtcgccagcgcttcctagttagcttatttggtcgttcggtcgtcacattgtaatagcgagagtaggcttaagtcctttttttttccctttccctccctttttttccctatctctcttctttgtttgccatttgtataaattttatttctcttaatacaaaagtgcgcaatccttttgcgtattccaaaaaaaaaattgagaggtattcatattcatatatagtgattattgttttgactgctgctgaaacaattaaagatattgtggcacatattcatatatagtgattattgttttgactgctgctgaaacaattaaagatattgtggcacaactttgtccaactgtataaatacactgttacacttgtgagttgcgacttgccacctacacattatatacatctagtactgagtaccttgcctgtgcagctagctgtgctgcaagctgtgcacgcatggaatccaaagcaagatagcacagattacagataagatcataatagagcggtgcttgcaacgtattgtgggccgggcacgcatcaattcatttattatccaaagttttcaattatctctgcagatatctgtccagtaaaattaataataaacatgcatatattcatgtgttgtgcctattggccatgtgctacatatgagaaactgcagtctctggtcgatccctatggctgtaatatgccatacattcttgtctatatatatatatatactgtcctatatatgtgcccttcttttttcttgagaaaatgttggtttaattacttttttttaataatccataaatctgttagaatatactctcaccatttctaaatatttgacaccgttaactttttaagcacatgtttgatcgtttgtcttatttaaaaacttttgtgaaatatataaaactatacgtatacatataagtatatttaacaatgaatcaaatgataggaaaagaattaataattacttgaattttttgaataagacgaactgttaaacatattttaaaaaaatcaacggcgtcaaatatttaaaaacatagggagtatgttatattctcatacatttgtgtggtcacctctatttctcatgcgacaataattaagagagaaatgatttgggagcacgaagccgagacccgagggataaatgggtgaacagttaataagtgtgagaaagatcttgagatgcacaactctgcacattgatatgtgcctatgctatatgcacgatcaatatattttgttaagcgtactatatatcagtgttcacgtttcacaccattcgtttatgtccttgctgattggtaaattgtcggcaaattcagaactttcaaactctaggtctaccgatgatagtgtcttcccacctccgcgcttacgtccctattccattaattggttagttctaaatttcttgtatttggttattattgaaagttgtagtaataatatattaatgacggatatataaaaagagactaaattgttcaatatggtcgagttaggtcaataaattgtggtgaggagatcgaaacactacagcgagaagcttttgcaatgcaaaatgtctaagggagggaaagaatatgaggtttcccatccttaaatagcatatatacctcttaaaaggaggtaccacaattaatattataaattattagttataggttggagtaggtttagaaacttatgtctatatatgttgttgaatttttctccatttttaatgaggtgtagaaagttctattagctaggaggtatatatacttcacattataagtgtataccacatcactgacattacgatgtatatatatacctctctacaccactttacaaatagagaaatatcatcgttgccaatcttaataatactatctagctccctctgttctaaaatataactactcaaatttaactatattctcttcacaatatatcagaaattttcgctattcaaatttcctgtctacctcctcttatagaacaatcacaataccttatttagtttcatcatttcttttaatacatgtgtccaactctaaaacttctcggaacaactaaataacaaagttaacagaaaatagtggaaaggtatatacctcgatcttcatgtcgagaacctcaaagaatatgccacgtggatatgtagaaaggttaggagtgcagttcaaactcgtgttaggaaatcagatggtagaaaagcccgggagtttccatgaatttttaggtggatcaaatgtcgctagaggcagaagaaggcatcctggccattggatgcgcacccaacaagagaaggtataaatctcagccgtacgtctttaaaaaaaatgcgccacaaattaataatgtcagtcacggccacgaataatccagcacgacatctcataattaacgtgcgcgtcatcaatagcattaatcacgcacggttacacgcttaattgctctactaccaaattgacccaaaccgtactcctacgtacaaatgtacggtttcatacagtgagtatacgtagacgagaccccttgcgaaaaaaaagtatacgtagacgcgatctccgtatatttgtccgtacatcggtacatgtacggacacatgccaccttcgcgcgccacctaccttcgcgcgcctccgcctcccatctctcccgcctttttcttcttcttcttctacctctcgcgcgctaactcacggcaacgcgggagctagcggcgccatggaggccggccaggatgacgcggcggacaggctcacctacgagatcttctccatcctcgagagcaagttcctcttcggctatggcggcggcggcggcggcgagacgaagagcttgcagtgcgcgccgccggtgtcgagagggaacagggtgtgcgtgctctccgtcgacggcggcgcgcgcccggaggacgggctcctcgccgcggcggcgttggtgcggctcgaggccgcggtgcagcggcgcgccggcagcaaggccgcgcggctcgcggatttcttcgatgtcgccgctggctccggcgccgggggcgtcctcgccgccatgctgttcgcgcgcggcccgtgtgggcggccgatgtactccgctgatgacgcgctcggcttcctgctccgccgcgtccgccgccgcgggtggtcgtcccgcgccggcggcctgctccgccgccccgccggcgccttccacaaggttggcgttcgcgtgctcgtctactttttgtactactcggtatgcgtctaagctcgcgccatggctggtgaaccaggtgttcggcgagctgacgctgcgggacacggtgcgcccggtgctcgtcccgtgctacgacctcgcgacgcgggcgccgttcctcttctcccgcgccgacgccgcgcagtcgccggcgtacgacttccgcctccgagacgcctgcgccgcgacgtgcgccccctcgggcggcggcgccgccgtggaggcctcctcggtggacggcgtcacccggatcacggcggtcggcagcggcgtcgcgctggggaacccgacggccgcggcgatcacccacgttctcaacaaccggcgcgagttccccgccgcggccggcgtcgacaacctgctcgtcatctccatcggcaccggcgaggccgccggcagcagcagccgccaccgcgcgaggacgccggtgatcgcgcggatcgccgccgagggcgcgtcggacatggtacgtgccccccgatcaatacaccacacgacacggacgccactgttcactcttgttttacacgcacacgtagagttgaagcaaacagagtacgccgcataattaatttgctagtacaatttttgtacgcatgcatctcgtctcgtcttgctcggagtactcgacatgagactgagatctgatctggcatgcaaatgcaaatgcaaatgctgaaatccatccaatccaatccgatcccattaggtagatcaagctgtcgccatggcgttcggacaacacaggacaagcaattacgtccgcatccaggtaaaaggctacagtcaaaacctctgagatttttgcagtacaatcgatcagaatttgattgatttgggtggatggattgaaattgttcgtgcagggtatgggggtggcgcggcggcgcggcggcggcgtggcgtgcggcggcgagacggcggagaaggcggtgtgggtggcggaggcgatgctgcagcagaggaacgtggaggcggtgatgttccaggggaggaggctcgccggcgagaccaacgccgagaaggtggagcggttcgcgcgtgagctgatcaaggaacacggccggaggaagcagcatgttccgccggcggcgagcggcggcggcggcggcggactggactgccatgtgagcaagaaacagccgtaagtcagccacggcgagcggtgtcgcggtggctgaccggccgaccgccgggcgtattgcggtgttgttcgtgcacctccggcgatggacgtcgatcatactatcatacaatcgtactgcatcatgttaattaaataataatctcgaccgatcatttaattttcaccttgttctgcttgctcctgtaattaattaaatgcgtggcagtggatcacgtcttgggctgatggtctcgtcggccgcagccgccgccgccgcgctggtcgccggagtacgacttcggccggctgcgctagcttgcgccgccgtacgggagcaacataataagattgaaacaagacaacggaaaacaacagaataagattgaaactgaagacaatttatcacaagttcacaactactctgtcactttgttcaaaatcatcacaactactctatcactttgttcaaaataatcacaattactctgtcactttgttcaaaatcatcacaactctgttacttgttcaaactcatcacaacactccagtcacttgttcagaaaactccatctggcagtgcagatccttgtttcatttcttgaaaagtctcctccaccaaggaaccttattagccttcacctcctctcttagctctttaattgcatccgcgataccctgcagcatctctgaaatcctcttggctacttcttcgcatgtctccagcttgatatctttgatgacgtaaggcacgtagaacgccgtgactccaccgaagccccccagtagcaccagcacgatgcgccacgcagtgattgacacggtgaatttggaggtcaggatatcatcccttgcaacaaacacacaacagaaagcaaatcatttagtatttgtcagaatctaattcaacaacacggttgagtgagtccattgcaacaaacacacaacatgaaacgatcagttgtcagtttaacaacacagctgaatcccttgcaacaaacacacaacagcaagcaaatcatttatttgtcagaatctaattcaacaacacagttgagtgagtccattgcaacaaacacacaacatgaaacaatcagttgtcagtttaataacacagctgatcccttgcaacaaattaaacacacaacagaaacagtcatttgtcagaatctaattcaacaacacagttgagtcccttgcaagttgcaagggacacacaacatgaggcaaaccatttgtcagattaataaacagagctgaatcccttgcaacaatcacacaacatatgaagtaaccatttgtcagaatccaatttaacgacaaagctgaatcgcgatatattaatcgtatttatacatacctgtagtttctcctcactgagtggagttcatctttagttgcagccatttcttgagcaagctgagtgcagtgtaggagcaaggagctgtggcgagagtgagccaactcttcctgctggaagttcttttgcagtacccaagtaatcgtctgctccatcttgttattcaccattctctccataccctccactgtcttctccagcaatttctcaagctgatcagcgcgcttctcagcgatgtccgcgcgcaactcagcaatgcgcaggttggcgtcccatttcgcttccacatcctccagtctcttctcaaggctcctcacaagctgctccaactcggtgactctcacactgacatcaacgagtctgatcctgtttgctctcctcttgtcgccattggcactgctggtgctggtatcatcagggatgctgacattgggagtacttgagaggcatcgagtggtctgcatcgaggacagacgacgtcgactccctttagaagcagactgcaccgggatcatgatcttgatgccgttggcagtggcgagagagctgacattggtgatgcccgatgacggcggcagtgtcttcttgtcacgcgcatcgtcgaacacgcagggcgccagggagacgaagcctccggtcgtttcgccatgctcaggatggccaccgccggcgacgatcaggtcgcggatgagctccaccatgctgtcgtcggcctcgagcacaacgaattcagggtcttggatcgccggcagcggcaggttcttgacgaggcagacgagcgccgcggcgaggtggtgttgctctgccttgctcaagaggtgacgagcgcggaggagagcagagtcttcggtggcggtcgccggagccaccggatccgaccccaacttgatggtcgcgctcgcgctcgcgctcgcaccggcggcgccgatcagccaaggagcagacatcccgactccgaccatggcttctccgccaccggaggcagcggcggtaggcgacaccatgtccgcgccgccaccgatgatgatctcctcggggcgggggcgggggcgggggtccacttcaccggcgcggctggagagcgccctgagaggaaggcacggcagcgggacggtggtggtggcccgggtcgcgccgtgcgcgccggcggcgagcatgacgagggcgcgggggcgaggcaggcacgccgccttggccttgcggccggcgagggtgagcgcccggaggagcagcaacggcggagacatgcttgtattgtacggtacggcgagtcggcgaccggaggcgaattgaagtggcggcggcggcggcggctagggtttcgggggatgaatcgaatcgaatccaccaccaccaccaccacgcggtgctcgccttctcgctccctcgtctcgctcggctgctgctgctgctgctgctgcacagctttcgaggacggaaaagcagcgggcggccaatgtgtgggtgacgcgtgtaaggcgagagattccattttttcaattcatcacctccaatggatgccgtccaatctgcaacggacggtccagatgatcgcctcgcctgcctccttcccgtctttcgcgctgttacagcaaacacgtagtattagcctgtttattatacttagttggactgattaggttattattgtagtaataatgtagaggaatacatatacattcatgtcaagaaaatgagccagattttgtggtatattgaatcaaaacttatcagtgaaaaagaagaaacctgcaatatatataatttgcatatgcatttttcctttttgcgagaaggaataaaaatgcctgctctgtattgaaagcatagtactccagtttacaggatggatgtgcagcacaacaaaacagggctcacagcagacaattgaaacccttttctatccttgatccttcagatcacacccaacataaccccaactagtgcactctacaccttgccacaaattgaagacaataacctttataaggtttaaccctcacgcgctcacgacttcagctttgccaatcttctcaatatatagagctttgaataatcctatccagctttgccagcgcctctgatgtctcatctcaatgccagccaccataactgcaagaaggatgccaagtttgtgaatggcggcaacaggataactcaaaggattcaattatatattttctgcttaacataaacgataaatcatttggccttcagaatctgccaattttgcaacagaaattgggcattagagtagtgcaagaagcatcattgctgtcctattttgcttctcttgttttcttaatacgtatgagtatgcgtatcatttcattaagaagaaacgacgagggagtggctaaaacaccttacactccaaacaacaacagattgctatacaaacacaactcactcgccctgaccttacccagccggggtaagcaactttctaaggaactcgccgagcttagaagccccagcctacaccaaagaccgtgtgaatgacaatcataacaatagaactagccccatcaaacacactcattcctatacttccatatctcccaagccacattcattttgtttctcttgttatatggatatttgtttcaaaatcaaagtagcactacaaattcatactagtcaatgtagagttatttgtttctcctttgtagttcctttaatcactagaagttctccttgtctctaactagtaaacaagcatgttcaatgcacatcatgggcaacatgaatcgaaccaaacattttcttttgaatgagttgctagaaaaaaccccaagcatgaaattagaaaataagatacacttaaaaaaggatatagatactcacgttccattcatgtgatttcatgaaccaggagagtacaagtcattggctaacacatctacagtagcagtaaataccaccaaacattaatggtcattgttcaagagttcatagccccttatctacagtaacactaaccacaagaatgaataatctaactaatctatactaatgtaatacccaaaatcttcaaaatccagatatttaatatattccaaatttctgttagcatggttatatgattggtggtaataaaatgaatttttaatccttaaaataatttttgaaagcatgctcccggtgtcatttcttcagttataaattcaggttcctttaaattcttactattaggcacgggctataaagtgttatacaagaaacaaaagcaagtggtagtggaaccatccctataatttatgcatgcatcagagtggagttcaagcatccaaggatgtattgccatctagaatgcctagcaatccttactcttatatttcattatattggaaaaacatggaagaagaggacatgtgggagcatgaaacattacacatgcatattagacagtgatctgtacaaaataaatgaatgaaactatccatcatttgtgggactgaaatatgtgctacaaagcacatatttagttatttaccaaccgtatcttcccttgtcatttcacttttctaactcattgcatgaaccatcatggaaaaccagagcttccatgtgacattgtaaaatcataaagaacctgaaattaatgattttaagttgcaacgcgctgaaaacattgtgaagccgaaatctacttcagtccaaaggaactgtcgaataaaaaccttacttccaacgttaaaatgcttgtagagcgccttgacaatgctgcatcatatcagtatacattataatttatggtgattgtagtcccataaaagttttttacattacccctgacaaacccagtgcaagtgctgttgccatttttatgatgcaccataaatcaacaatgttcagtaaatgaaaaaaaaatatgtgtagcatcaaaagtttcttaaaggaaaagaaaaataaatgttgaacgaattgaatggcctttcgagattcatgtgtgatatcttgtagttcatcaaggctatgcagatgggaagggaacaacaagccttgtacaatggaaagcagatgtgttgtaacagaaaaaaagaacggtagtgttgtaacaaatggttaccattcacttcttaatggaaattaggaatgtagctagcatgttcatccaaagaagaaaataccttccatgtggctttctcccttgtttcagtttgctcgaaaaggtatttaagcatccctttcccttgttggtctgtccatgttataattttctaagctatcatactacacaaagccataaagcgaaaaggcacaaaatataaatgtgcatcaacaagacatgtatataaaaatattcttatatattgtcatgtttatgagagaaataaaacttcatctgcaaaaaaagcctattgactaaaactcgtctagtaaaggattgcaaaatgacatgtaaatactgttatttttccaatctcattttccctatgtattgacatgctgatcaaaatctctatgcctgtgttgtgaccaggcaatcaggaaaacagagagatggtatgttttccttcaagctttacaattattttgtaatgaatatgtaaaaatgatttggcttgatcaatagaacaacacttaagttctgaatcatttttagtacatattatgtttctgaagattgttcctgattacatacaaagaaagtgcttaaaactggaaaagctagcaactgaaatatttcatgttagatgatatcagaattggagtaataccacaatcctcacaagttttttaaatttttttagaaaacgcaggagagctgcacttcatttcattaagaaggaaaacaaaccacccatacaaccaagggctcatgagcccttcacccagaacacatccacaactagcatcacacaaggcgatacacgaccaaaaaccaccgtacaaagaccaaaaaccagcctagtgccctgggttagtgacctacaaaggaaatcttggagcgcaagagctctagccaggaaccgaaacctagcttctgttgacactgccctcgacacctccatgacgcttggatccgctccgttggaaacactgtcattatggtgtttccgaatttcccaagcaactaggataatcaatgaattgagcccctttttctgctccctatgcatgacataactgaactcggtgaaaccattgaacatttaatgaattgatccttacagtccttactgaattttattcaaaacttaccatgttattttttagataatatcatcatattaaataaaatatactgttataaactcgtaactactgccagcagtgtaaatgagtttagtggcaaaaaagtgttctccacaggagattcaaaacaatttaaaacagtttgtggataaaattctgaataagttgagaaaagaagttgatatgcagttcatgaacactatgatcacctggaatcctcaatatgcacaaactgtgtatctttcagcaaacatcaaagaattcaacataagaaaaaattgcttagtaacatacaaattggttccaggttaatgtaaaaatatatacatgcattgtcttgtaaaaccgttcactacattgtgcactagctaaaagttgctcccaggatgatttcaaaaagaatatcctgattgcatggaactcacgaaaaagaacaagttgggtccgactaaaattggttatcaagctaaaagtggttccctgagaaccacccatgacatgctagacaatttttttacgcaaaaggatataaagttcctgcactgacaaaaacatagtaaacggaaaattaggatgaggggatgcacagaaagtaatgtccagatgaatgaacattaactggttatcctttgataaccccttgtttatgtggtcaattgcttttataaattgtacactagataaagtcgaacgaggcttcttttcaataacctgaataagaattaatccacaaaatctgtttgtggatgaatagccacaaggaaaggattaccaagctagtaaactagttgatttatgcaaaacctgtgactactaaatcatacagggcatattaaagagcatattacataaacataccttgatcaaatttaatatgataattgggtttctgtatctcatctaccaaggtcaccaaaatgaagctgagtcgttttatagtcagtgtttggttgtcctgcggttataggagtgtcacaaaagtcctatgtacataataatttttccgcagatttgccacaaggaaaggatttagggcttacttgtgatgtttggcttaatagaaaatttagcttcttgagaccacagaagatgtatggatcctccgcattgcacaacagatattatatttgatggcattttatcttgggtgtcttgaaacacaatttgctttgtctcaacatcatcggcggcaattttgatgtgtttatacaattctgggcccagcaaaatggcattaaagcttagctataacagtcactgaaactttctcctaaatgagccatgaactatatattaataattgcactgcaaaagaagacaatagcgtagtaaacataaaaaaaagggcgcatttgataataatgataaattacaggttcaacactaggagtacagagtagagttattttttttgcgaacacgtaaaaggaagtagagttatgtactaaccatcctagcagctagtaaaaattagcaatgtggttttgctgacaaaaacataattgcatttgttaacaattgttattaagtgcaactatacatgagttgtcaaaggtgatgaacaaccaatttactactagtaaattctgcggttaaatgcagacgaggacactggataaactaccagagacaaggtcgacaaaatggccccaaatcacagctgcagcaagatcgctggtggatggagctcgttgcggacgaaattaccggccacgaagacgaagaaatcaaaccaaaaccgagccccccgaaaaaaaaataaatcattaccaaatgcgagagagacattgataagcattaagcaggcaatcatggtgtggtgagagagattcgaggaggcctcactacgaagaagatgatgacgagggagatcaggacgaggatcaactcgggatcctcgcgttcccgccgcgggcgtaattggcggcttgccctcgcagcgaaaccctagggctggctcatccccctctccgctcccacactcgcctagcttcttccccctcctgatccgccataacgaaggggaggccgaagaggtcggtgccgccggggacgcctcgacgtcaccaccgatggcgccgccgccggcgaaccttcgcttatcgggagtttcgccgccggcggaactgaagcgacggagcggcggaggaggttttgatcgccgtgagtggtcccacaaatttacgaacttacggcccattaagcatatgcgagattacggcccatcagagaatatccgtagcgggctagagtcggcccaatatctggtcgggtcgcgaattttttcgtttttagattttttttaatatttacagaaataatctatcgacaaaaaaaatttacaaaaatagaccctgccgccccaatggtgggcggcaagctgatgtggcagatggtgggttgaccgcgccgtctgccgccatcggccaaaattgcgattaggcccttgccgcctatagggctaattgcaattttggccgcccataaagagcttgcggccgtactttttgcatctgggtcggggcggcaagggacccagatgtaaaaagtacggtcaaaagatttttctatgttatgttaataataaataaagaagtatttattggtaaaacttgttaatattgttataaaaatgtattgaagttggttgttgcgcaatttcatatgttaagtgagctattattttgtaccttattcgacgtattagtactcggataatttatataggcctatcgcagtctgggtcgtagaaacattatatggacttaaacgaggagaattatgtaacatgaagaaatagtagtataatttgaacatgatataactatttgcattgcggttacatagatgatattagattcgaactaggagggaggtagtgcaatagttgaacacaacgacgatgtagtaatgggaaaaggaagcatgacagtagaaatttcaatatgccaagttgtccgataatagctaacccctacgtgaggatccctctcctctctcaaaccgcgctttagtaaccctgtattgctctagtagttcaagctgcacaacacggctaggtggagttagaacccttctggtgtctatccattctctgtattgacatctccttggtggttcctgggaggaaagaatagatataaagcaagcaaagttagtaaatgttgtgagaaaataaggattcatgtaatcaaaatattcttaccatgaaatcgtcgtcaagaatatttggaaccttcgacccaatgttgtaggatttatggaacgaagaacctgacaacgatcaccacacctgcatcttggacgggctttccatggagggagtgccgtagttagcacccgccagtcgctctgttgttcacgacattgtcgttcataaagccgcttttctctgtaagtattgctcagtactttcggatgcgaaataccagcgaccttcttgtaaacaagtggttaggtcgagaacgagattttttgtatcgacccactcgatgtatgcgcaagccgtagtgcgggtctgccgaatagagtagtgttacgaagaataaagcgattgcccatacataatgaataagcatatgcagataataaaatatctcacggtcatagttagggcacctaaaaaagtgccttcctcgaatatcaagattccttgaagccattagttggcatcgatcaccgcataggcagagaggacgctggcaccaaggtggtagtaggtatacacaaggatcgctacgccagtttggatcctcaacaccccggcgtctagccattgacgaaagccggtaggatttgtaatgaagcaagtggggaagagagtactgaatgtgactgagttctgaaagattgtgaggcctcactcgttaaggcgacttatataggcgcaaaaaatcgagtgatacccctgacatgtgaacgtggtggggtatggtgggtacgcctgattagcgccgaaagttacatgcctgatcggcgccgaaagttacattggtcgtatgcgccaaatggtgggcaaatactcgtatcgcacgcgaataaaggaggctgcatcggtgcggcagaaagtagtcgtgcatgcgccgaaaggtatcgtgcacatataacaacaacgtagtcattacacaagcatacagtactggaaagtgaagcaaataaacaaagagaagactgctctactggccctgccctgcgccgcgaccacgcttggtcctccgggcctgtgctcgcacgtggtcctggaagtaggtgaaacgatccggtggcacagcacgggtagcacgagtgtctggcggaggagtggcctgcgcctggtcttgcgtctgcactagcggtgcgtctcccagctgtgaggggccgatgacgtcctctgtcgagcctgaagcgaagtcgaagagcaaggtggaaggcagcaagcggtccgacgacggcaccacagagtacctatcgtagggtagtcgacctctggtcgctcctcgtacagtgactcctcgtacacgtgctggtccacctcagggcggccgatcgcaatcctctcagttgcccagatagaaagaaagagagggcacccaccaaaggtcgcactgggatccgtcttcgtgcaagcctcacaaagtgcacggtacagagccgccaacaacgcggaaccccagctccactgaggcacctcgcctaccgcggcatcggcgatgctcctggcgtagtgcacgagtcccttgtcgaccgcgtgcccgtgaccgccacagaacatcacccagccaaaaagctagagcaagtacgcctccaaacagcggctgtaggagtactcgtcggcctccgcctgtagctgctcgacgtgcaagccttcgataaaatgttaggcaccttaactgtggactaaatatgtaacacgcttgtcatttcagtacaaaacactcacgggaactgaagcagccacctcttcgtaggtccagtgttgcggtggtgagccaacggctcgagcgggaggtgcagtgtgcgctgtactagtgcgaaatgtgccgtcagatcatcctgccagtccacagccgtggtcactggcccaacagcgtctcccgcgagcggtagccccaacaagtacgatacgtcctgtagggtaggggctacctcaccgcacgacaagtgaaaagtgtgcgtctctggcctccatcggtcgaccaaagctgcaaggagggacctgtccacagtccatcgtctggccgggtccgcgtcgccggcggtagcctccaccagccgacacatcggtaggaggccggcctcacgcaacctgcaataacaaattaatatgtcattataaaaaatattacagtgcaactaatttatagtaatacactgttcgtacctctcgacaaaggagtcgtgaaccgtgagtaactcaccgcacgtccgtgctcggaacgtcccaagctgagccccctgcaccgcagtaaggtgagaccggtgtcggtgatctatcgccgggtccaacaactgaggtgtatcctgacgtgccatctctgaaaaatatagtgtttcgtgttagaacaattcaaaaagtagtaatgtaaaacaaaagataacttgcaaaattatgaaatagtaataaaatcatgagaataattatgtacaacaagagtacatgctatttaaatatagcaaacgttactaatggtacataacgatgacgtgcaatttaacatatatgtagagttcgataatataacataacattacgtgtcgaagtccgacatacatcagcatacctaaagacgttaggcgccttagtttgacgttacatcacgagacctaaagacatgacatgccgaagtctgacattacacgacgaaacataaacacatcgataagttcgaaacgaattacaagcaaaaccacatgccaacatagaacataagaactacaccacgtagccagacgtggcacgacgatgcctaggacgtggtcgagtggaggtagtgccttcacccgtagggcgagctctatctgctgctgatcctgatagtcctgcctccgccgcacttggtttctccttgtctttaggacaatgcttgtaggtgtgcccatgttcatcgtatttgctacaacgcttcaccctgccagcctccgactcgtccatatcgttgcggatgcgacgagtcctcctccttctagccttgcctcggagcttcgatgggtcaggaatattgagtacttcatcgttagtctctgtgaactccccagctatgccgaacccataaatctcgccgctccatgtatgatatattgcttgcttactgaagtactgtaacacatatactgcatctggtatgccacactccgctgcggcagcaatgacatgggtgcatggcctgtggagcagcttcggctttgcacaagagcaatgacatatgccgtcggctttgagaacacactcctgcttcactctcttgcggtagatacccctgcctgccttatcttgacatagtatctcaaacctgtgctgttgggtactttgcactagagctcgatgtttcatggcctttttacgcaactcctctagctttttctgcatgaaagttccaaacaaaatgctgttgttcggcatagagggaagaactgcctggaactgatccctaaaatacctgcatgtcccatgtaaaatgaactccactatgccaactagtggcagtccacggacaccgcgcatcacccagttgtaaacttctgccaaatttgttatcattattccatatctagcaccacctgtgtcatacgccttggcccatttctcttttggttcatgcagaatccactgagaaaatttccgaatctccaatccagttcttctaaccaatgttggactatccgttgggagaggtccaagagcttgaggagggtcagcaacggcggtcgatggagccgctgcacgctgatcactacatttggctgtcaactcatctaatctcttccaaagctcattaaattttttctcctggttctgattgcacagcctcttgaacatgttcatgagctccttgttcttgaattgcttgaagaaattagctcccatatgacacatgcaccacctactctgtacatcttcccaaacaccatggtatcctcgttccatactcccaaactgcaactcttctatcgctcgcagaatgccagcgtgcctatcatgtatcaggcacacatttggcctcataccaacaacttttgttttaaccaatttcaggaaccagtaccagctgtcggtattctcactctcaacaaaagcaaatgccaagggcaatacctgattgttcccatctacccctattgctgttagtatctggccccgatactttcctgtcaagaatgtcccatcaatgcagagaacaggacgacatttcatgaatgccatcttgcatgcatgtagagctaagaacgccctttgcagcacactcttgccaggatgttcaattgaggggaatttcttcacttcgtaagagctcccagggtttctttcctcgataacaccaagcaggcgtagcaaattgtcatacgaggcttcgtaagttccaaatctcatatctattattttctgtttggcccaccaggccttggcatagctaatagtatacttgtatgtctctttgatgtgtcggattattgaccttggttcatatgtgagattatgggg

SEQ ID NO: 2630 - DNA, 1381 bp, Oryza sativa
tactccactgcattttcattgcctgaagaaaaaaaatcaggcctatttaattccgcgcacgattgcgacatgccaactacgatgaacgtactcaagacccttgctcttaatgaatatgttcagggaccaccaagaacacggcctcatgtgtttgtgtgtttctgaagcatgtctgtacaattgtcccaagcatgaaggttttttttcccttggcaaactggatagctgtggacctgtggtaacttctgaagaggaaagaacagtaataagaagaaagcacggtcctttttcattgtaagtggatttttgaactattcattttagtctcaagagagacactccgaggggttgttgtgtgtaatcacctaaaccctcttgaagcaaaaaaaaaaaacagagaagagattatacatatatcacaattttcaaagaatagtaaaaaaaatgtacattatgatgatatcgcccatgggagattaatcaatcccttggaaagaaaaccagaattttttccttctttgcagctagtaggaaatcagcagcttcaagttgtaaccatgcatgtacaatgtacaccctcctctcctccggctcgtccagtctcttctacagctcatcgttctatcacctcttgttctgaggagacggttgcgaagaaggtagcggcgtcgtgttgacatgccataccataacctctgaacagtctgaaggaattcctctcactttgctataatcttcaaggaccacttgctgtacgaacttcaccgagtcctgataaaacaatggcaccaaaaacatgttagggcaacggttcatcatgcagcacaatcaagaaaaatgggtagacattttggcatcagaggaagcaatgagcaatgcagagaaagaagctctaacaaccttgcatgattgatctcataacgaaagaggtgcttgctttagtggttaggttcaagtaataagatgaacaatcgattgtacacctaaaagaaggtgtgttttctcattaaaaacaagggccactgtactgctctactactgctaaccacccgctggggcttgccttgcactggacttcatcaaagccgtacactatcctactcagccacgggacccccccccccctcttccttaccctctcccaccaaattagcaccagatcagactaaacccacgattacgcatttgcaaaaatgccgctcaagattcgatccgtttttttgtcgattgctgcagaataaacaatctctctctctctctctctctctctctctctgtgggagaaatgatcacctagcgccattgccattcagccatttagctagagtgggatctttttaatgcagaaaaatcaggttgagactggacaggtgacaaggat

SEQ ID NO: 2631 - DNA, 7955 bp, Oryza sativa
cagctcggcgtgaacgacccgcgcgcggagctgacggtggagtgcccggatggcagcgcagcctgcccgacgcggcagcggtgaccccgcttgtcatgggcggggcagccgagataccgtcgtggtggctaggtgaggcgcgtggccggataacgggggcgctggcgggtggcgctggtctggagcggcagcaccaccggcggtcagatggtagtgctaagggagctggcggcggtgggtcatcttcctcgttgccggtcggcaccctcacccttcctggagctcctccccttctttgcggagagtttctaggttggattgaggcggcagctcgtcagcgggggaagctcaggctgccgatgcaatgccacctagtcccgggttctcctttggccaaaactggcaaggcggccagcgggtggtggaacagaggggtcttgggccagctctcaggggtggtggttcgatgaagtcgaccgacgaaggggcgtcggtgcggtgtggtggatgctacgtgttgccatttgtctgtgtggtggttctgagttggtggacggcgacctgcggtcaaggttgtagagtcccaggcgaaagcctagtccggtggttcaccgggccggcagcggctacgtcttcgggcgtcgtaacctatttggggcattgtcgagggttcccctctccctttctcgacgagcttctctgggtgaaaaccacatctttttcagataggcgatggcggcatcctggatgtcgtgaccaccttggtggcatcgttttcggagcctcgtctctgtgatgttgccgttggcctagcggcgttcggccacgcttagcgggggtcgtttgctgctaggcttcaccctcagcggtttgtgcttgggtggtagtgtgtggtgtgtggcattgcaccttggtgcatttgatgtttttccttgtaacttttactccttcttaatatactcggttggcttccttcggccttcccggcgaaaaaaatatatctaattttgaaagttgtttggtgaaaaattatgggttttgtaatttcgggcgaaaaaaaatgaacttcgaccaatatttaagagttaacttgcatgcggcggcgcaaggctaattacgatgcagaaatccccttttctttcaactgcatattcctcacagtctgttcaagtcacagagacagacaaacaaaatagcagctcgtgaaccagcaagctataggtactagatagatacatgcatggtttgatatgatacagatacgatcacacccacccacacaaacacaccagtaaattaatataccagacagtttcaggagctacgtgtgcgtatcagcacagggacagaaacagcagattgatcacacaaactgcatatgcactatgcatatgccagagcagatatggctcctttattattcattcatcacacgcacggacacacgatcacacagatgataatagccaaataaatggcttcttagcagttgcaagggttgcacttgcagctggagccgcagccgcagccgtgggcggtctcgccggactcggcggccgcctcgaagtgcgccttctccggcgcgacgccgagcacgacggtggcctgggcgctgctgctcttctcttccaggtcagggtacatctttctgcaaccggccacaaaatcaaatcaattaattagcatctagtgggatgatcccgacatcaaaaggttgtaagtagacgggcgattaccgggttattgttgcataaggtcatcgaaaaagatttaaatttttttgtaattgttagctgtgtatatccacttggatatagaagccggatttctattcattttctttatcttataacaaaagttaacgcaagaaaccatgcgtgtaaactgactcatacaattacataaataaacaggtttcatgtgtaaaaagaagacagagaagtgaaaagaaaggagaagatagttgccgatcatgcgcatgctatttgcaagaaaccattaaagctaagcatacccgcacgtgcagttcgagccgcagccacagcttgatccacagctgcaagacatcttgtcgaaatctataagctcaagcaactcaagatgacaaggagatgaagggctttgagatgatgagcacaatgcatagccttccaccctgactccaccatttataggactggacggaggcaaagaagagtgtatccccaagcttctgcgtgccacgatgctatacgctgcctcgaattagtcgctgcagattattgctcctcctatggccatttctggtgatggaatcatctattgacagagaaaatttctttagagcttttggttctgataatgttatttatcattggccacataaatgattatacttaatcccaaccgatcgtgagagttggggttaaaatggcacaagatttttcttagtttagctcaaatgttagaacaactgaaagtaacaataactgaatgacacaatggccaaaactaaaattttcagtgaataaattatctattgtgaatttgaggcctaagagtaatagattacactcctaaaactccttttctggcgaacttattctgaagagagttctgcacgtctgtgtataaaaatgcggttgctttatgctaatgtaccaatgcgtaattgacttctcttcccttgttctcagtacaccagcaacgttaattaagatatatagaagatctagtaagggaatatatttgacgtcattttatatctatgacttctgcaactgcctacctgcaaagaaataggccttcttcttgccttaaagcaacaagctttcagataacatggccggcaaagaaaatagctttcagataatatctaaaatactcttgtatagtagataaataatcactttatcaatatcttttggcatactttttttttcttttgtcatactttagacaacgtgcaatctgtacatatggaataattcaatgacatctagttgttactattttatttctgaaagagagtatttatgaatggaagtactacttataagaaaatgaatagaagtactttcattgtgtcatcttagtttcccctccaacgtgcaggctgtataaaatgttttgtatgtgtgaggtgtcttttttgaaaccgagtatgtgcgaggtgtagtttggaaaggtatgggaagttgacaatttgcatgaatgatgtttgtagatgcagccttgaactcttgattactcataaatatacagaaatgctcattgttcatgtcatttctgaacaatcgtttctatcaagtatatattatttcagtttggaggcatatgcctgtctcaagcagggcgcatagatcacagttaagaactcccaacaaataataattacagagactgcttacaagaaacatttcttgtaacattcaacactaggcctgatgcaacaatgctgatttgtcagttttagttgaccttgctgtggcaacaatagaacttcgcagccagtacaagtgtacaacaacaatgtcgaaagagatatcctttttatatacatagtgatcatagagaatgttattacagtacgttaacaaagattaaactgaatctacaatcccaacaaactttttaaacagttaatggaggtatggaaatttgtgacacgtctccaaatgtactactacatccgtcctaaaataagtacagccataaatatccatgtttagcgctttgaccatccatcttatttgaaaaatttatgaaaaatattaaaaaaaatagtcacacataaaatactattcatattttatcatctaataataataaaaatattaatcataatttttttaaataagacgaacggttaaacgttgaacataaatagtgctaaaactgcacttattttgggacgaagggagtactctatactctttaaaagtccccagtggtggtggcactgaatctggcatccactattgttttttacttttttagaaattagctcctgatatcttctgatattatgaaatagttcaaatattcggttcaaacaactaaacaagtgatactaatatattcaataatattttaatatccattacatattataatatattttattttattcatagcaaaggaaggtattttgctagtccttcaaaaactttctaattgttgcgaaagttcaagggtgaattttacctatatgggcctcacgtcagcctgcaatcgctttctgggcccaatagtacgggccgcacgcaccccgtaatcccgttccgggccagcccaaccaacgcgggccccacgtcattccgaatggcccggcccaagtagaagactacatcgacagacgggacccacacccccacgcatcccccctctctcgtcgtcgtcgtcgccgccgcctcgccgtcccccgccattggagccatggatctggctcccggccgccgcgcgcgactgctggtggcgctggccctcgtcgtcctcgtggccctagccgcgcgatccggcgccgaggtcatcaccctcaccgaggagaccttctccgacaaggtgtgctcctctctcctctctctctctctcgtctcccgccttccccaccggcgacgatgctgttttgttctgtagatcactgaggttgatcgagctaggagagtccaggtcagtacgggcttgctttgttgtagaattatgtaatagattccggagcacttcgtactatagcggcgatgcttggtttcagacctgtagctgttgtattgcagatctattgacaattcaagtttgatgggcgcctgcgcgtcagtgttacttcgcctctgggatggaatcattggaatgatggattatatgagcgtcggggttttaattatccggtttcaatcacggattgggaatttagaatcgggtcacagtgtaaacttttgtcttgttagtttgtggagaatagataccattgctttccaggttgcatgtttgatactagtaaaaaaaaagggtcatagagagccactgctcgtgttcctatgtttttgcaagtcgttcaccgttgtggcgtgatgcttgtatttgttccaactaagccagtttgatcatgagcaatcctctcatttttagataaaggagaaagacacggtatggtttgtgaagttctgcgttccatggtgcaaacactggtaaatctcactcttagctccatgatgaatattgaattaccgtataaatcttgtcattaatggcttaagctaatttgttagatgcttgtcatttgcagtaagaaccttggaacactttgggaggacttgggaaaggttatggaaggtgcggatgaaatagagatagggcaagtggactgtggtgttagcaaaccagtatgctcaaaggtggatatccattcgtaccccacattcaaggtgttttatgaaggtgaagaggttgcaaaatataaaggtaatcttcgtttatgatgcaaattattctatcttgctattgtgtggaaaggtcagcttaatctagtttcaactttctagtctacaatgaaaattgaaaaagagaaaggtatgtttggatctgttagattttctccaattctcttgaggtttaggccatgtgttggaagccatatccccctgcagtctgaattaaagactacaaaccatttcaactaatagaattgtgataatgccaagccccacaaaaaaaaaaatcgaagaccctagtgtttgtttctcaagtgccatttttggagtagcaagtagcatcttctgtgaagattctgccaaatctgctgatgaaaacatttgattatttctagtatctgccagcacttgattctcctctttatatttttccgttgcttgaactcgttatattgttttgtttatgattttctgctcatgacatgacttgttatagttgaagcatgccaggatactgattgtatcctacaattgtacggcatgaagagcatacattacctctagctctaggaaactatgcatgtgctctagtatctctgtcttttcctgccattccctatcttgtgaacattggaatgttactcattctgatacctatcactgcaattcacaacttagagcttgatcttctgctaactgtttgtacttcagaaaatatgcaagtttttttctgacagttatgtgcgtactaaaatgcagattgaatatattgtcatctttttcatcgctgtttcaccctatcttttgtagctttatgctttgttactgcagctttgaggggcaacttctgtctgtccttcatctgaccacccacctgctcgctgatttctgttgttaacgttagatgcctcctaaaggaaatccttgtgatcttttgtgctactgcaggcccaagaaatgtggagtcactgaagaattttgtttcggatgaagccgagaaagctggggaagccaagcttcaggacagttgaactggagctcaagtgttccatcctaccacagttaagcaacaatgtagtactgtttgacatgcttaaactttttgatatagtgagcttgtacttcctcctggcgtttagtagaatgttaaccactgcatgagtcgcatgaaactatgtaattttctgcttcatactgcattcaattacagcatgctatactataaagaagagttcatggaaaaagcgcctttttttttaaaaaaaaagaagaaggcatcatagaagttgcattccatgccattcctgattgcctacaattggttgggacttgggagtccagaaagaaatacgtgctgcgtatattgcttatacgttcatcttaacgctaaattgtttctctctacttggcagtaaacgcgtaaacctttaaccccacgacgaaccattgcaacacataacacaagcttaggcacgaccattctcgatccgtcgacgtcggccatcgtttatggacggactgtagtgcgtgagtttgtgattttttcaatgtctaagtttgcacgagtactgtgtaatgatatattgctatcgctacttcgttggcatgctttctttgtttcccctgtcctccgttctgcaccataatcccatgttcttgtttaacaaaaatcaccagagagaaatcgtccaccataaatgtagtgagatgcgtggtcatggatgaggcagatcaaagtttcaggttcagtctggggaaaatcacttcgatataagctgagatttgatttccttttttgttcagcaaaaataacaagtgaaagcagaaaaaaaggatgctgtgttctaacaatagcatgacattgtagcgccgacaatgtgagccgtttagtaaatcactagcattaagtactaagaatagaatcaatagcaaactagagtaaaactgctacagtgcttcggaatcacattccattgccgataaaacacaacccagtctgaactctaaagcatcgaaattttgccggagctcaaaagtgaagacagtatttaaagatgtacttcctccgttttacaatgtaagtcattctagtatttttcacattcatattgatgttaatgaatctagacagcgttgtgaaacggagggaatagtaggcagcaaccgctgcgatagactatgctgtaactgtaatatacaggcagaagtccggtgtagattagtggacaggtgtagagattcagaattttatttctgaaacttagattcagacttcagaacagaatcgatcatgttcaggaaacaaattccccggggaacgagatgagaagtaaatcttgccaggtgatgcatattcccgggaagcaagcagttttttgttttctctgaatatttgctgataaatactcctacgtatctatcgtcgttcagttacctgtcgagcttgctcctgacatgaccatgcaccgatgcacatgcccgtagcagctcgttactgcagatcgaaagcatagcagcagcaaagctcgtactccctccgtcccaaaa

SEQ ID NO: 2632 - DNA, 11083 bp, Oryza sativa
  unsure (1)..(11083): unsure at all n locations
cggtcagatagcggtccatggtgatgggtactcctccatttgtgtaccagcaaagttgtaaaaacgccgcctatcaaacaatcaatgttgtaccgtagtaacgttaactgtatagaaataataggggtgttattttaggaaattttaagatacgatagatatatatactactggcctatattttacatttttttcgttttgtattttgtagaaattgaaccattaatatcgatgagagataccatatacataagataagtactcttactactcatacatatattatttgctattatgtcatatatgtcttttttttcttataaagttttctcttaaattacttatccgatatatagtccaattacactattattttcattgcaattaaatctttataacttacatgattatattttgatgaaaaatatttatgtttgcaaaatacttttattgtatatgtatgttactttgatcatatatataaatttacttttagatttgattaaattacttcttatacattcataatgctcttagttgattgattttattattgtttttagtcaatttcatagtttatgatatttaaattaaatttctagatatactcatatttttatattttggatggaatacagagagtaagaagttttgatctaagaatggtggaaattttgtaacgacaaaaaaataataagtaatgtaattatatcaggaagcccaatcggtagaggtaaaggtgaaaagaaaatcggttttttaagcgtgttagcggggggctaaacgaacactccgaagtccgaactactagcacatgaatcatcaagaattttgaattgcggcactgtatttggtgagtggtgtcaggcaagcagagtgacggtgccgtttgtttccgcccttccaattgcctgtgtaaaaggcagcgtgttggtgtagcagaatcagagacggcggcgcaagccgacgcgcgggagcagacagtcgcaacggggtggaccgggctggcggagaccgaccccgaccaggccagccacaccgccgccttctctcagcctcaggtggtccccacccccgagcatcaacagcacgggccacaggtgctaccgccgtatacagaggatcccgactcccgagccacccacgcgcgcgtaccggttacgcttcgggcaggtggtgtgtgggccggaagtgggcgcccaccggccccggtgtggctgttccgcggcgcgggatcccgtgcgccgtggcgccccgccacgcggcgccgtccggctacggtctcgtggatctccgacgctggacggcgtgggcggcggccggtttgcccttttctgcgcgaggattattccgtttccgtacctcgcaccagctgctgcctgctgctgctgctgattcccttcggcgccgctgcaccggcgggggcttagagcaaggttaatggtgcagccggctaatgacggtaaaaatgaccacgtcagcttcttatagctagtgccaaaagttaacgtatacaataagcagggttacaccgactgctatccttttttttaatcttaagtttccccatccaatttatcttcttgcttgttgcggtactgtacctattttcccacctcctgcttgaatgggttgctgccagcaacctagcgaggatgtgttttcacaagctacgagcatgacacagatagataccagttgctagcgaattgacaccggcggagccggagaagccggcggatgagtggagcaagggtgaagtaggatgacaggcagctgcacgggaaacgctgtaccgccgtcactccagtcatcgttcgagctcgcaacttctctctccgtcgccacaaccctcgagctagctgctttcgtcgccgccaatggcaccgttgtgtgacctcggagctttcgtcaccaccaacacagccaacgacgtcctcgagctcagcttatatctcgccatcaacgagctctctctgctatagttcttgttgcctcgtcggcgagctttccgctccatcgtcgtcgagcacttcgcactcaagctcaccacggtggtcgccgttgcgctgcctctgcattctcggccggttgccgttgcttcatcttgccatttccgcttcgcctcaactcgcgtggacccacaactgtgtggcccaatcatagctaacctagtgttgctgcactgcgttggagcgcgtgtatagtcggcgataatttactcgccggctcacgctctctctcctgcccagctcatcaacaaatctgacgtggccgttttatcgccggctaaaacagcctattatacttgctcttatcgtgccacgtcacggcgtgtagcggttagtcctgcgtggacgaacgtggcactgcacgacagcacgagacagtcgtgggaacgtgaggtagtacttgttctcagctcatgttgggaacccttcctccccgacacagaaaacgaagtttgtttattgcatgattaattaagtataaactaattttttttaaaaaaatggattaatatgatttttctaaaaaactttcatatagaaagttttttataaatcacatcatttagcagtttgaaaaacgtgtgcgcggaaaacgagagaggtgggttgagaaaatgggggtaagggcatgtacaatggttgtcaatagtggtctcttagcgttgctaattaggaatacttgttgacatggaggaaagagaaagaggagagacaaaacatcgttgttatgcatgacaacggcttaacaacgactcttagtcactataatatggaaaaatggttgcatgaggataaacatatggaaagaatattaacaaaaggaatttttttgagttaatgattagagactttgttgtctcaactattgtaaagacatggtctctaaataatcttgtattatttaagagaccatatccgtctctaccattgaacatgccctaagaacacaatcctttttcttttctttcctaataaaagtgttgatgagatcgtgtaataccaaggtctcattatttttaaattaagataaagatcttatcttgattttcatgttttttctaaacagttaaaggatgtatttagtgtaaaaactttttatatctcttgaaaaaaaacttttatataagttactttaaaggcaaaattggttatatagcagnnaaagtttacntttttggttttatggcaccaaaagttaccagttcactttaatagcacctaaagttcaccatgttcccatttttaacacttccatcaattctcgatcgttttccgtccgtcttgatccagccacacacgatatgacgtttgtacccctcacaagtacaaatataatgcatgtcaatgaggggtagaaatgtcatatcatgtgtgtggctggatcaataacgatcaagacggacggaaaaaatgacggaagtgctaaaaatgggaacagggtgaacttttgatgctattaaagtgaaccggtaactttcggtactataaaactaaaaacgtgaactttcgatgctatataaccaattttgcctattttaaaatatcaaataaacatattcttcaaatctataataattaatgacatggcataaggatatatatttgttgcatgtgatgtgctaataagatactccctttatctcaaaataaaccaacatcataggatgcgacacatcgaggattattcagattcgttgtggtcatatttttatttagattgagttttttcttgcaatggatggggtatttctgattcccaatttttttttaacgaacaacactagacggtgcgatgattcgttgaatagagcagaaaaaaatacaagactagtaccctggaaggcaatatcctgtgtcagagggtgaactcctcaagcaggggatagtgaggcccccctttgttagttcggtcgggggcagcaggtgagaatcgaggactctatggaatggcgtgaagtggagggggtctggcccctcaggaacgaggagacaaaaggggtttatacaggttcggcccgctgagaagcgtaataccctagtcctgtgattggttgatgagtgtgagttacaaagtacttaagtcgcgagacccaagcatgagttcgccaaagaatcgccccctctccctcaccaagcctggacctccttttatatctcaaggggctggcacgtgggcctagaagtctacctagggatgagggaggacattctctacattaaatgcatgtcttgttgcttgacttggaagccacacgcacgggcgccatggcatggggcccatcaaatccaaccggcacaaggggacacccgtgtcattcaccatttaatgggtgaagacttttgggtcctcacttgcgccggaaaacggaaaccctgctttgactgggttagatgaaccgactccggctaggatcatcatcatgacgtgacggattaggtcagactgcatgccgcctgacaagggagtagtacataggcgcaatactccggtcccatcaatcattcggctggtcacaaaccggtcaggcgcacaacacgccgcatgcggcatggcacgcccgctcatgccgccttaaatgtggttaggtgggtgttaggggcgcccacctaaccccgcacatgcggcgtcatgcagagggggtcggggcagcctgaccccaggcatggagggggccgccgccgccctatcctaggcccgaccctccctcgggggagtgccacgtgggtaccggggacggcctcctccctctggtcctaatacctctgggctcatatcatcgacagcctagaaagaaaaaaacaccaccaccatacaccgacaacgtctttatagaacccaagaaaaagttagcactggaccggccatcgctaagcgttaccgactgctgctagatcaacaaaagagctaccgccgaaccgtccaaaaccaaaacctaacagcgagcaacgcactcgactctatccatgcccaaattaatgacaaggatccccaaattaacatgtacaattttgttgcctacggaaaggaagaataataaagacgccaaaacgtaaaagtaaaaacaacaaagaggaaagctagaatcatccactgtcatgtcatctgtgtgaccctatagagcctggagtcctggatgcgatcgagatagctgcatattcggtaaaatgatagcaagctggcatttttgagaccttcgctttcataattgggcgcagccgattcttgtgctaaagctaggaattccaacgataaggcttggaatttgggcgagtgaacaaatgaaaaatctagtcgaactcttctgatagcacgttttctctacgtatgtacagtactcgatcaacagtagtgccgatcgatttctgaactaaaaaaagcgctctctttagattcttgatctggcgacccctcacggccattccttttatcctgcaaccaccttctagaagcaaaagctgagctgtactgggcaaactaaagaggaaaaaacctctaaagcactactcctgctaatctaaaaaccctttgagattaactgcaattaagacctagcagctgggccagaattccagatcgtcatgcatggggtcgccgatgaggtggtgatgagtcataatccgggcaggagaggaggccaccaccatctatcttatcttaatccggagaaaatggacgggttagatagatgtacatgtcatcctaatgaagccatcgatccatttgggataagatgacatgtaacgacagatagatcgatctagtaaagaatactaacctcctcggcagcccaaccgacggcgcagaacgtggccgtgcgtcggatggttgacaaaagaagccagtacaaccagtagcctataacgcggggcatatgatatgatgggttgggaacatgcgcatgcatacggcaaggccatgtgttgggtagctaagagtctgtttggtttccagcgacttattctaagtctctgtcacatcgaatgtttggacactaatttagagtattaaacatacactaattacaaaacccattccataagcttggactaattcgcgagacgaatcttttgagtctaattacgtcatgattttgataatgtgatgctacagtaaacttttgataattatggattaattaggcttaaaaaatccgtctcgcggattagctctcatttatgaaattagttttttttattagtccatatttaatactctaaattagcgtccaaacatccgatgtgatatgggctaaaaagttttagccccatctaaacaccccctaaagcctcggacgatatcgatgattctgatcccattatccttctggagctatgcatgctagctttggagttggaaggggacaacgcactttatgcgtgaccagtgcctggatggtcatgtggatccgattctctctcgaagtagtagtatatatgcgaattgaatcggccgtgtaagcacatggtagatgatagaatagaccatcagtccatcacccaacatttgctatcatggatggtactatttgtgtggtattgattctaggtgtacattctcagtactttattagttggtgtgggagtcattggtagtttggtacccttgcggaattcgctggcgcgcaatacaacagtaatgagtaagtacctctgtttgcaccgtatgttttctttattagctttgcaatcttatgatgggatcattgtattagtctcttaggcatgcatgtgagcaagcaatgagaaggatatcactgttcggggttaagaatcaagtgagtaaaaataattgggaaaccgacgtgtttactttgtggtcgaccaggggaatatcagaatatctgaatatgcgaatgctgaataaccgacgaggaagaagcattctcgcattcagtgcaacgccgccgaccactaccactagctgctgcagctgcacgacgccgcgggccatttctcgtgaagcaacagcaccggattttaaaacctggcctggtccatctggggagtggagacatcacgagggagtaacgtgctggcattctcggttctcctacccagagcatttgtggttgtgcatccgcgcgtgtacgcgcctaatttaggcctgtttagaaggccgcgttcttttcatctagccggtttggatgattagctatacgataaaacgaaatataattaacgtacgattaattgagtattatgaatttatttaatgttttaaagcatctggcagtgtagttttgccccaaatccttagctccccagttcctgacgatgtatgctactacttatcttcctaaacacgattttagattgggaaaagaacaaattacccttgaattaataggtaagttcgagttatagaccataaatcaaacatctttcactctcaaatattaatacggttttggtcctatatgacagtctagtcagcaattcttcttttttaaatcagcgagtcccacctgtcaatctcaccctctctttcccttcatctttctatctctttatatctccctctttccaaaatcatcactctctctcttccccctccctcacctccgtctctctccatcaaggacggtgacggggagagcttggggcagcatgcggaacttgggatagccgaggatggcgagcggtggccaaggagaagtcacgtggcatggaggaggcgcgtgccggaggaggccaaggaggagccgcctacgccactcgctgcttaccacccctagctgcctccactgctcaccgcctccatctcgttgcttgccgctcgagctcctccgccccgctgatttgggagagaatcagagggataagagggaggggtgagggagagaatatgacagatgagtcccaccgttctttttaacaaaaatattgagtggactgccacgtaagaacaaaaccactatggtatcagtggttgagggtgaaagatatatggtttttgggtctaaaaggtataatctgtactcacccaatcgtttaaggggttaattaagacttccccttctgaattagatttgtttttttctccttgatatatgggctggatttggcattgtcattctgtgtatacttatatcaggactagtaataatgcacgtgcaaggcacgtttttccaaatgtatatttaaattaaaaaaagtaaaagtatgggaagaaacagtgcttgcaagggcatatttatacattgacttcaaaaaaatggcaacggtatgtccacacactaaattcagatacatttcatgtaattctaaaaaaaagatacattccatgttcaaccttaaatgataataggagtatattgtttacacacattgcaatggctaaggtcagacactaaacccacacaaaccttacattgactggagaatttctaaacttccggtacttgagctatgagaaattcataacattcattagctcacagcaaattaaaacattgaacaatatttagatgcttgtcgaagttcagattctaaattcagatgctcctacatcataaggacaagtcagaaactaatatgccaaatgctcagaaaataatatatgaaatgttcaaacactaatctggcaaatgttagacatctaaggttcacacatattgcaaggacaaagactccaaatacagaaaatgaatagcttgtttgaggtatatatagagaatttgtcatcagcacgacagaaaattacaacatttttttttggaggacacaacatgagatgtgattggcaatttttttgctcctaggaaatttgtaacaaaaaaaaggaaagtgttccacatttctaaaggctgtcaggaattattaactcagtgcataaccaatagttcacagggaaaatatatatgcctgtttatgtttaatagaaacaatacattaattacactacacaggatgccatataatgcaaggccaatttcagaatgttgtcaaccaagttcttgagcaatgcaagcccaagttcagaccatgtaaaactaaattcaaattcatatataaagttgtatgacacacaaagaccataaagcctcctaattttggttggagcaacagcaaacatggttgggtagagttcagcgaatataaattcaataggaacttaacagtagattataaggaaaatgacatgtaactctttgaattgagattgagcagagagaaccatcagcatacataagtaaaatgcaaatttcagataattcacaaatagtcaatagtgttgtggtatgcatgtggcaaacaagaacattcaggtagataattttgggatttcatatgtgtgcaagcatatgaatgtcaaatattattctgacagggaattatgtgtaagtaatggcgtccttcaaacctgcaatcgtgattaacttgctccatttaagtcatgtgcatcaccttctctaatgccatcctccagacctacaaccctgattaacgcgcttcattgaagtcatgtgcatcacattgcctaattccatcctccaaacatgtggtcagagatgccaccaggcttatatgaaggttgcctcctctcacaaagaaggaaaaaaggaacgcctcttagcagcatgtgacaatggctaggataatcccggatcaaagccaatataaagatgaaattatgcatgttgtagtagtgctagacttctggagcatcatggaatgtgttttggtcgtgtgcccctgggtagaggttgggtctatagcacatacttgtgcatcaaaataaaatatcttatttttctttaacaaaagttcatgtgtttggagaatatatttgtccttggatctacccaaaacaaaatttgaagcgttaggacaaaatcaccaaaattttatcaattcaccagcagctgctagctaggagcatataaggcttgttaatgaaaaagtaaacactcaaattcctagcccagaaaaaggaagaagttattcctattcagaatcagagttgttccatgcccccttgcatacactaagctgagtttctttaatatgtttatactacgcaaatatatgtatgtacccttatctgaccagtgaccaataaccatagtaaaaattagtaaaaacttaaagcaaagaaataatcctgcatatatgaatattacctttttgttgtgcctatggagtatattaattcatatatatcaaccaaaggccaatcaatggtaaataacagaacaaaatctccttgacccttctcatagagcatcttaaagccaaaagccatcatctgacaagggcctataaaaaatgccttccatcctgttcacccatccccagcatatctgtataagctaaagaaatcaaatggtggaatgcagtataacattagatcagaaattaagatttgctttttattaggctacaaaaataaaatctaaacataaaacatttcatgttcccagtaataaccaatgaaaccaacttttcaacttcaaccgcatccttgagtagcaaaaatgttgtatccttcattttttacgcaaattagctttctttgccagaaatacaaaaataatggtttgttataacatgggaaattgaaccaaaagggacaaagaattagaatcggcaaatacccattatactgatcagctgcacgcatgctcttgcttagcacctgtccggccagccaccgcctgatgcatcaccgtctaaccagtcatgcactgctctacattagacaacatgaacacacatgaactgctatattactgagtactcgatttagataattactttgtgaatgactgaacaaatatatatataatttattcatggatgaaggctcacaataatctgtgctcaagaactaaagtactaaacaaatgaatcagaaagggaacatatgaattctcaaaagtgagccgatccctttaatctgatcgaacttgaacaattctcaaacctgcacaatataatttctctataaagtaatctggaagaggcatggcaactacaagtctacaatgttagtctgtatggagcaacaccagtcaccttgataggatatagcctgcaatgatgcacatatggatcgataagaaccgaat

SEQ ID NO: 2633 - DNA, 7556 bp, Oryza sativa
cttaggcttgtaggctccttccaccggtcctgttcggctcagggcttttgttgtttctacaacctcccattccatgtcctccttttcctttgttacttctttgctgcaaaatgcaaatgaagcagcacttaaaattgtgaaacacgatggctaaataaaatcacatatatttattaagacaattggtttagccaagtctagaaaggtaaaaatggtttacctgccctgtataagatgagcgagtcctactgcaccaaacactgtcaaagagataagtggcagcccatatcgaacaaatggatgtttccgtccccaccgtttgaactgtgaggtttgtcgaacaatcttagctgctggttccactggatcagctttctgagttgtttccatggcagaaatttactgaaaaatgttaaaagaaagttaaaagaaatggagcatcttcaaactgaacactgtcagttataggcaatgtaagagagaagcataaaagttcttgcatggtaatattctattttaaaagtgcaaaactatttgactgtatgtatacaaataaacatcaaatattcaaaacattcaaatagcccctcatggcctaggaggaacacaataacatatcaaatgaaaagataaatgcatgtccaaacgtatatgaactatcctgatttatgcagcagcattataatcaacagaaaaaccgaaatgctgccacacagcaagattttgcaacagaatatgatggacaaaagccattattgtagcttcaagttgagccattattgtactgaatagcagaagttgtgccaaagagtatgttggctaagcatcaggagccagcagatgaacctgccccactcattcttgcggctagacggctagtgtgcccagcaacagcaacaaaacaaaacaatattatggtcttctaatttaagtactaaccaataaccatgctaactctgctaaatatgtgcactgataaagtaccaactctgatacaagcctaccaagcttcacaaatccttaaaaaaaatgttcaatcatgaagtaagaaccattcctggattgaaataaaccaaatcctaaatcaactatgaattaaatcctagtttcctaattcattcctaaatcctaaacataaaccatctacgggcagggcagggaatgaggggaagagttaccttcgtccctcgggcttcgtctggagctccggaacggcgccgctggcgctggcgctggcgcatggactggaggcgccgagacacctagagcgggccgccggcgctggcgcgtggaggggccgaagcagcgaagcggcgaccgcgcgactgggacaggggacggtggcaaagcgcgacgcggcgacgggcgacgggcgacggggcgacgggcgggcgtgcgcgggcgcagggcgaagtcgccggcgcggcgcggcgcgtcggtctcctccctggtggcctcggcctggcggctggaacgctggatagggaacgagatgagggtttaggaagtttttgagctttttttttttgttattgggccaatgggcctcaaatagtgaggagaggaggatggtaagccttatagtttgggcttcttttgaatggtagacatttttttatttttctatttttttctatataagtatatactttatatatgtatttttttcttcaaaaatcttggatattcatttgaatacctatgaatcatggtgggcccgcctgagtcgaaccaccaagaaaagtagcaatagaagcagctgtatcggtgtatcgctccctctaccattactgttgtactccctccattccaaattaatcatcataaaatctttttgagaatattccaaaatgatcatcatatttgtgttcattcattatgtttatttgttatttgtgcattgaagtaaatgaatattgatgcatgcacccatgcacaaagtgttttgatttgctattggctaaaaaatagtggggaatgtgtatgcatcgagtttgttgctagaataaatgtagtatgagagagttattatattttcttggtcttaatacacccatgtaatatgattatcaatttggaatggaggtaatacacattgtgctaaactgaactacatctatgctgttcaagagcatgatatagaatctaacataaaattgaatgcctctaatcgttttctccatattctaatccgaaaaggcatgtacttccccttcctgccatattatctattgaaaaattacttaaaaatgagtttgacaaaatagggacagtaaaagaattcctcagacaatgtttgacaaaaatgcttcgaaatggattatttttcgagccaccgaacttgaccaataaagaactcctcagtaacaaactgaggggtcgtagagagcggtcaacagccggagaggtgaggagtgcaggatcaaattaaccatgataactaatgtacagcagacaacgtaattaacaatttttcatccgtaaatatggccaaattagccagaaagagtgaacgacatgtcagacgaacaggaacagccaaactgatagcttgccatattgctataggaacagaaacgcatgatgcaatgtaatctaacaaactgtaacacaaatcaataatgattaaccgcaccatattcttatgttagttagcgaccaagaacactggctgtccctgcacagatgagtgctgtgacccatcatcatagcagcgtgaagaacataggagtatctaaaaacaacatgcaacgtagtaagaagtttaatcaaatgttatatagctatcactgagctctaccagagtagcagcagcgcacccagcaggtgacgtgcagaacttttaaatagcccttttgtacattgaaatgagccggcacatcaaccgcaccgtagcatccttcttcaagaatttgcctatacaaatactagcgcaaaagaagccagctcggtccacccgctgtcaacaatgtccgccggtgagagccgacgaaagctatctttctgtggtgtctgtgttaagtagtatcgtctcgtgtctatactgcttctgatactgatttcctgaatctgaatgctatcaggccaagtccgatatgtcctgctcctcttctttagctttgtcaggtactgttgtttcttctgtgagttcggaggcaacttcaatgggttctggtacagggttgatagggccctgaggaatcccaaacagggtggagaagatctgcctgtggcactcgtcgcagaaacagaagtacgagaagtggccttcatcgagaagtttgtgcactgtggctcctggaaccacccgcctgacgtattcagtaactgacggtggcaccacccggtcatccatcccctgttaagacaaattggtgcgttattgcttcaagaagatattggtaacatgaatgcaagatatcggtagtatgatcttgggaaaggatggtgaagcaagaaatatactggacaattgtagtccacatagtggtaacttgtgtaattaatagtgcctgttcaggattgacttttagcatgtataaaactcaaaatctagattctcagtgatatgcctcagtattcctaaatgatgcaacccaaaccattacaagtggcctctctcctgagctactgtaattcgttttctaacaggtactccgtattactaaagcaagtaggaagcccagattaaagttgtttaaatgggggaatcatcacatgaattgagcaccagtgtatgtacctcgactaatgatgataatggacaaaatgctcatgttttatggaatcacatggtccatagaccaaccctaaacacactaaactcaattctgtatgataccaaactatgacttgagtaattataatctgtttgttttgtcttctatgaacaactgccatcaaaatgccaaatcaattacaaatcaataaatcattttagaacatattacaaacctgccatatgtgtattgggcccagaaatcccacccactcccgttcagcctgacggaatagagatttgatcaattcaaaaaagctcagatcctctctcttctgcatttgaatgtctgacaagctgaatccccaatctgatacttgcagtacagcttcctctacaaaaggctgtgcatctccttggcgcacagactctgcaacatccttttcccaaaatgcattgaacataggactttccagtgaagttttgtcgtgagtaatgcacataagattattatttggcatgatgaagggtcaatgcttttgtaaatcatcatatgtttcaaagcttcatcaacgggataagtgccagggaaaaaggttctaaaattagcatcaagcagccatgcatagatgaattaatagcaccatgcatcacaaaattgttgaaggtgctgctgtcctttgtggaattgatgatgcaattacagtagtactagaaccaaataacagatgttcggggtgaatctgagagcacttggctgtacaggcgtaaaataggaatagttgttaacagtagataaatgataattcacacaatagctgaagcctatgaagttgtgtttatatgataacaataacaaaataagtttattagctgatattgagtaagcaaaatcattggaaagtgtgaggcacaaaatcattagaaacaggtggtcataagttctccatcttcctaaccaccaccctataccaactctactgtaccatcttctgaggtacaaatgatgcatatgctacatgccctctctccaatggataacgacagagatatatagtacagcaaatatttatagggcaggcccatgtcatttcaaagtagtaccgtaagttagcattggcaccttaagagtgcaattagcattgatatcagcgtaccttcttccccagtgaaagtgacagccaactctcaggctgcccttgctttccagaaaggaagcttcggtgataaaagagaggtaatagggccggaaacctccgagctaaaatgtgcattagtttccgcttggttgaccacctctcccatgttttgcgtctttcttccttggtcatcttagagtcgtatggatttgccataggcgcgaacattgctgcacctggattcataacagttcattatgagcattcaatcaaaagagcagactatcatttgtgttgttctaatacacacccaaaaagggttttaacttttaactgagaaaataaagattgagagtataagatgaaattgagatgaaaatagaacttgtcctgatcaaataaaaggtggtgctatgttgttgtttgactgtacccaaatgtactcatgcttgacaaacaaaaaaaaaatccctggacaactatagatgttgctaatctgattcaatagaacatttctgttcttatcaagccagcaagatgattgcacttgaagtactgaaatatacctaaccatcataagtgctgcaggtaacaagcctactagcatgtatactttgtctggaattagggtaaaagtcacaagtatttctaagggcgctcccaattctagccatcacatataaactacaatagaaactatttgcccaatccatagtttctacataattatatgggaccaaataataaatttctctatctttctatccctattatttgttttgtctctagtcttgtgccataaacactacttcaacccccaatgccatttgtatagtgtctcatgcaaaacatagtttcacttcattaactatcttgccacatcatattcggtcctatatggcaagctatctaatgcaatggacactagttgacatggaccattgggagtgctctaagtgtttaaagtcataagcacatgtaatgtaaagatggcctgcctagtgtgatagtgtgaagtcagcgccgtcatcaatttataaaatcaagtagcgtctaatatgtacaggacaagtctacagatagagaaaatcaaataaagacggcgaaagtatctgaggcaggttacctgccactcggtcaggaatgtggcgaagagcactccaagcatgaatgctacctgcagaatatcccacaacccagaacttgtccacaatcctaagggcaccagccaagtgaagcatgtcatgtgcagatgaattcagatcccggcctgggtgaggatcactttcaccaaaaccaggaagatcataggtcacaagtcgtgccccaaattcctccaggagggatggtttgattcctgggattcctgcacacgaacaaaccatgtagatcaaatatgtgatgttgtcatgctgtgatgatacgttaaaccaaacaatgcaacatttggtcttacctgctaacctcgatgaaagaaaagaatgaggagcaatcagtgaaaatcttgccctgtcagctgtgactccttgttctttataagccagatgccttccatcaggaagttgaattgttttggcacttgggggacctatgtagagtttctttggcagttctactggggtatcatcaacactccctacacctaatactgcatacaaaatattcctgttaatcaagcgataaaaaaatgatcccttgcattaagaaattgtttacttggattttgcatttttcgcgaatcaattaaagtccatagcgcattgacaaaatgattgtacaatgtgtagcaggtatataggagggtaaggcagcacttctgggtagaattccacatgctagcatgcatcgagttcgcgtataagcaaccaaatgccataaattcaaaagtaagagggcaaaaagaatccacttggcgagcaatctgttggcaccaaaatagtaacatctataaagccaaaaaaaaaagcagcttgactcaatagtaaacgattgactgaccaatgaccacaatattagacattaggttgacccgccatgaatttcaaactgcccgtaggccactgtgcgttgtaccccatgaaggcatgaacacaagcgcactaggcatggatcccacaataaaaaaaaatctccttgaaataattacacgctttaaccaatatatatatatggagtaacgttcacaacagaaacgccgcataaagagacagattgattctaaatccaaacaaaatcttaggggaaaaaaaggagcaccaaacggttagttagatccatcccctctaatgaccgaacactaagcgtgcacgctcatatcatacatcgtgatgcgcgacggcataaaccaaaactgcacgctgagccgtagtcagagcctctcgcacgcaaggccgagaagatcgtgggtgggggggagagatcagcgggggattataccgatgagcgtgacgaacgcgacggcggcgacgacgacccagcaccagacggggtcgcggtcctcggggaggtactcgttcatgaagctgaggcgcttccccgcggccgcggcggggcccctgagccgccgcgcgagctcgctgtcctcggcgccggcgaggctctgcgcggcgatgtcccacagcccgcggcccagcacccgcagcatctccgccgtcgactccaagaaccccctcgcctgctgcgcccacccttcctcctcc

SEQ ID NO: 2634 - DNA, 1706 bp, Oryza sativa
cggcctccatctcttccgcgtcgccgcggcggccggacgtggtgaacggcgtggggcccgccggcgtagacggcctcgcgggtccgcccgtgcccgtaccggactcccccgcccccgcctcccgtgatctccactggctgcctcgtaagtgacgacgcggcggcggcggcgccggcggcgtcttccgtttgtcgaagtcgatttcgggggggttgggtttgagggttctgctatcatctcgttctgatttgtgttgtgttgtgtggtcaggccctctcaccagcgccgacctgatgggcgtcagcggggaggggctcaaggttgcctaccaggtgctcgacgaaacgcgcgtgttttatgcagtcccgtttcgtatcagtctccgtgcggccgtggctggttgtgcgtgggtgactgtgtttctgtctgttcatctaaacgttgttctgttctgatgatgaatatctcagggttgccctggagcgtacagcgaggcggcagcgaagaaggcgtacccaaattgccagactgtgccctgtgagcacttcgatactgcattcaaggtattgcagtggaaaacattgcaccttgtgtgctgtttatgtatgctgtagatgcagcattgaagatgatacacgtacaaaaaaatgtctacaaacatattagaaaacggatgtgcacattgtgattatatcttgatttttcataactaaccactaattatatccatcggttgaaatctttgttagttagagtttagtaaagattctttagtatgtataacactactatgcttatttatcacattgttatgcaaaggaacaatcctttgtttgtccttaaaagttttttagacagtgttcagtgctacttggcatgtcaagttctggaaataggcatgtaagggtccttacataatgaccagatattaataagttgttgtgtaacaaaatattattttctaaaaatagtatttggtggacacttggacaggcatgtatcaaagactgagtaatgttatgaacattatgtgttcttgtttcccttttaccttatgtacattgaagtttgtgaattatgtactccataaatgttacttgtgtggagtatttgatttaattagctgattttcccagccaagtttgacattttattttagttctgttttgcaaacaaaccaaagaagtccatatttgaggtgcttgatttcatattctattagcacaaattgatcttgagatctctgtccctatgttagacagaggatttgagagatcacctattcgttctaagcttttaaacttttggatccaccaaatgaagggcttgttttaactttttatgagaatttctatcatatttattatacttttatctatcaactgtaaatcacctgcagtcaaattttattgtacacaagcaaatagacataatgtgcgttgatgccccttattgcttttacaggctgttgaaaactggttagctgacagggcagtattgccacttgagaattcattgggtggtagcatacataggaactttgaccttttacttcgtcatagattgcacattgttggagaggtccgtcttgctgttcgtcattgcctgttagccaatcccggtgtcaagattgaaaacttgaaaagtgcaatgagccatccccaggtcaaactcttgcacaagatggcctaaatattctttatttt

SEQ ID NO: 2635 - DNA, 2455 bp, Oryza sativa
ccattgtctcttgtactgcaccagtggcaccgtcctccagtcctcatcctcctctcggccgggggcccatataaacccccaaggggagcgtggcttccattcgcccaagcctttcgagtcgtcttctccccttcttctcctcctcctcctcgattcggagctccacccgcagccatggctaagaactaccccgtcgtgagcgccgagtaccaggaggccgtcgagaaggccaggcagaagctgcgcgccctcatcgccgagaagagctgcgcccctctcatgctccgcctcgcgtaagccgtcgccctcgcactcgctcgcttctaggttttgtgtagaggcggatttccgtagactgatccggtttttgtggagacggatcgcgcaggtggcactcggcggggacgttcgacgtgtcgtcgaagaccgggggcccgttcgggacgatgaagaccccggcggagctgtcgcacgccgccaacgcggggctggacatcgcggtgcggatgctcgagcccatcaaggaggagatacccaccatctcctacgccgatttctaccaggttcgccgcgagccccggatagatctggatggacggccccgatctggtcaaacggacgtggttctgatgttttttccccgttgtttttgcgcagcttgccggagttgtggccgtcgaggtgtccggtggacctgccgtccccttccacccaggaagggaggtgagatttcctattacctttcaactcttggggtttttctcagggttctagttaggccttgatatggcagtggtaaactggatggcgtgtggatttgtttgtgatgccacgagattagtcgtaatttgttagtgctccattgatgtgtgtgcttttcatttgtggggactgggggttggtggttcctagagagtagacaaagtgatcaccactaatctaaggccagcagtataataatattttaacagtacggacttttctatattatatacccggataataccgtcaaattgggtttgttcgtattcttgttggtgggtcggcgttacttgacatcctctagatctagaggtggttaaatatccgtgacctcatttacatttccgtaagaccttgtttatttaccataaacatgctaattgttattttttagttattgttggctcatgtgtttgtgtcagttgagtcacataggattcattttcatgcatgctgtatggtgtgaagtttgttatccattcatgcacaaggatattatttttaaggatgtcgccttatcctttttctttgtagtctggctattctcaaagtagtcactgatttaccatggttgtttgcggcatttccctgttcagggttttgatagttactgatctttcattttatcatttttattttttactcaggatagtagttctcatcctaatcgatgtcatactctaaaccatgacaaataaacaattattttctgaattaatggaagaagccttggggacctggaagaagccttggggaccggggttgtttccgttctctatgcatgatatagtttgatctgttggattgtgccatgtaggatatttgttgtgctttgtgaatataaacttaagaaagcatccattatttacaagtctagttggttcagataaagtatattagggcctcccaacttattgcattgacataaaatgataattaggggttcaatctgaaggcagttggaaagcttaatgaaaaaacagtgggccgatatatatctatatgttatgttttaggaaactttagaaaggtgacttggtgcttgttttaggatataataactgttatggatatatctttttttataaatacataatgttcagtaattattatgcaccttcaacaatatcaccgatgatagtaatatatatcatatatgtaacattatacagtgcttaaaatttgcttgtgcatatctggctcatctttatatttatttctaaaatggagagatgattaagtgtttttttatgttccattttatattcattgtgttgttaattgagattgttttcatccttccttgaccttttgcaggacaaacctgcacccccacctgagggccgtcttcctgatgctaccaagggtatgttgccagtttacactactagtctcttccaggaactatagaaacattcaccactattgccataaaagaaacccttgcaaataagtcatcctttaaaatgtttttgtttctgcaatagttgaggtgttatttctgtgtagcacatctaaaatgcttagttatggtagaagtttttcccactgcacacttgacaaatgattcctgtgttgtagtaggcatgttgtatttttctgcatgcttcatttctgatatgatcctgctttgaccttgttctagtaaacctcatgtaaagcaccattgcttacactttgagcttgattgctt

SEQ ID NO: 2636 - DNA, 797 bp, Oryza sativa
ttcccttagttagcctctgcctaggagttcaaataatctagctctactcagaccaaagtaagcaagcccatggggacaatctgctggtgcattttaccagcaacttgtcctaaacaaaccccatccaaataggtccaaagtgttgcatgtttcctactacctcggtcctagaatataaggagttttagggttggacatgggttttcataaagtaggtggaattaaatgtgggaaggttgtgattggtgagaggagaatataggtggagaagtttctatattctgggacaaattttgaaagctagaagttgttgtattttgggactgaaggagtgccttttacactcgaattaaaagggttggtattttctacagcaaacaatacggagtagatagcaaaaggcagatatgcatagtcattacttactagcatgtgatatgcagaaggtgcttgctatttaagcttcatttacatctgtaggatagcttccaaggactcttaaaaaggttgcaaactcctgtaaataaaacaagatgagtcacactgtttgcttgacacaaggtcatgcgaatgaagaaattgcaccttcaaatttccaagagcattctgagtttttggatcagccattgatgcctcaaggtccatatagaagaggtagtcaaactgcctggttcaaaccaggatcaaaagggttaagaagatataaacaacacaaagcagttctcagtttttttcttaggtctggaaaaaaaaaacttaaggaaaccaaaacgacaagtatagcaatcattgggttg

SEQ ID NO: 2637 - DNA, 601 bp, Oryza sativa
agggtagctggtaatgcagttcagacctctttgaaacaagtaaattcctctatgaataacagaatactccagtgttccaaatggggccagtttgtctcacttactaggcatgtcttgtaagttacacttgaagtatccggaacaacaactgtcttcatcagttggaggctcaagaatggacactgggcttggttgcccaacctctttcaagcttttatgagactttgccacataactatgatcagaaacagttattgattcataatcacggcaattgaaaggtgatgctgaaacctaaaaaagggaacacttgagtgagtggtacaccagaaactaatgcatgaaaattgattctctcccagtgcgtcattatattgataaatgaaggcaaagtaaagcatcctagtactacataaaccaggtactctaacatactggaacagtacacttctggactcaagaaaaggctaaagaaagagaacctactattttcaaagaaaaaaaaatcaggaaaagagcaattagaggctggatttatttccatataattatcaaaaaaagaaggaaaagagcaatttcgatttctgggttctcattagaa

SEQ ID NO: 2638 - DNA, 808 bp, Oryza sativa
ccgccgcgccaactgcaacctcgcgtccctcggcgccgagccgcgcgcccagccgccgacctcctccgcccctcgccgccggcaaccccggggccgcacgcccccgcgcttccctcccctcaccaccaccagcccgcgccaggtacgcacccggtgcagtttttaaccaacgctagttacagctgtttgttaattaacgtgcgtcgtccacggtcgtactgacgagtgagatcacatgcctttggcgagcagccatcgcggtggggtccaggggcgtgtcgccggtgccgtggtactaccacccctccacgacgccgcctccgccgccgccgccggccgcgcactacgccgcccatggcggccaccaccagcaataccacggcgttctccccttctaccccgccgccaccacctacgggtacgtgctctcctccccttctaccgtactacaattctactcgatctcttcgcgcgcacaacgtttcgaacccaaacggctccaaaaaaagaagaaaaaaaaacggacgagaatttattcgatcgacatcggaaagcttcggatctaaatcgcacaccggcggagctccgttcaccggcaggcggcagcccaccctgcctgcttatctccccgagcaattctcagctctgagccgcaatctcggcgccgcgtcgagcacgcgactaacaattcagagcaccacctcggttattcctcctcaatgcatggctccatccatccacgcgacgaatcgatcgaacagcctgtcctagccgagcacccggatcgcgcatctgtggtctgataagc

SEQ ID NO: 2639 - DNA, 3231 bp, Oryza sativa
ctcctctaacagtaacatctagtggatcatggtacacagaaatgaatagcaacagagcttttatacttctaaatccaaaaccttgatccaactaggacatgatgactttcatagacattagagatggttcagggggaattattttgcagaaagtatttacttccaaacaaatatagctgatctgaagtttctaaaaaaaaggaaaataacgttttaacagtgatactttgctattttaaaacttcaaacagcagaatatttgaatgcagcacattactccctctgttacaaatctctggtgtttctggaattgtacgctctccaacatgtgcctttgactgttacttttaatttatattctgagagagtgagagtattattttacagcaaatgtaatggtaaggctttcatctgattaatcttgatagtgttatgtgggttagcatttattgtctgagagttcacggcacacatgccatgttgacatacatttgtaaacagaggggacaattgagaattgaaatggagtaacgtataatcaaatagaatctctatatggattctctctcgaaataaaaaagaatctctatatggaaataaacaggaatgtctccagcagctggagaaaagtccaaggaatttgaatacctcactttgcaatgcagaagatgctgttcctcgatctgctggatcaactgaaagaagaacatccactaacgccacagcaggcggaggaaaatctttaaatgtttctgatacacgcctagcatatggatgctgtggcttaaaaattgtggcatgaggaagtttagacttcctccaatagtcctctgatggtgaaccacagagtttaaatattttatgtaactgctcaacctacaaaaagaaaaaaaacaatatgaacactatttcaagacaaattcaaagcattcactaatagcgtttactccctctgcccactaatataaaacgtgttttgattacagaaattcaaatttgaaagattttgaccaatgattagttactacctctgtcccaaaatataacaatttttagctatgtatctagacatacccctgtccagatacatagctagaagttgttgtattttggacagagggagtaccatacaagcacatttagtgtgtcaaacttatagcattagattcatacttcaaagtaatttcacataatattggttttacagctattgggattatatttaatgagaaattagtggtcaaagtttagtcttaaaaacattctgcaattaaaatgcaccttataaacatgaatggagggagtacttccaagtaaaatagtggtcgacagcatacctcagttctaccaggcatgataggcttgccagcatataactcagcaagaatgcagccagaactccaaagatctacagcaacaccataatttgtggcaccaagcaaaagttctggtggtctataccaaagtgtgaccacacgactagtcaaagggtgacgttgttcaggatcaaagaaacttgctaggccaaaatcagctatcttcaaaatgcctcggttgtcaatcaaaagattggaacccttaatgtcacggtgcagaatgtgacgactatgacaatgctcaaggccacagagtagctgctgcatgtaacatttaacctgcaacaacagaatgatcattgcccgcttgctttactcgtattttaagtaaacagctacttgaggcttttttaggactactataggatgcaatatattcctttagtctttctttacagctaataagatttaataacgagtacagattccagaagaggtaatatcaatatacctgagactcagtaaatttcactccaggaaaagaagctagtccagctaggtcatgttccatgtactcaaaaacaagatataagctacaagacattcttgaagttactagaccctccagcttaataatatttggatgatcaagccgtcgcaaaataaggatttccctggccatgaacttcacactctcaggttccaaattatcaaaccgcactttctttagggcaacaatcttctccttttcaagatcgcgagctctgtaaacattactgtatgttccctgaccaatctgtataaacaaaataacaacaactgaacacaccatggtataaagggcgcaatcagtccaggtgcaaagtaaagtttaacagtgcacaatctagttacaaagaaaaagggacataattgtcaaccaaatagcagttcctaaaattttgaagttcagagaaataaagtatcccgtagcaaacaaaacaggaaaccgcggtattataacagctaaacaccagtgattcagctaaactgaaactggatcaactgttagcagaatatattacattattactattactatttaaattttaaaccaagtttgcaggtgaaaaaaaaaagttgccaccatactctcagatcccatagcaatgtagtactactactagaatagcattgttcaccccaccccattaatagcagggcatgagttgctagtaatgcccactgttcccaggttccaaggtccaccaaaattatcaagaaatccaaaataaagaaaatgccaccgcattttcgcatccaacgtaaaaggtgcctcccactaataacagatttgtactgtttccagtcgtcctagctaccaagaatccacttaatagacaacccaaataaaaacatcgcgatagtacccaccctcatcaatcgtcagtaaatatccctgtaagaggggtaaactccccacattttacagcccaattttaccttttttccttccattagagaaagtatgaaggtggggagcacattgttaatgcatcaatttatattctcaacgagaaacagaaatccaaaagggggaattcgcagcccgcattgctccaaattctcgccgttccaatgttccaaattagagatcaaagatgagagcagaaaatgaacagagccaaaatggagatgtagagagagagagagagaggagaagagagtgtgtgaccttgtcgagcttctcgaacgactcggcgcggcgaggcacccacccgcgcacggcctccgcggcgacggagacgagccacggcggccaccccgccgccacctgctccccctccaccgccctcggcacggggctcctcaccctgcacgccgccatcgccatcgccgccgccgccgccctcctcctctccgccgcctcctccct

SEQ ID NO: 2640 - DNA, 17525 bp, Oryza sativa
tccccctccctcctcaccatccccacccccatccccacacccttccccgccgccaccgctgcctccgccgccgccccgcacctcccatcatccaccgcagccgccctcccgcacacgcaccccatgcccgctgcctacactcactccgcccacctcccgcgccggcgccgccgccacgggcgcggcatgcggaggccgggatcttcccggggtaggtcgccgcgccgccgcgccgaattggggcgcgcgcggctagggtttggattggagtggaggaggaggaggaggaggaggaagtggaggggagtagcaaaaaccagcaagggagtagtagcacactagcaacggccaggagaagaagacagcgagaggggaaggggagggacctgtttgtaatttctcggttttgtttgtaatttttttcaggggtgtttctgcttaatggcttctctctaggtctttgaggggagggacctgtttctaatttcgtggttttgtttgtaactttttgcagggttgtttctgattaatggcttctctctatgtccttttgcatttgaggaccttgaaggatggatatttttgaaatggaggtaaatgtcaataccttgattcctcttggtcacatttctctcctctaataacaagttaagcaaataaagttaaggttttccgtaaataggcttcgattatagataaagaaatgtcgaatttaaagtttgtaaaagtaggacccctagataacatgcaagaagggatttgtgtcattggcatattgttcgccaaatttctagatgagggctatatataataattttcttgctgatattagcgactatcatcttggagagaacggtagagaatagcaaaattatccacaataagctcacactgtatgattgattggttaatatgataagaatgtctagatttgccaacctttaacaataaaaatcagtcacgctttagttgcatataaaacccacgccatgctttcaatgaacactggtgcatgtatgggatcaaaactgcattgcgacactcgatactacgaaaacacaacaaatgtataacttgatcaaacttgactaatcacaagtatgtctatttaaccacgtggctcctaagcccaaaagaagaaatactcccatacttgaggggctcaaagagtcaagaaccatagcaacacagttcatgagcggcaaagacaggaagcttgtgagacaacttaaaagctgaataatcaagcttttggggggcatatatgcagatccctttttcttgcccccacacttctttaaaaattataaataaataaacaaaaatacagaagctgttcttccctgtggtgtctctgcaccggctcgccaacttttcctaccctccaggatctcactgacacgtgagtcccacatatccgggcccacccgtcagcgacacgtggcgacgcgaggggtatgatttctggtgcgggtcttcgagaacggcgccggccgttaaactgttgtcactgggctaagctagctagctgccaatttggctcgttgctacgcccacacggtgccacgtacacaggatctgggcatagaggtgtgtgtatgacatggtgggcccaccagctgaactgctactgtttgtgtattgtgctgatttggcaggtggttgtggtaaagcttcttcacgatgggatcgagatcgagtttttttttaactcaataatcctcgtgggcaaaatatatgtttttgtcacgagaaatgcatggtactacgtgtcctagaggattttttttcttactaattaaatccaagctcgtttgttagtacacaacgagagctttactactggccactaattcacatgctaaagctgatttatacaggacttttggcatttatatatactgtcatggtgtttctatttttcttttcattgcaaaaaaaaaaaggacgctccctgtcgtccacgcgcgggcgaccggccgccgccaccggagcgcgccgccggaaaccgcgcggcccgccgggatggcggcggcggggccaaaacccggcggtggcccgtcttcggcgtgaggaggcgatgcagcgtgccgggaggccgcgcggcggcgcggcttgtggctgcggatccggcgccgccgccgccggatctgatggcggcgcgaccgggcgacgggcgacgcggcgcaaccgggcaacgggagacgcggcacgccaggagacgggggttgacggcggctggtggaggggtcggcgacgatgttggagatgatgcggagaccggcggcaggctggggcggcttcgcggtgggcagcagcgactcgtgccgaggtcgcggcgtcgacgggaggttggcgccagggcaggagacggcgcggagacggcggcaggcaggggcgacgtcgccgtgggcgggcagcggtggctcgatccgtccgcgcgcaggcagaggctgtggcggcgtggtggtcatgacgacgacggagctgcagcggcgcggacgttgagccggcttgtgccgccctggctggatccggccatccacgaccggatttcgcctaggtgggctccagcggggttgttcgctggcatctcattggcgacgagcctcctgccgagcagggggcttctttggccagtggaggtttggtggctcaagggcggcaatgcatggatgtggagttggcgggacgacggcttgtgctggcgtgaagcaggaatggggcttgatgtccgcggcggacttcctcgttgctggccgagtgtttttcccttccttcggtttccccccttctttggccggacccttttctggtcgtggggaacgctagggggagggcggaggcttcggtttgccgtaggagtttgcggcggattgatagcgttttgagggtggccaagggcccgtctttgccgtttgttacgatcaaggtatgaatgcttgtgagacgtcatagactattctatggccgtcgatgtggggtgcttgtgtgggtaaagtgaagatgctagcgaaagtcttgccgtgcctttggccggttcgacgacgacggcgctcgtggtcgtcgtttcccttcttggaggcgttgtcatggcgttctttcatatcccccacaaatcttcaggtgaaaaccttgttccggctttcggacgagcggcgacggtgttacgcgtcgtgtcctccttgggggcgtcgcttcagagaagtttcaacgcattgacgactgttgatggtctttttcgcttcgaaagctttcatacattgtgttcggcgaggctttcgccttcttgggtctacttcgtttcttgtggtgagtgtcacgctctttggttgtttctgttgatgaagtcgaagctgctcgctgatggggtgcggcgaagcttggcaacgatgacatgttgcagtctcttccaaggagttctggtgctagccgtgtgaaggaagtggctcctcgatggctaggctgatgtccattgttggatgccggagctgcttttcgctttggtgattttcgtggattcagtgtcgctgtggttgtgaagtcggcgctgctgggtcgcttgggcggctagctcgacaacgataacacctcttatgtgatatgggagctgtttagtcgcttttgtgttcagcttggcggcgacatcctgcgtttgggctccgccgtagttgttagttatgtagggtggttttcagccggttttcctgtaattaaccgtgcaattgtatggttttcgggtccgattttccttataagctgggtcaattctcttcttctaaatataaaagtggagcaaagtttcgccttaggtttttttttaaaaaaaaccatgcgtctgagtttttacaaacatcctatgtgtgtgtttttggcagtatgaggatgtctgtttcctcgcactgacatcttacttgaaatgtcgtctctgcaggtctgcagatatactgtattgtccatgataaaattaagagtagaatataaacaagcagacagctaacagcttgctaccatgagcagtcaagagacaatgcaaattaagattgcaagtgtgtgtgccttgaaagttgaaaccatgcaaaagtacagacacccaatccatacattaattacacaactcaacttgcatcatcatggtaagtattggttcatttttaatccatccaagcgatgacccaaaattaagtcagctagccatcccaatgtacacaaaattaatgagatagagagggagagagagagaaaaataactagacaagcgtggacaactggacgaccgaattagagcaggtacaatagcaggctataaaccagctataaacatattttaaagagataaaggaaaggagagaagagcagcgggctacagatctgtagccagctgcagcacagactctaagacgtactgtgtgtacgacaggtaggaccaggtattaatagtatagcaagtaactactgtatgaattagctattactagcaaaagtgcccgtgcgttgcaccaggtgattactgagtgtgtatattgaccaaaagtgttgtttggtttagcaaaagtgcctgtgcgttgcaacgggaagcgtatagatcagcagaatatggaattaattaaaatataaattcactgaaatatttggtatttttaagtaggtatgtatataattaaataaaaatttacaagtaaagtatgtgtgagaaataaaatgatatggttaaatttaattttattaaattctccatgattagtttcgctctttgaaattttatagaattttcagagcttaattgctaattttaataatacaaacttcatttaacaattatttaattggaaatctaatttaagtttttgttgggccgaccgacctacgtgtggcccatgaagcgcgtgtggcccatcactgatgcggcccgatgatggaggccagcccgacgcgggagcgatctgagccgttcattttaatggacggctcagatcggctcctaatctatcaaaacccccaacccaaataaaacctaaccctaatttcattcttccccttcctcccctccacgcaggccgcctctctccctgccggcggccgcgccgcacccccaccggcgcacctctccacgctccttcccaaccggcgacgcctcttgcccccctccccaccgccggcggccttccccaccgagcagcggcgacgacggcggtagcggcgccctgccctcccgcgagcggcggcggcggtgacggcacactccctcgcggcgggcggtggccgccgcaccactctctcggcagatccggaggtggtggcggcggcggtagccgccggtggatccgaaggtggcggcggtcgtggaccggatgcggctccctcctcccctctcgcctccctcctgcccctgatccggcggtgatggcggtgtcgtaagttcaagtgccttaatttggtttcggtgattaatgacaaatctaattatatgagattaacgtttttatgagcctttctttgactagtcttatttggatatgaaagtaaaaatgatgggaggtatgtattaaacttcgcatattctaacttggtctctcttgtggatccaaaatatagtgtgagctccctcattgatcttgattgattatgcacatatgtgttcctttatatccatatgtatgtacacttgagggggagcttattctatattttgtttattataagatttctatcttgatttgaaaacatctttcatctcatctctctatattgtttatatcgggttattatccatcaccaaagagagaaaagattgaaagatcttggattaaacaatttgtgtaattgttacgttggtgatagatgataaaccgatgtttatgggattaacctctcttttgcataagttatctactaggtcatttcccgataatgagatgtggaagacatgcattcttttgtgatggaccttaatcatgacaaggatgaaatgcatggagataaaatgatatgtaccacttcttatctcttactttttgataggttcatatatatgatttccatgttattgatatataagtgtgagactaatgtttacttgaatcttatcttatttagtctcgtttacattgagaacatggagatcatgaaggtatatgttttatgttggtctatatcattactacatatgccttctctctatgtgtataggataaaccccaattggtcattctctaattatgcatacacttgcatctcttgtatttatttgtatgcatatatttagggggagtaaatcctatacatttattgtgcatgttctagatccatgttgttcacctattatttatatcggatctttgcacttaaggttgcatacgagtatatgacacttgtgatgttaatgaatactcaacaaacatatccatatctttcatatgtaaccggttggtcatcaagtgaaggatgacaactgatttgttgagactaatgttctcctttgatatgtgaaaaggaatagatcccactatgatgaggctaatggatgacaccatgggttaatagtcaccaagctaaggacatcgccatgttggcaagaatgaaatcaagcttgtgatgagaagaaagtcttgacaaatgatggtaaataccttggtataaacatggttgaatcaaatggtcacaagtgttgatctcaactcaagcttgaccctaagatggatggcgcaaggcaaaggtataatgtagctaagaatgttttcttagtcttttcctggtcttagtgtttggtgtagaccggatttgctagataggcgctgtactatcaagaggggtctatgaagcgagcttgtggatgatcttgtgccatattagttcatatgcatgtaggtgtatttggtgggcttgtctagccaagtgtggtgagttttctcaagtcctaaacaaagagagatgtgggcaaatcctataggtttgggtagcctcatgtggttatgtccggtggagtatcctttggagtgtgagccctttctccctgagaaaatttgtgtttcttggatggattgttcatgggttggatagccctttgaataagctttccataaagccaagaacgccaaattccgagacccgagtcaagagatatgttgttttactaacggtcggttgagctgaaaagtgatctgcggtctgaccgggcctgttagccggtctaaccggcgtggtaaggccgatctgaccggccccagtggtctgttgcacttgtctggtttttggtggcgagacagagccgccaaagccacaaccggtcggaccgagccaaaggcagtctgaccgagccgtggaaggtctgaccggccactacactgcggtcagaccggccaggttgagtgggctcaatgattgccctgtaacggctagttttctagccgttacaaagtagtccggtctgaccggccactctatggcggtcggaccggcagagcacagagttggggatttcgaccccaacggctagttttggtggttgggggtatatatacccactccccagcaacaagggtaaggttttggcactccattgcattatattgaacccttgcaagagctctcacacccttggacacttagtttatctagtgaggtgttagagagtgagttaagccaatccaagtgcattgcttcattgttatagctagtgtggcacttgatcatcctcggcaagcatcctagacttgttactcttggaggttgccgcctcctagacggcttgtggaggtgttgcccggtgacctctctgaggagattgtggaggaggccaggcaccggttgtgagtggtttggagttcaccaccttcggagtgaaggaagaactaccctagtgatcgaggctttggtagtcctctccgtgggccagctcccgccttacccaccccttgacgaagggggcgtgcggtggcttcgtggttgagcggtggagttgggctcgcctcaacggagattaggaaaccggcgagtttctgaacctcggtgaaaatttcttgtctcttgtctcctttattttatgcaaatttactttgagcaagtttacatactagagtttatttgtgctattatcaccctaggcttgcaaacctcaacataggctagcttctttgtgcacttacttgagactagttgatttaggttttgaattgtgcaaaaccattttgatttacgcttccgcatataaaactcggttttagctaaaagtttgaaaaaccgcctattcaccccccctctagtcggcctccttgatcctacaggtgtcggcggcgtcggcgggtgggttcgtggccgacggcgaggtggcgaggagcagcgcgctgcagcctccggttcggctcgccccttctctcctagtcatctcgtgttaatatgatgttttctaatgattccgatttagatttggacttggattttgtgtttgatttggatttggattgtgatgatttgagattggagagaaggtgtgctcaatgtgggattctatttgtgtgatgatggaattccgactgggttttttgagggggggagggacgaaaaattaccgtatggatgaggtaacgaccggaaaaatccgaatatttatattagttatagatattggctataaatgatttggagctagtagttagctatactattaaacttgctcttatagtaacaagtggagggacgctgtcacatgaaacaaactgaacaggcggactgctatagattacatagagagattattattgtcctcgatatggttccaaatcatgtatagttagatccgcaatttatcattaccgcgaagtgcgcgcgcaaataaactaaaatagccaaactaccgagaatagcagtagcacttgatgacgatgaactcagcattacagatcgaggctaatataggcatatgcaatttgatgtaattaatactacattcgttccaatttaagtgtagttatagattttcgtgtccaacgtttgactgtccgtcttatttgaaaactttatgaaatccttttaaaaaaattagtatttatattttatcatctaataacaacaaaactactaatcatatttttctttcaaacaggacgaacggtcaaacattagacataaaaaaaaatataaaactgcaaccttttttttgacgaaggtagtactatatattccaatactattatagtacatccgttcttatactgatcgagtagggcattaccgagtaactaaaaaaatctataggtgatgttccatatatattttcatttgatttagtcaccccctgtatatatggagctcgatagatcgagcgagcgtgtattcttggtttgttgcgtggcatgtagggacaaagtatatatggtagggcaatagacgacgcctggttgctttgctttgcttgctcaagcagaggcagaccacatgcatgcatccattcgacgatatatggatctggccggtagatcgaaaaagctaagccaaccccaaccaccgcgaggaagtggcccttcccgatcattaatgcatgctgctagctactccctcagtcacataaaaaaacccaattacaaagacgaatctgaatatagcatatgtttaaatttatccttggaatttaatttttgttaaaatagaggagtagctgctacctgtatatacaaacactagagattatcttcttgttacgatcattaatacatttccgaggtatagcaggcaacaatgactctgaagaattattgcaaacgttttagctacatatatatagctcatgatctgttactaatggagacgccgtacgtgatgtgggtatgtatatatggaatcggagcatcgatcgatcgatcacagtacagtccctgcatgaattgaacagaggaagaaaagagagtacggatgctgctgctgcttgaccgggacatcgatcgatcgagaaagagaagagagacgcagtgcagtggtggtacgggttgatttgggagacgagctaagctacactcctactactcgtagctcggccagtgcactgcacagcatgcgcctcttctcttgtctcgacgcatgctggtgcagagacgacgagacgagagagagagagacggcaatggcgccatgcgtaggagcatctcggaggcaagagatggagttatactccctccttcccatagtactccctgcgtttcaaaatatttaacgccgttaattttttagcatatatttaattgttcgtcttattaaaaaaatttaagtaattattaattctttttctatcatttgattcattgttaaatatatttttatgtaggcatataattttacatatttcacaaaagtttttgaataaaacgaacgatcaaacatgtgctaaaaagtcaacggtgtcaaacatttcgaaacagagagagtattaaaacctaggactggatgggatgtttcatagtacaatgaatttggacattggacatgaacatcttttatatatgttgtactatgaaacattccattcagtctaagattataatattataggacggagagagtagctcgcagagcaggtggtcacatggcacttcgatcgtgtacctgcattctgcatttgcagccgcccgcgactgcaaaagctggaccctctagtttctcgtgttcctctctcacacaggccacggcaatactacatactgcttttttctttatttaaatttaaataattttatagtatagtatagtaacaattttcatacaaagtaaacattgtatcaaaatatgttcggtgttaaatataataaaactaatttggtgctgtggatgtactattttttttataaatttagttaaatataaagtagtttgacttaaaaaaattcaaacgacttattatatgtgaaatagtcagtagtactagacacaggtagtagaagagtaagctttgctctctttctctctctgtactacggcccaaccaaatgggcctcgttgttggtggcaggagggcaggcccagcggggaccatttttaattctggccccgatggactcctcgatcaggagccgactatcattttcttatactctatcaccttatcagccaaataattcaaattccatgactaaattgaaccggacactatgatttgccggttgataagttgattgatcttgtgtgactccgtttttgtttcagttagccaatatcatttccatcctcccaactcgttgttaatttccatacctttttcgtcgagagatgcatttaacaatgtagtgataagttgtggtaattaacccccaaatcccaccgtgtacgattctcaataggttgtccacattttttttcatatcttttgtcgtctgtcataccacaattttcatagcccaaagttacctctccattttttttgccttctttattgtgtttgttgttcatgtaaaaaagactttttttagtctcttctcctaatatgaaatggcagagctcctgcccgctccctccaagaaacaatttgcaggggcaacgcgccaggaaggtgctaccatacaagctctctgaagcacaaatagcagatgtgtccaggttttccactattccggagtcgtttcttactctgacactacatcgtactctctccgttccaaaatataataacttttagcccttaggatttatcctaaaatataacaacttctccaccaacattctcttaccaaccaatcacaaccctccaccattcacttttcctatctacctccactactcatctaatcacaaccatacaccactcacttctacctacttttttaaaaccgtgtccaactttaaaactttttatgttttaggacgaagtgagtacgtgctgaggatcatcgtttcccagcctgctcttctttgatcctgagcacgcagctgcaagcctgcaatagccagccagcaagcaagctatagatggccaaaaggccagaggcccgatggcccggcccacggcacggtgttttggcccggcccaagcacggcacgacccgtcaagggtcgggcccgtgccggcccggcccgaccatcgggccgtgcctgggcctctccgccggcacgttgggccagcacggcacgatgggccgcatgccaggcccgacacataaacaatagggagtaaaaataaacatattatatgtcacggttaaaagaatagggacgtaaaatagacttatttacctatatatatgtcagcccaaagaggagggacgaaaaatagacttattttcactatatatatgtcacagcccaaagtggagggatggaaaatagacttattttcgctataatatgtcacagcgcaaagaggagggatgaaaagtagacttatttaaaaaaggcacgatgggccacccgtgccttcgggccggcccggcacgacccgacagctggtgggccgtgcctgagcgggaggcgcagcccatgggccaaagtgccgatcgggccatgccggcccgatggctggtgggccgtgcctgggccgagccgtgccgggcaggccttttggccatctataaagcaagcaaggacactggtgttgtggtgccaaattaaatggcaattcaatcctctcacgtactccatccgttccataaaaacgaatctacgaccggatgtgacatatactagtactacatatgtttagattcgtagtgctacgatgtgtcacatccggtactaggttggttttttatgcgatagaggaagtaaggctaagttgcaaatattattacctaggatgaaaaatacattaatagtatcgcctaccattggtaatttagtagagatccaaaacaaggcccttttgcataatttcggaccactagcaatcgaagccgtctagttcaggggcctacctgcattatttcggacctctagcaacagtaccaatatggatgtaaacggtcagaaaaatgccaaactcattttcatactatttttttgatgaaacggaatggaaaacgatatattcagaaatagaaacaaaatcgaaacaaaaaataaaaaatatacggatgttttgaaaacatgtcaatatcgattgttggatcattggaacccagtaataaatgtacctcagaaacattgagcttcgaaatcacatatttaaattaacatgatgaaataaattcagctttgctattcctgctatgaccaacttttttttgttggcatcaaagtaaacagaccctaaattacaaatttcctcttctttaatcatttgctcaaattggagattggtcgaggagttgatggacttctcatcttatattctggcccaacctacatgggccgcatgttggtggcgactcagtttcaggcccaacaacatatagggctccacctttcgctggcaaaaccgtcctgtttttccgcaggacgaaagtctaatttaaccaagcaaactattccatcagaccataaccaaagtggttcactttactggttaattatatttctctttatttttcctttatacaagtcgtattttaagcataaattttatagagatatagatgacaccattattaaagttttaaaaattgtcatgactatttgcttgaaatttaagacatatatgtttgaattagtctcagtgctatataaacaacgattaaaaagttttaaaaaatattgagagatatgttataatgcatatatcaatcccaccaaattttattgtaaaatatcgttagggagtaagatgaaccattaaagacgtaaaatagaccaagaaattgttgaagttcgattgagtatgatagacctttttactaggcaaaccacacgaatacacgattgattaatttcactgagaatagcacgggtacatcacatcacacaaattcatacgttgatacacgcatagtcgccgaagcgaccagctgcttaattaatcgataacacacgggtttaattcagcaataatcagcacacacacaaaccacactcatatgggtggtttttattgtggactaattaaggtaggtgactcgccggcggcgagtgttcggttgcttcgtgacttcacttgccgcacttgcagtcggtgcaggagcagctggtgccgcacttgcagccgccgttctcctcgccggcggcgacctcctcgaagtggctgcacgcacgcacaaagcaagcaaataattaaggcgtcaggtaaaaattgttgagaactatctaatctcgtatgtaaagttcttactatttttctgttaattttaaaatatttttgatgaagtttttttatggtggttgtagtatatgctacagaccccatcatttagcttattcgtggaataagtcaaacgatataattgcaaacgaaaataatttataaataaaattcatatatatatttttagcaactaaaagtagagggtgaaaaataaattttaataaaaaacttaaaatcagttttaaatttaagattgaaaatttaaattttgtctgataaatataagcatgaacgaatacattaggccgtacgtgtctcgtatgcgaacgtcaggatcgatagtatcgtgtgtgtgtttgagagcaaagacgaagaaattaaaactgtaaaattcagacgagaaatatgctttggttgatcgatattgagttagttagttacctcttctcggcttcaactatgacgacgccatagctggtacctttcttcctgcaaattaatcaccacgtcaatcgaatcaaaccgatcagtgtttcgcaaaattcaaagaaatcaacatgttaagatcgaaacaaaataattattgactgatctagatcgaggaggcagctagtaattaagtacttacacgcactggctcttgtcagcacagtcgcagttgccgcacttgtccgacatggtcgaagatttaattagctaagtgagtgatgagttaatcccttgtgttgcttatgctttcttgtgctctggtggtgaggagcaatggctgcttcggctggtggtatatatatcggctggatgcagagagagagaagaagacgacaattaaccaaaggaagaagaagaatcatatcatcttctggagacgtagcagctggatggaggaggacacacgcctcgatcgagaggcacgcgctccaaaggcgccatccgcctcacgaaacgaatctctagctcccccacaccggataatgccaagctttaggtcccgtctggaatgcgtcaactttccgaatatttgttgggggtaaacttcacggagaatatcggctccacctcttcttaagctaaagctcggctaaaaatacgagcagagttgtgtagaactctctcataaaataagctagagaggtggacctgagtttaaacagcttcacaactccactccagatctaacttcctgaagctaaatttaggagttgaaactctaccaaacaagccattacttaaaaaatttataaaataaatttaaaaatagtcgcatataattattattcatattttatcatctaataacagtaaaaatattaattataattattttttaaataagttggagagtcaaacgttatataagaactgaaaaatgcattctttatgggagatagagggagtagctcgttttcacgagaaacggagaaaagcctcacagttaaatataagaggatactatagtttactgggtttttttttatactagctacttagctagtcgtagccaagatgttttagagtttaaaaaaaaagtagcagctagcaactcaggaagaatacacagttaaatcacatatgcagcgaaaaccaactattgtggaaaaaaaatagacatcttaggatttattcatgtcaacataagtaaaacattttctctaacatcaactttttatcattttccattacatattttttcagcaactcacgttttcctatttactatgtctatttcatattataaagtcgttttgaggtttgactaaattaatttatagacgatatttttaacagaaaatatcaaaatatgttcaatgtaagacgtaatgaaactaatttaaggctataagtgttgttatatttttttttataaacttgattaaactttcaaaaaaaatgattaaaaaaagaaacttaaagtgacctaacacgaaatggagagagcatctgcgagttgcttcagcttacaaggaactaccagagcctgtgtttggtcgaaacacccccgtcgcaaactgccacaataatttttgcatccatatatcgatcaatatcatcttccatctctcatcagtcgacaagctactagctactagctagcacggcatggcaaagagcgaatattattgtggctgtatgtatcagcggccttatcacctttggcgtcttgtcgaagattttacagtgctcccctcgcgtccggtctccgtcgtcgaccatcaccgtccggctcgatacagagcgatcagcgagaattttcaaaaaaaatttgacgcagatatgaattccaaacagctctgaatatattctccttttcgttggacccggacgtaaagtaacttcctaaaatcagaattcaaattcatactacctccgtcccgtttcgattttttttggtaatatttgattattcatcttactaaaaaaatttagaattattatttattttgttcgtaatctgtttcctttatgtcctcttctttctacaattctttctttctttatttatttattttccccagtcagtcaaggactcaaggtgttgctgcccttttctttttctccctttcaaaaacctgtaaatttcactggttttatgagttttcatcttctcgtggtgactactagggagaaatttcgaaattttatgttttggcgatttgatgatccttatcgtttcgacgtcgccaggaggaatctcgttcagaatggcgctcgtagcatttgtcgaatcctaatcgatacgtatcgccggtcaaagacttaaaaagtaatagtagtaagagtaaggaggaattaaagtttgatggcaacattttgtatcttgctctttgtttcaaagaatatattttcacccctagatagaagttttttttttaaaaaataagggttttcaccgctccaaaatacgcgacgtatcgcctttggaagccattcgaaatcccaaattgaagcttgtccatctgttccatttttgggcacgccttctgttattcaaggcaaattggtgggccgctattgatggtttctttgggccgacattgaagtttcctttgggctttcaaatgggccgcaatttatggtttctttgggccgacatgacgttctctttgggctttagaatggcctcagttgatggtttaattgggccaaagttgacgtttattcgggctttcaaatgggccgctcttgaccgttttctttgggcttcgtgataggccgcgttttttcaccggaagcccgtaaagatggcttcaggcccagttcgtcaaacacacaggccccagttgtactggccatcatggcctttcactgcacagca

SEQ ID NO: 2641 - DNA, 9009 bp, Oryza sativa
ctttagtcccggttggtaatcccacccgggactaaagatggctcatccgtcccggttggtgttaccaaccgggactaaagatcgagctgaccttttttttttgcatggccctgttgctgcatggtttatatatatataaaccatgtttcagtacatatatgcatatataatatatgcatatatatatatatatatattatattatatttatatatgtttcaatacatatgtacatgtgcataatatatatgtatttatacatatatatatgttatgcaaatgcatatgcatatatatatatatatatatatatatatatatatatatatatatatatatatatatatatatatatatatgaccaaaatatatttacattatagaaaatgtgtacacatgcatatagaaacatatgtagtcatgtattaattacaatatattatatgtcctagctagctacgatttcgacgtaatagtagtcactagctcagaagctaaggacctatgaattgtgtttccgtcgtagtagaattcacccttgggatcaaggatttgttcgttgatgaatcccatgagttgttcttaaaccgccgcgataaattccttgtgcgtggtcaggttatccctcatgcgaataaactatatgaatgtatgaaattgattagtaattaaacaagaaatcgatacgaatgaaattttgaatttatttgtacgtacattgagctctcttgtggtgatgatttggtctgcaaggcagtggcaatactcgcacacgtaatagccgcacaagttagttcccttcttttgctttgcgcactacaaataaatgacaaacaacgagaaatctaattaatatacacttgtatgtatttgaatcagagaaatataaatgtagagcatgtgtactcacaagaaatttgaacttccgcctaagtctttctctccatttgccgcggaccaaatgacggaaccgataccaagccctacatggagtttaaagctatgattcgtagtagcaattaacataacaagattttcttaattaacagaggaacttatgacggtacctatctataagttcgaaaaccttgccaaacgtagactcttttttatccattgagtcatatacgttgacggtgcaggccgacaggtcgaagagtaaaagcacccagtggaatctgcaatgtgcatgggatgcattacatataaaacacttagcaagttcgtacgggaatgaaatttgatataggaagacagtaaaattaaactaactatgtgttgtacggcaacagtatgaacgtcttgtaatgctgcgccttcaggagatggacgagattgtcctgtgtggcttgcggatattggtcgagcattgcgacgtttactttccgagggtcgatgaatccagtatcgaaaaccccccgccgtcgggccctttgaatctccattctacaacgataaaagggagtatattattttctatagtctacttatatacaaggacctaattaattaaaggagacgtagtaagaaatctaactgaacgatatacttacaaaatccagcaactcataatagagacgtcgagggcgtccagctggtatagttcgtagattccattgaaattgatccagagaatgtcatctccttgcaagaagtccgtgtctctgatcctcgctccgatcatctctctaccggtggcgctcatctccatgtacagctgatggaacttgtacatttgtgtgggtagggactgcagcagctcaggcttgacaagcggtttaccgagttcgtacatgtatttcacttccgccttttcgattggtgcgactcctagcaattgatccgtagttagaccggtgtcagtaataaattcttctatcgtcatttctttaccggtcaccaacggctcgatctcctggtttggttgctctccaagctgagggactagtttggactttccagaagatgctttctttagcgttcgctcatagtccgatagcttaatggcctccttggcaggtgcagacatacccctgaagaagttcatgacactcgggtctataggaatcttcttttctggacttcgaggcttgaattgtctcttgacttctgatgccacgtaagcgtcaagctcctcttgcgtgcaatcgtaccccgggtccttgttcttggcggcgtcaattttcgccttcttcgttgcccttctgtgggcatgcggtggagcttggggggcccttgactttgaaggtgccggaagaggagcttgcggaggagtcggtgtaggagaccgaggaggagtcgatgcaggagcctgaggaggagtcgatgcaggagcctgaggtggagacggtgctggagcatgaggaggaaacggtgcaggatcctgaggaggagatggtggagccggaggagatggtgcacgagacgccgcttgtcgcctagggaggatgatgtaccgcctgcgccatagaataattgcatggcttgtgtctcgtagatgcgtctcaccgtctcctccagggtaatccagctcgaggtcctcgtacgcaccttcgaccaactcaacttcgaccttggagtatcctgctggaatcggcctgcagtggtaagtacctgaagggtccattgggatggccatgcccgacgccaccttcatgtggtgagaggtgatttattagtaatcaacatatataagcagcaactagcggaatgggcaaatctaaaatatataaactacgagcttacctttattaataagttcttgaaaggaatatgcagctcacatggtgtccgctgagtgatgtcatcaacggggcaggtggattcgtcttgggtttgcatggcgtccatgctctgtgatcctacctgccctgttgaggcgcagctgctacagttttctgacgggctcaccattgcaggaggaatggtcggctggggatcattggaccgatgtgcggctatgcgttcatcaaccttccttgccacctcctcttgcatgctgagctcgtagctcgataccctgaactcaagatctgcaatcttcgcctcggtatctctcttgctcctcatccgactcccatacgtgtggatgtcctccttgaacccaatcttccaaggaatcacccctttccctcgtgttcgtcctggatgctctggagtctgcagggcgagtgacagctcgtccctctctctatccggtcggaacgtgccctgagaagaggcttccactgcgtctgttagtcgacgcgcagcctctcgtatctgatcgccgaagaccagtgagccatcagctgggttgagcgttccaccgtgagcatagtaccagaacttcgatcgttccggccaattagcggtggccggttcgatacccctctcaagcaacctagcctccatctcctcccacttcagcatcgcgacgctatagccgcctgaccccaagtggtgatggtacttcttcttggcggcattttctttgttctttccatcatcgcctgcccttgttcacctgtcttatatgcaacgaactcgtccccgtgatcccttagctttgggaatgtgtcgaagttcggtgtctgccccttcaggatatatttcttgtacaactctcccttgaagctctgaaactgttctgccattttcttcagagtccaccttttcactttgtcctctgtacccgcgggaagggtgaatgtctcgagcattgtggtccacagcatctctttctccgaatctgggacaaagctctcatgatctccgcgtgcccttgttctgcgccagtacaccgtactgacaggcacgttatcccgcacaacccaaccgctatgacatacatagttcttggcggcttctgccggggcactaggtcggctgtcttcgtccacttccgttatgatgtgccgaccctcaagcttcttcgcggcacctcgttgcccgcgtgccctcttctgtccagcggagggttgacttgcactatccccctcctcctggttcccctccacatccctttcaacgtgcccctcctggttcccctccgcatccctctgcacgttcccttcctcgttcaaatattggtttggatcctcgttcccctcttcttcgttccagtactggctacttccctccgcgattgtatcgtacaatatctgttcctcatcgcgatcagccatctgttcatacatgaaatagctgctaagtcatgagacatttatgttttaacaatcttatatgctaacaatcatatgctaagtctaggtgacgtatattacaggaccctagctagtcaataaattatatagtaagtctaattacaaatctaataatcttatattaaaacttaaataatcttatactaaaactcaaatagtgataaatgctaagtctaggtgacgtatattacaggaccctagctagtcaataaattatatagtaagtctaattacaaatctaataatcttatattaaaacttaaataatcttatactaaaactcaaatagtgataaatgttaagtctaggtgacgtatattataggaccctagctagtcaatagttatatattaagtctaattacaaatataataatcttatattaaaactcaaataatcttatactaaaactcaaatagtcatatatgctaagtgtaactgtcgtatattagaaccctacacaaccttatatgctaagtctatttacaaatctaataatcttatactaaaactcacatagtgatatatgctaagtctaggtgacgtatattataggaccctagctagtcaataaattatatactaaagtctaattacaaactataataatcttatattaaaacgtaaataatcttatactaaaactcaaatagtcatgtatgctaagtgtaactgtcgtatattagaaccctacacaatcttatatgctaagtctaattacaaatctaataatcttatactaaaactcaaatagtgatatatgctaagtttaggtgacgtatattataggaccctagctagtcaataaattatatactaaagtctaattacaaactataataatcttatattaaaactaagtctaagtgtcgtatattaaatctaatagtcttaattgcattacaaatataacaatcatatatataattacgtcactagcctgcacgaattccttcgagggatagctaccactctggcttgagggacgactccgacaacgtcttttttgcaagatacaaaaagatgtattaggataaacgcgaagtaacatatattgaatttgatgttcacgtttcgttcacgatcgttcacgttcgcgttctcgttaaggtcacgtttcattcacgtacgttcattcgttcacgttcattcacctgcctatattgcatttcacgttcacgttcattcacgttcacattcgttagttcacgttcatgttcgttgacgttcattcacactccttcgttcacgttcgttcgctcgttctcgttcacattcgttcgctcgttcacgttagttcacgttaattcgttcgatgccgtggcggcagctggacggcggtgtggcgcgcggcccggtggcgacgttgcgcggcggcggcggcgaacgcgcggcacggcgccggcgttgcgcagcggcggcgtggcggcttggcgcggcgcggcgccagtgccgtgccgcggcggcgtcgtggcgtctcgtcgtgtcgtgccgccgcgtcatgtcgtgacgacgttggcgtcggcgtcgaggcggccggcggcaaccgagagggagagagagagagatcgagatcggagagagagagagctgatgagagggaggcggcgtcggctctcaccccagagatgcggcggcggaggaggaggcggaggcggcagcgacgacgacgagcgcgagacgacggcgagatacggcggcggcgttggcgcggggatgccctaggcagtggcggcgaaggagaagccgagagagatcgatcgggcaaaaacttctaagtgttggtggagaagacgagggcgcgcatcgggaatatatatacccctagatctttattcccgattgatgagaacaaccgggagtaaatttactcccggtttttctcaccaatcgggaggaaagttatctttactcccggttgttctcatcaaccgggaataaagatcttttcccgctatttccaaaattttttaaaacccggttagggtcaagaaccggggctactgataagtgcactgagtattattttccattacatatgtgtttctaaaatagaaaataatgcattaaatttatttaaagtacaaaaattaatgacaattactacggaaaattagtactgtctgtaataaattaagtggataaaacgtaataagcaaatattacgttttaaaattaataaaaattctaataatcatatatacttagcatatgaatgatattaaattgttaaaaactctaattaacatatgtatatacatacgacatgatttaaaattaataaaaaatttaataatcatatataattaggatattaaattaattgttaagaactctaattaacatatgtgaatgccacatgcatgatttgaaaattttaaaaattcgaatagtcatatataattagcatatgaatgatattgaactaattgttaaaaactctaattaacatatgtaaatgccacatgcatgatttaaaaattttaaaaattgtaattatcgcatataactagcatatacatgatttaaacttgttaaaacctcaaataatcgtgcgtaattaacatatgccatacatcaattgatttatatggataatcaatacatccaaaatagtttacatcgtgtacacaataattacggcaatacatcagcggggatggttgaccgcacgtactttctcctcactattgttccctccttgtgatcgctacgtgagtaaggggtgtctttatttgataggaggatgctagggtcaatcgtcaccgtgaaagggggttgcccatccaactgatcgtaatcctcgtcagtcttgtcctcaactccgacgatttttcttttgcttgggagaaccacgtgacgcttaggctcgtctggccctctgcccttctttcctttgctagacatgtccttcacgtaaaagacttgcgttacatcattggcaaggacaaaaggttcgtccgagtatccaaccttgttaaggtcaaccgttgtcatcccactgtcatcaatcattacgcctccaccagtcaacctaacccattggcaccggaacagagggaccttgagaggaccacagtcaagttcccatatggcctcgatggcaccgtaatacgtgccagttgttccatcgtgtcccatggcatcgacacaaacaacgttgttttggttcgtgctcttcatgtcttgggctctcgtgtagaatgtgtacccattgatctcatatccctggaatgtcgcgatcgacccagacggtcccctcgccaggaaggcaagttgttggttgatcgactcgttacccatgagatgttgtcgtagccacgcggggaaagtatcaatgtgatgccgtgtaatccatgcatcggacttaccgatgttcctggcgcgaactagagccaagtgctcctcgatgtaaggagctaccaatgaagattgttgcagaaccgtgaaatgggctttatggaataaattgttgtctaccgtcattattgctttccttccgagagttccctttccccgtagtctcccttcatggcatgattcaggtaccccgattgggcgaaggtcttcaataaattctacgcaaaattcgatgacctcctctgttccataacccttggcgatgcttgcctctggacgagcacggttacgaacatacttcttcagaacgcctatgtacctctcgaaaggaaacatgttgtgtaggtacacaggcccgagaatactgatctctttcacaaggtgacaaagcagatgcgtcattatattgaaaaatgaaggtggaaatatcaactcaaaactgacgagacattgcaccacatcattctgaagggcttctaatctatccggatcgatgaccttctgcgaaattgcgttcatgaatgcacatagctttgttattgttgcccggacattgtctggaaggataccccttattacaactggtagcagttgtgtcatcaacacgtgacagtcatgagactttaggtttgtgaacttcttctccttcgtgcttattattcgcttgatattcgtggagtatccagacggtacctttatgctctccaagcattcaaacatactttccttctctgccttgctaagagtgtagctggctggactcaagtaatggcttcctttctcctttggttccgggtgaaggtcgccgcgttgttccatatgcttcagatcattacatgcttacagtgtatctttcgactttccgtatacacctaggaagccaagaaggtttacgcaaaggttcttagtgaggtgcatcacgtcgattgcgtggcgtacgtccaagaattcccaatagggtaactcccaaaatatagagttctttttccacatcgccgcgtgaccatcttcgctctctataggctggcttccaggcccctttccgaacactacttttagatctttaaccatagcaaacactgttttcccgttgcgatgtttagacttcgtacggtggtcagccttatgttcgaagtgcttgcctttcttccgtaccgggtggtttgctgcaaggaatcgacgatgacccatgtatacaaccttcctacagtgcataagatacgtactttctgtttcatccatacagtgagtgcaagccttgtaccccttgttggactgtccggataggttgctaagtgcaggccaatcgttgatggttacgaacagcagcgctcgtatgttaaactcctcctgtttgtcctcgtcccatacggggacaccttccttcttccacaacagcttaagatctttgaccagtggtcttaggtacacatcgatgtcgtta

SEQ ID NO: 2642 - DNA, 743 bp, Oryza sativa
ttgtaaatggtgaagttcaattttgttgagctgttttcaccaactttagttattacaagggcatttttatttattttcaattaaggagcatcctgttctctgggagttgcaaaatagtagcttggaatgggcagtagattttaataggatctattttagccaaatgaagaaagaataacctgtcaggatggaaagagactgtaggaggcatgtgtattctgaatcatctatttagaacatccaagtctgagaatacagttgaggcctgacaaggatttaattgatagatatccatgcacacagcaaattatatggtttgtctaaatcataggtaactctgtttgatgctcaccgttgttgttttatctgccatggtaaaactaatcatgctttgttgtgccaccttctgacccactttactttctaaaaagtcctttcatgttcttcataccaatgggctgacaaagtataataatattgtactagttgcagttaaacctcgtgctgcaataataatgggttctgattctgatcttcctgtcatgaaagatgctgcagtagtattgaagaaattcaacataccttttgaggtttgatctctgaaacccttccattgacaagttatgaaatgtttacatgctaagtcaaaattttctaaggatgcaaaatgattgactgtcgaattttgtagcttacaattgtttcggctcatcgtacaccagagaggatgtaccattatgcat

SEQ ID NO: 2643 - DNA, 2673 bp, Oryza sativa
ataagccgccttctgaaaggaatcagactctacttttaactttagtctagtacaagttaaacggctgcttaaaaccaagacttggtaaatgttgactttagtcaatcgaagaaaaaccttgcgcaaacagcaactactgaatttagcaatttcgattggtaatatcagaccaaattccattcactctattataatttgaagtatggtgaagcttatacttcttagaagaagactaccaaaaatggtagattttagcacatattttatatatataacattggtaatttcataccaaatttcattcactctattataatttgaagtatggtgaagcttatacctcagaaaaaaaggctaccaaaaatggtaaattttaacagatatttaatatacataatatacatttatgaagtacacataagactacgatttagtctgactcaacatttacattactcgggcacacaatttcagaatcataggactcacaataaccactgaattttgcaaatttgaccgaaaatgaataccctgagtgcaattggaacttgacaagttctgatcatgtttggttccattccacagcctttcctagcaagtactaggcaagatttctcatcaacttggccacatgcaggacgtacattcactgcaaccactgaagttttgcaaatttcactaaaatgaaaccccacgtgcaactcggaacctagttaacaggttttggtcatgtttggtcccattgcacagcatgtcttagcaaggagtaagcaagatttctcaataacttggccacatgtagggcgtacgacccactagcgtggggtacactatacaaaaacaaggaaccaagcatgcccaaaacttcgtagatctaattcacacagcatacctagcaatctgaaatatacaattgagctagcatttcagcaaactgaaaccagaacatggagaattgccagcctcatgataatgacatctgtagaacacccaaattgccgctaaattaacaaatggccttcttccctctccttcaaagttttttttcccaattaaaaggcatttcacagctagactttcctgtacataacgtgatatatatcccccggaaatatgggggaaaggaagccaataaaacttctcttgcaaaatcacgtcgatacgaaattacttgctaagcattggccttactgctgcatagctcgatagctggagcggcttgaagggaagaccggggcagcgccaaagtcactgggtcttaggccaaactgatgatgcccatccccggagtgcccatggcctctccttgctcttgacttctcaacccgggttcggcggaagacttcttgaatttggcggtcattttccttcagcatctgatcgacattgcctgaagggcaaattagaggcccagaatggtggatcttgttaccctttgatccatagccctgttcagacaagaaatagtcaattagaaatctagacaggggaacaaagtaaagttatctgacatcaaagctagtgctataatatttttcggtttttccaaatgtgttaatcgtgaactacaaataatgctaggtaaacctcataataacctgctggaactgaatacataatatatgaggaccttggatttgctgaaagaaacttttcaatttgacaactgagatttgcaaaaaaactgccaactatgaattaaatggcataacaaactgttttcatacttttgctacttaggtctggagatacttacaatagctccatccaccctgctactcctgtcatctttctgctgaaatacttgatcatactttccactactactgaaacgctcatttatagattcagacagcctccgttcatgcggaaaggcttcggcttgagtaaccactgttccattgccattatctgaacgaatatttgatcttgttgatacaaccacacggaagtccgatgcgtttgcaacaccagaaagatgaatatcgccattttcactccgtccagcctttgaaggtttattttgattaactagaggcccagaatggaatgttcttgtgtagacacgttgagagtcttgagacgattcagcaggatgagttggcctgggtggctcaatcggaaagccagatgcagagtcttccttgctgggattgaacatctcactcctgctcttggcattgacttggttttgtcttttctgaaattgtacacaaaaataaatatattcatctaaaaaaatagaacaacttggatagcaagattgtagaggaaaaatacacttggaatgtgtgctggctattaaaggcttcatgtacttgtggaaaaaaaggagacaaagcgcacagcttagacacatatgaagatcacaatatagagccagtgattactatgtatgtgaatgtaacttacaaataagcatatacggatatacctcatcaacctaaatatgaatagtacaatatattcaataacagtcaacaaggtattacctgcaaagatgacactaattctgcatttgcgtcaggtgcaggaactgctctcgactctctagtccgtctttcaggatcatacttgtgttgctttcctccagcaataccttgcctacagaaatgtgcaaatgtcaattttgaaagaaaatgcaggcattgcagattcatgataagattgttt

SEQ ID NO: 2644 - DNA, 2323 bp, Oryza sativa
cgtcacgcttcatcaggaaattgctaataaagcatgatactccacaggttctcgattctttttcttttttcagaactcgttaaaattggttgatttttttccctgaaacatcatcataagatccgcatgaacatttcaggcatcctctaaaacaaacatttcaggcaggcatgttgttacagttatacaagcaaagttttatgatactgagatgctcatgcgccgtgcttcgttaacatctttcactttgtaagtcggcacgccctctccaggcctccactaaagaaaaccaaatttcaatgagcggagaaatttataaattagcgagaaaaaagagaaaagaatgaaaaggattttaagaatgtgccacaaccatgggtcaatctgcttatgtcaacactggatcaaaaagaatgacaatacaatgggcaggcagggatcaatgcttcttcaagtatagcttagtatattcctcccaacctagttcctcaagcctttttgctttctccaacaccatatccctcagatcatgctggcattcagttgccctgaaagcaagtcgggtgctaacatctactttttatgaggcaacttaattagcctacatcagacaggtgtagtgtaacaactgaaaataggtccctaactgaaaacatgctagccaaataatcacttgtgctcccagacaatgtaactaggttttcagcaggtcaaggcaaaatgagaaagttgtactgatgactaatgacctactgcaaatttcgagcaactgtaacgtaacattgatcattcttttcgaacagattgatcaattgagaacttttttcatgattctacatttctactgactagctttgttggcaatttggtacattaccaaaggtctcatcagtctactcagttactcactggcttgctgcagcctggcagatatcagctcaaaccactgcttatgtataactccaggaattaaggaattaacatatgtgagccaggtcgaacatatgcaacttactgctatgaggtatctattatcaattgcatacatacatacagttaccctaagcaaacttcgaaatttgcaggagaattgcaaaaaaagaagaaatcatacttgtcccccaactcaggatctcttgaggccagcatcctaactgccaataaacctgcattttctgcatttccaattgcaacagtagcaacaggaatacttttcgacatctgtcaaattagtgagagtatcagcaccagaatcaactccgttgggataaaaacaaaagcaggccgttccaatagagatcatgagtagaccaactgttttagtgttaaatgatttaatcactagtttctctctgggctttccgcttcattagttaaaaaagaaaaaaaaatgcttgtggtaccaaatgcttatattaaagaatagcaataggtaggtcaaataacaacacttattaatgggattttgaacccagcaggtgcgccaccctcactctagcttccaattcatatatgtaacaaagcaactgtggcttgtatccttctcttttcatcagcccttcctccatctagcatgtgttcttaacggcactaaccacctacaatgcccggcaacacagaagccttgaatccatcaggtggccagtgtatgaatcagccactcgattgataatctagtgcaatataattatatattatctgctattatacagaaccatgtagatccaaaaggaaaaaggaattggtaaattaccaaaatctgtaaatctcttctcggagctacatcatcaatgataaacagggggaaaatgctctagtgatagggagatcaccaacgcacctgttagtactctagtgaatgcgtccgtcatgtcaggacctatctttgtctttccccttttcccccttatccagtatctcctgcaatgaggtcctcaaggcatggaacatcatcaaacatgtcagacgaaggagcttcacctcaaaaactattcaccccacaagctcatggcaaatcagcttaccctaggatctatgggaatatcgatgaaggaaataccagcaattcacaaagagaatttggcataaacaataaacaaacatactatttattagttctgtacgctcatacctctgtttgcatacagtatggctagtgatgcgttgcttattcatattatttacaactttcggcttcattttcttgacctttatcagaactgcagcaaaagaaacacataaagatcaacatatttttcctgggcaaagaacaaaatagaagaagttgtgcatttactgatttgcaatgaccacaaaaaaaatc

SEQ ID NO: 2645 - DNA, 1793 bp, Oryza sativa
ttatgtagaacaatgtctgacttcgcttcagctagtgaatccctcaggttctgggcttgtgcaggcccctgaaaaagcaaaggtaactctgttatgcacaatacaagtgggttttcttgtcctgaacccgagtagcatgagaaatccatgtaaaaaaataaattgcaacccattcaccacattggtcacatcaatttgttcgttattcaagcaatttgttgtgcaattgatcaattagtgattggaaaatgtcacatgtgggacactgatcatctaaatgaaacgggaaaataagtttgaagacaagaaagaaaacgattatttttttaagacaatcattcatactccgtatttgcttgatggccttaaacgcctagggaagcagcgggaacaggttcctcccacccctcactataatatatactgtgacacaatcaattcagcgagataaacaaacccccaaagagagaacaaatccaaaagggagaagggatgcaagcagagcgaacctcctcctcgtggccggcgaggaagaccttctccttgttgaagatagatgtctcgaagtcgagcgacgtcatggcggcgccgcatggcagtgaccgcgcggcggcgagcggcgcgcaggcggcatatgagaccgggaaggagacgctgaccggcgcacgggggtggtccgatcctcatcccccgaccacatggaggccggagacggcggcgacagagggagaggggaaaggtgttttgcgaaaaaacccctcggccttcacattttcaagcgcagtcctagttcgcgttgtttcctctcttcttcccggggaatatccggctttagtaagggcttaaacttaaaataacatctcagaggtaggtactgttcgtgagggatctagatcgaatttcacataaactcaagtcctatttcgttttcaagagattaattaattttctcaactttgcaagggcagtcagttttaaaagccgtggagtactccagtagtatatcttccccttccccttgcgtaaggaaaacgaaaatcttaaaatctcctccccgtctctgactcatcttctagatcagctcttctcctccttaatttcagagccttaacctctctcttaatttcagtttgtttgttcgttcgttcccccaaaaaatttggatccgcctctgcagattggtgccttccttccgctggaggcaacccccccccccctcccttgtacgcttcgtcttcgtctccggcgacgagcggaagcaaaccttctccggcgagcagcaggatgcaggtgaagcagaaggtgtacgagctctacaaggggacggtggagcgggtcacgggcccgcgcaccgtgtcggccttcctcgacaagggcgtcctctccgtccccgagttcatcctcgccggcgacaacctcgtctccaagtgccccacctggtcctggtagctctctcctcccctccgttgctccccctcaattgctgggtttgggtttgggtttgggtggcgtctcatcgatccccctgtgtagggaggcgggcgatccgagcaagaggaagccgtatctcccacctgacaagcaatttctcgtcaccaggaacggtatgctgattctggattgcttctatttcatcttgtacatgcgatggaatggaatgctgcattgggtggcatgattgttatgcttagtttccacttcctagtggtcttgattaggccaccatgttttggaatgctatattggaggataacaactagtaaagttcggtttccttcgtgttttagttgaaa

SEQ ID NO: 2646 - DNA, 676 bp, Oryza sativa
ttcggccactctcaaaaaatagtgcacgccgtcaataaactctttggaccaccggtcagcgtacatccattgccgatccatctacatgagtcgagaaaaaatcgtacaaaaataattattcttacaataatgacagtcatacaataattataagataattacaaactgtttcaacagtcatacaataatgacatatctttattcatacaaaaatcataaaatactacaccaaataattcttatttactatttctaaagttttaaactaattttaatgtgttttacttcttttaattttcattttagtttgttttctagtattcaagattaactctcactgtaattttccttctcaactattttataaaaccttctttagcaaatcaactaaatttctatatattctttcttccccacacaagttttctccctcatcaacttacaactaaattttggagacaaaaaagtgtgcaaaacatagctgcaaatgtaatatgacaaaaaaacattggaggatgaagttgcaaaccttttaggcacctccgatttgtatgtaatcaccaaaataaattcactacaaattttagcatgacctcccctcttttttgaagaaattttgaagcttgctcgggcagctggaggaggaagaagacatatatataggggtaccaaccgg

SEQ ID NO: 2647 - DNA, 935 bp, Oryza sativa
acaaatcacttcttccgttggcgccgaattgcttgcgagcccggagtgtacctacatttgaaaatccaatgtttaaaacattttaaaaacaaaataagggaaatcaaataacatttgagaatggtaagctcattttacctctttttcgctgcccgagtggatcgcaagttgtattgcgtgggttgcgtcccctgaggcgcgtcgggaagctgcgacatgtctatctcctcggcgtctggtgcgacgtagtcctcatcctcctcgtcctcgtcgtcatcgtcgtcactaggtggagccggcgccttcccctttcccctcccttgcggaatgcgtgacgacgacgagccaccaactccttcacgctcttctattctgatggagtgtcgagcggtacttggacgcgcggattgaggtagtggtggtggtagtctccgcggttggtacacgtcgtctaatccaaccgacctgcaacctaatcttgctgcaagtttccggcacctttgacgaactttctgcatttcaaaaaaaaaagaagtttgttaggcataactcaagtaatgcaaagtgctaaataaattttacctctaaaacagtgcggagtgtgttctccgtgtcctcaccacccctcggagcttggagggcatgccccatttcattcacactcctgaggagctctctcgactgaaagcgtgagaagatatatgttagggtctagggtgcaaatggaaataactttgacaaatgcaaaaaaatttacgactctgtctctaagtggggcgtgctccatttgatatccaactctagtccggacatcatagggattccgcccctcatcggagtcgcggtcatcctctatgtcggcttccgtccaagtagggcggaggaacaatctatatgtcctatgcagctaatgaaggtactctgagaaaagatga

SEQ ID NO: 2648 - DNA, 2207 bp, Oryza sativa
atcaaattaaaattactttcatacctcaaccataatttttcatccatccatccatccaaaccatccaaaaatcaacattaccacatatatggttaaaaaaatcgtgacaccaatgagtacattgcaaacatgtagcactacaacaaaccaatcctaagaacaaatgctaaaaatcacaaattcgggtaaaaaaggggttctagggttacccaccgatctacaaattcaaccaataaaaacaaaaaaaaagaggggtgaatgaaggagtctacctttctcttcgatttccacaaaaaaatcccgcgaaaaacgagttcaaatggagtggatttgaggtggggaggtgagagggagagagagggggagagctgctgctgctcagctcgggttggtgcttgggcgaaaatgggagtggggaggagataggtggtagggcccacggggtttaaggggtcggcccacagaggaggggcgcgccagccatgctggcgccgtggtatgaggggcggcgccagtgtggctggcgcccccattctgcccagtcagcacctccacgacagccctagtgccacggtggcacgggcacggcgccagtgtggctggcgccgccatgttggggtacggcgccagccactctggcgtcccaaaaaggaccatttccggtttaagttttttcaggggtctatttgtaaaataagttttcaaaaaggaccaaaatataaaaatttcagtgattttgctctgctacacaaaagatgcacacgtggttgactgatgctcattaatctgttcatctgccagaacattaaaagttcgaaagaattaatagtcgcataaataaagattacgatattaacccacacagtcgatcagcaatctcatgcttggaccaatcacataggcaatgatcgaggatttttgagccttcgagggaagagatttttcgtcgtgtttgataaggattttaccaaatgttcgtacttgtagccctgcagggagtacaagctaatgagctatagtagcaagtacaagtgcgtgttcgtcgtcgcggatgccctccggctttggaccggagttttgctgggtcgtcagccgacatgacgatgatgagttcaagtttaatatggagtactaagcctaaatcaattataaagttattcggagaatagaacttgaaaaattaaaatgattagctttcatataaaagctaactctctacgtatatatactcatttaaaagtctctagtggtggtgatagtaaatctggcactccaccacggtttatagtttttacaaatttaccaatgatattttctaatattatgaaacaatctaaatatttagttaaaacacgtgaataccatatattcaaaaatgcaaacaggtgatactccctcttttctatcgaatcggtcataaccactgcctacattccacaaaatagtgcaccacaagtaagcactaatgaataggcctgcgattccgtagaaagacatcacgaccccctgtagaaaaaaaagaatttgttgagatggaagtacagatataatattcttaccaagataactgaaagccccaaccactaagaatcctattgaacctagaaaaagaatacaggcccagaaaaaattacctcttacacaataattcttttgtctattacatattataatatattttattttgtccaaagcaaaggttgagtattttgctactatatttcaagataaatgcattaaatatgtatagctcatctactgtacatattaactctaatgtggatctatataattagctctactattacacttgctctaatgccccccccccccccaccaccaatcgtattaaactgttaactacgacagttgactatattaagagaagactttccaacactattacagaagctgttgcggtctctttacagggagaaagaagaggagagacctacggatcggacgtccgatcaggagaaaaaaatcggacgctcgtcccagccatcggatcgagggattaaatctcgaccattgatagcgcgtcgtcactgttcgatgcaaacttctcccgggcagctgcatgcatgcaacttttcccgcgcacagaattgcatatgtgacagggatagttaatgtcccgcgcacaaaagggcttcgattgtgggaagagggcagcgccagccaccgtggcgccagtgcctgggggg

SEQ ID NO: 2649 - DNA, 1534 bp, Oryza sativa
gcatcagctgataatgcagtcatcaaggcaccaccgtatttcccagttaggaaggttgcatctatagctagtactggcctacaatgcttaaaagcctcaatggaaggaccaaagcaccagaatacacgcataaaaattttcttggtcactccatcaacgttgacaaccctatcaagatgagtatcgatgtggtagaccatactgggattcctctgcttaatggcttgcagcaaagtgggcaaacggacatacgcttcaccccattcaccgtaaatgagcttcatagcctcctcttgtgccctccaagccttgccatacttcaccctatactggaaaacctcaaatatatacaaagctaacgcagaagcagagagtgtaggttgcagttttatggcattgcataacctatttgctatgaactttgatgtcagctgccggtggctccctgaaccttcggcagtagcacaactatgttccttacctacccgtgatatcctccacgtgccactagacctcttagttgcatggaccttctatttgcaccgtgggttttcacatttaacagtgtacctcctatttgcggcagaattgacaacacggtatggacgatggtgcacgatggcgtactcctggagccatagcttcaatgcgaccatggataggaactctaaaccctttctgagaccatccacctggaatggttctggcaactgatttaagttgatgccgccatctagtagtgcaccatgggcatgtgttaggtctctaaactcaggaatgtctggcttcctcccaaacaccttctcaaacgcatgacattcctctaatgctaacttgtcattattagtaagtggagggaatggacggtcatcatcagagtcttcagcaaattcaacatcatattgctcaacacttgcctcctcatcaacatcatctctattgacttctactgagacagaatcgtgaccaccactcaattcgacatcaaagtaatcatctggattcacatattggcctgctacttctgtcgggtattcagggttgcctccatacgacgaccaatgaacactcgccgacaaatgttcacttagatcaagcctctcttgtactaactcccttttcatctccctcactgcatccacatcatcagtaccgcaatgtctctttgatggtcctgtctcccataaatcatttccaagcaaaggtctcttcttctctccttccccctccaagtcttcttgtaccaactcagtcttacttgcaccccctccacgacgagaataatatgtcacaaaattcttctcaacgtaatgataagaaggagatttgtttagatccaaattttctacagtacgaactaactttgatgcaaacacctctagagatctaaactgagactcttttaccaaatcaaagtaaacttcccattccaactgacctatcacatttaatatatacttatgcccttgaccaacatcgtatctcccataaaaacgaatctccacatatcctcggtccatccaagaacttcttt

SEQ ID NO: 2650 - DNA, 2315 bp, Oryza sativa
ctgcagccctcgcatgacatggtgcggaagatggtactcaactgcccagaaacaaatcaatgggcactggtacatgaattagtcagagtcttgattgcacatcgagttcagggtcaggcttgaagtctcatttgtgtggtatggtaaccactcaatctgcaaaagttgaagagatgtcgttggttagtatctcaattaaagaagtaaatgtctaactagaagtgatattggaagtacttacatgttgaggctgtaagcagtccatctcattgacataatgcttgtatgccacatcccggtgagcatgtgcagtggcagtactctcaaaaaggtaggccactctcttctccatgtctggctcattgtagggccaaggagtgaagctttgcctccacttaggccttccaaccggtaatcttaaccacatccacagctgaatcaatagcacacaaccactcatgttggatgatagtgcctgacgacaacaggcctcacagagttgtccatatgtccatgccaacactgctgagccccaactgaaacggcccagatcaccaaggttgggcgaccaaaggaatccatatcgccgaagcaatgtcacccccagcattaggaaacagaacccctcccaacaagtgcaagatgtatgcacgagcataacactcaacacgccatggctcagcatcgtcgtcaagatgtgagaagttctaactcagccaagacaggggtattccattctgcttcttcttccccccttgcccctgctcaatgttcagtggaatgccaaacagctgctccacttgtgcacgccatccaggagtctctgtcctgcccgtcacggcatgcccccgtaatgggagggccaagatcatagccacatcctgtagagtgatagtcatctcaccactggggaggtggaagctatgtgtctcaggcctccatctgtccacaagtgctgtcaacgcaggagcgttgaacactggcattcctctgctcacgaccaaggccaccccgagcaacccggccgcccttaggtacgggatgtacctatcgtcgaacactggggggcatgagctctaactcggagcggttgaagtacctgcattagcaattgtaaatcaattagttaatataatgtcaaatacacgctaccgatacttatgtacaagtgaatcaatgccgattcataccctccccgcctcgatcgcagccccgcgatgacgggcctcgtagtacgcctccaaggctgggtaagtcggcggttgtccctcctcggccatcctacatgaaaaagtaataaattcaccgttatttacctccctaacacttatattttttttggacttcttcttttttggacgcttaggacacttagttttcttgtgaccctcctggtgacacaacgagcatctattttgcaccggcgcagcatcaagttgaatgcatgaaggtggtttccttccagaaccacccagacccgagtccatttcgttcttgaatcgtttcgatctcctcttccctatttttttaatcttcaaatttgggtcagcaacaaattcttcaccatcgtacgatggccactgtgtggggtcgaggtatggctcaaagcgacttgcccatgtgttcacaacggctcttgaagagaactgatacggcattcggttgggagattcctcatcaattgcatgaattagataaacgtggataagatgtgagcaaggcatatggtagagcaatggcctttggcaagaacatgagttcacctcaccttcaactttgaaagctcttgcgccaaatctaacaccaccacgcgttataccacccctctctgtgacctcgtatgtctttttctgcttatcgaaacaccttgcagtgtgtttgttcaccttacttttttgcaccttcatcttactatcaaccttggtggaccaacgctgccctacctggactcgcttcaaagcttcatcatgtctgttcacaaagtagtcattgcacttcatgaacgtaaatgatactatggccgtcactggaagcttacgaacaccaactagcacgctattgaactgttcggccatgttggttgtcatgtaaccccaccggcggccatttctatcgtatgcacgggaccaattatctttatccaacaactcatcttcaagccatttacgaggaccttcgggaatacgctgccttagtgcctcaacgcatccctctcaaatatccacttctcgtcaatctgacatatccttaggagctcttttgtctgatgcttgtccgcaccggccttgtggaaattagcattgaagtgcctcatg

SEQ ID NO: 2651 - DNA, 10481 bp, Oryza sativa
aataaccttacaaagttgcatgaacaaatttaacttcactaatgagttacaaaattaacaaataacactattcatttttttctttttctgctatgtttctcaatttttcacagatgaagttcagtttatccttaaaactttacatggttgttcaatttgtgagatttttttttccaaatcttttgaaaacttttatatctttgtttgaaatgtaaaaatgagaaacatagaagaaataatgatattttttaaaaaaaataaaaaataaaatctcatagatagctaaggtaatagtactttgacaaccatgcaaagttccatgaataaacttaactttatttttgagatataaaatttgagaaacatagtagaaaaagacaaaaataggaatattgttatttgttaatttatatatcattaatgaagttgattttgttcatgcaactttgtagggtcgttcatttacatattacctacatgtgtgattttttaaagaatttttaagaacttttataaaaaaaaaattcaagtttccacctaggatgtgatttccaccatatactttccccatcaggaataacactatatgtgcatcttcggtaagtgtaagagcatctcaaagagaatggccaaatggctctccaagctaaaattggcaagtataaagaaaaatgccctccaacagcctctctattctgttggctaagccgtatggctagccaaatcacagcactcactggccaaacttggagagtcatttcggctggccatccatgggctccaccactcctaccatctctctctgcccaaatagcagaggaccatggcagtggtggtgttacagtaggcttccttgtcgttcgccgccgtcagctctcgccttgtgtgcgtgggatctgtcgcctgcctcacgcgtggggagccacagttgcttcgccgcccgcgcgtcgccgctgtcaccgcccgcgcgcgcgcgaagccgccgccgccgtcgccccccgcctctcgcacacgggggagccaccgcagccgtcgctgctcgcacgcgcggggagccgctacagccgttgctgctcacctcgtcgccgcccgcgcgaggggaagccgccgccgcctgcctggcgtgcggggggatccgtcgccgccgcagtcgatgggctgatgcgggagaagagaaagagaaagaggaggaagaagaaggcaatggaggttgacatgggtcccttttttattttggagatgtaaatagagagactattggagtgaatacctagtttgactgcccaaatcagttagagagttggctataagagtatttaaagagtctaatttagagatgctgttggagatgctctaacagagaagaagggaaaacggttcaagatcctaagaggtcaccgaaagatgtcctctaggatttgaggtcttacgaaatatcctcctgatctccaacagatcagacatgtctccatatagtgaaaaacttcgtgaaggcccaacccgacccatcaatcataaaaggaataagtccatcttacctcactcatctctttcacttcgccgaataacatccctcaaccgcaaaaccggctataatacctcccccatctccgtaaaccggtgcaaatcgactcctccggtggttttgaaagcggtttatgctgatatggcaggttgacttggtccgaatgtgctgatgtggcagccatgtcattaaagggattgaagatagaagtgggtcccacatgtaagtgacaaatgctaaaacaaaacggggccccctgtcagccccatttttttcttatcttcttcctcctttctaccttcttcttgcagccgcacgcacggaggccgattcggccggcttcatccaacactggcgccagttgatatgaggtggaagtcgctgacatgtgggccccaattgccaactcagcgagtcaaccgcggtctagcatccatgtcagcaaatactgcttgctaaaccactaaaggagataatttgcaccggtttttgaagatgagggattcattatacccggttttgtggttgagggaggcaattcaatcaagcgcaagagatgagggagacaaaatggacttattccatcataaaaataatgtggcatctctaggcccagtccattacagttcttcaccaatatttattttcctttttgttttttatccacctaagaaagggggaaactacatccaattcgaatccgataagaagaatcaaatccattgcgtgtagaaatggagaggaacgaattcgccggagatctctggttgttgtttccccggaccagctggtgcatttctccctgatgggaagagaagccagctcggttacaagccatggctccgcaccggcgcgtccggcttctacaccggagctcctcgcatcctcctccttcagtaacggcagcgacaaggttctataaataatgcttgtttgcattgtttgttgatatagaggtcgaaaataatgcttccattatcgttgtctagggagtggattttgatatcccgaggggacgacttctcgttgtttgtacgtcactcaaataattatgaaaaaaatttaaaaaatatattaatatgttatgttatattatatttaacttctacatttcacaacgagaaaaacatattaaactacagcttgttaacatatattcatatgtcaaatttattttttttccgttgcgagatgtaaaagttaaatttaaacttgtatgtttatggattgatatatcacatgctaatacatcttcttaatttatttttcataattatttaagtgacatccaaacaacgagaaagattccacattaattatctaaagcctcaatctctactcactactggagaaaccatctttggtcagttgcctaaaatccacaataatcctggtttgaattttaaccgggactaaagatgactttagtcccggttgaaagagctgacatcactttttactctttagtcccggttggtaaaatcaaccgggactaaagatcatttttagtcccggtttaaaagaagacagactgtgtcagacccttctattatctttagtcccggttggtgatccatttttaatctcggttccttataacaaccgggagaaaaaatgaaaacgaaaaaaaaatcgcagagcaagcgccgcgcctcctcgtcctctcgcgcgcacagccttatcctctcatctctcctcgtctcccttcttatcttctccaatctcctcccttctcaactcctcctcttcccccttcctccccttcacctctcctccccctcccttgcgggcgcggcgcgcggcggacggtggatgcggccgcggcggcgcaggcggtggcgtgcgacagaagcggccgcggcagcggccaggcggtggttgggatgcggcctggcggaggacagcagccgggtagcggaagaggccgcgacggcggccgggcggcagctaggcggcggcccggtggagggcggcggccaggcggtggctgggctgtggccgcggcggcgcaggcagcggcgtgcggaagaagcagccgtggcggcggctaggctgcggcctggtggagggcggcgggcaggcgacggcggcagtggaggatttgtttattttttggatttgtaatgaatttgcttttgagaatttgtgatgtatttgatctgtgtgcgatgtaaatatgtgatgtatttatgatgtttgtatttgaagatggtggatttgtaattgatcgatttgagatttagagatgatgttctgttatgtgattctgggggatgtggtgaaatcaatattcaaagtagaaaacaatacaagaaaagagaaactaccaatcagatctgacttcatctttagtcccggttggtaaatgactttatttttaatctcggttggtgttactaaccgggactaaaaatcgatctttagtaccgggtatttgaaccgggactaaagatagcgatttttagtcctgcattcgtagtctcgatcgaaaaactaagactacagatggttataaaccggtagtaaaaagcctttctctgctagtgacttgatccgatcctctctctcttcacctcgccgccagcctcgggtggcgccgccgcctcctcttcgtcgttcttggcgacgacggcggggctgctaactagccgcgcctccagctcccggttcttctcctccagctccgacagctttgactcgagaaacttcacgtactcccttgctccgatcagtatcgacgacgtcttgtctttctgccattaaaatggatcgagaaataatttaagcaaatattagtgaagatcaatactaatcaattaatacggagtagaagaaaatgttcatgaatatgcatgtatgcatatgcacgtgtatacgttcgtgtataagccagctataaacatatttcgaggagataaaagagaagagagaatggtagcgagctacagatttgtagctaacttcagcacggactccaaggtgcaagtgtatatgacatgtgggaccagatattaattatatagtatatgtttataattaactattatattagttggctattaagttggttatagataatttgaagccagcagttgactgtactactgtattaaacttgctctaattaataattgtacctagcttggagccgggagggaggacgtacggcctggactggagggcgacgaagctgccgttgagcttctcccgccgcttccgctccgacatcgtgtgctgcagctggttgctggacggcggcggccgctgtctgctggtattagcactggcgtacgcctgtacattgttgccgtgtgcatcttggtcagcaccgattctatggctgtgtttagatcacactaaaattaaaagtttaatcgaaattaaaacgatgtgacggaaaagttaaaattttgtatgtgtaggaaagttttgatgtgatggaaaaagttgaagtttaaaaaaaaaactttagaaccaaacacgctctggccctgtttagttccccaaaagttttcgccaaaaacatcacatcgaatatttagacacatgtatgaaacattaaatatagattaaaagaaaaaccaattgcacagttagggggaaattgcgagacgaatcttttaagtctaattagtctatgattagccataagtgctacagtaatccacatatgctaatgacggattaattaggctcaatagattcgtctcgcggtttccagacgagttatgaaattagttttttcattcatattcaaaaacctttttttgacatccggttaaacatccgatattaccacccaaaattttcatttggcaaagtaaacggggcctctatctatagaactggcacctagctataatctttaaaataaaaaaatgtgtcgccgccgtctggtggagctccgacaggaagatgacgccgctgaccgtgacgcccgagaaggcgccgccagcctagcttcttgcactgttcaactcattattaatcgattttgctatatatttgtcgacaaattttcccctaaaaatttgacaggtgtaattacagtacaatcgtaatataattacactgtaacttgcatgtaattacactgtaactatagtgtaacttgtatgtaactttcaaaaatctatccgtaatatgttatttcggtaaattggaggtcgtgggaacaaattctttcacatatgtgtgtgctatgatttattttctttctcaccaaaataaatcttgtaatagatctaatgatttaaaattatgtgaaacttacatataagttacactgtagttacatgcaaattacagtataattacatataagttacagtgtaattacactacgattgtactataattatatctattaaatttttagaagaaaatttatcgataaatgtataggtagtctcttattaattagcgtgcctctccgggcttctccccatccccatgtacgagtacgaccacctcccgcccccggcgcggtggccatccaagcgagagctcgaatcaaccggtccaagaaggaggcgccccacaccaactttgtcagcccgcgccgctggctatgtcaccaccggccgtctacatctgcatctcgttatagtgtaattatgtgtggattacactctagttaattacatagtgtagcatttagattgtaatttttattattgttctatagtataatttctacttattgtttatacatgtgcatctctccctgcttcacacaatcctggtctccacaaccacattgaaatagtgtagtaagccaaatgcgtccttggcccgaggaaccgagaaagttgcagctaaacacaagagtaattagtgtgctcacggataacgaatcaacagagaacgtgccaaagaatcacatatctcaagatgggatctgatggtaaaaaaaatcgtatgatacggtggaaaaaaattctgtcaaatgatttatagcaaaaccgataaaatattataaataccggttttccctttaaaactgacacctatagttaattaaatatatcagttttatatatttttattccgtgaaggttagaggtttaaatgagagaacttttatgttacaatatactacaagtatatactagcagtataaatgatagaacgatatagattgtagctgcaatggcttcaactgcgagcttcttagcctcatgattatgcgctctgcttgctgccaacacacccaccaccgcagctgcgcctcccgctatacttggcctccccgccgtgccgtcgttgcctacacaccgccgccgatgtttgtcgttcggtcaatgccatgggtcgtctctctgctccggatagattaggcatctacgatcaatttgacaattagaatgaagatgaatcacgaattactaaatacccctttaaatttggcagggaatccaaatgtgtcctcatttataatgttagtatatactattagtatatatattgtaccgtaaaattctcttaaatgaaccaacacctataaaccgataattattagaagtgttgtagtagtgcgtattggctgaacgcgccaccgatcgctggcaactccatcgccggtgacggtggcggtggcaggctagcggtgtaatggttgtgctggggctcgctcgttgcacaccaagggtggtggtaacggcacctgcgaggagacctccagctactggaatcccgtcaccgccaccaccgccgacaaggtctttgggctgtatgacctattagggaagagatttgcttcagtccaacaaaaagtatctcgaggtaccagtacctcacggtatcaaatcgtttccgatcgttggatttaagaatatctatcttgcctaactagatccaacgatcgaaaacgatttgatactgtgaggtaccagtacctcgagatactttttattggaccggagtaaatctcattagggaagctaccggcggcgacagcatgcatggtgcgtcgacgaatgcatcaggaggtcgtccaccatggcggcgccgtacaccgcggcaccggctcaccgcggactgatcatcgtcacatcatccatgctcaagctcatgctgatctgcatgtcataatccaaaacccaacaaagttaattctacaatatatttctttgatcttatatgcattgattgttcatgatcgagctagttaatcaataaaaaaaattgtgatataagcttgcctggttgaaatggcgctgaatctgcgaggagctgatgaacagccgctcctgctgctgctccctttgctgaaactcccgggggctgcagctgcaataataatatgcacgacagaacagaggaattcacagaccatatatacattatcgtctcgatcaatcgtgatttgtacagtggtgtagaattcctttaccagtttgacatcatggtcctttacttttcagagaatcttgttataatatttgtgtctgctagctatgactgacgacgaacgttacagtagtattagtcaactttcacgcttgattcttaatgttgacctgaagttactaaagtaccacgttaattagccctccatcattatcgatcggccatcatgcagacttttggggctcgcaggatcgtcagcagagtgaagtaattaattgaggtgtcaaggctaattaattcaagccgtcaagaacattgcatgcccacgtattcgaatcaatttgtttggagagcagttcagtttttatttagttaatttataccttcttagaaccatatctaatatgtttgatggttggcttttgagggttgacaagttcagttctcatctgatctatacctttctagaaccatatctaatatgtttgatggttggcttttgacggttgacaagaaaaagagtaaactcatacttgtaggagcatctgccatatgttgggctctgtggttgagtaaaaatgatatggtatttgacaaatcaccatctatctcatatttacaggtaattttcagagcaacatattggctccgatgttgggtacaactgcaaaagtatgaagatgatggagagcttatgaaggttgcatgtcttaggcttgagacgacagttatgtaactttctgcaaaatatagatggagatttataaatagatttgaataaatgtgtactccttatcttgatttggtcttttattttgttgggtgtgtttatttttattttgaactacactcttcgttagagtgatactttgcaaggccggaatgttttattccattatctaaaaaaagtatgagtatgtgtataaggttttccattatcttagagagaaaaatgtgtacaatcataccgtcaataatgtacatgaaatttcttcttttcttttctttttcttttttctgatcaacgaggtgtgagacagctttggcgtttgacttcaataagaaaatgtttaattagttagttagttataccttgagctgtaatgttaggtttgcactaggagggcggccgccggagccggcgctggtgctcatcgccacgaggctggcgccgtcgccgatctgctctctcaggcactgcagcgtccggagcacaacgtccgtcgtgctcatgcctccgccgccgccgccgcgcaagtccacgttgagcgtgcaacaagtctcttgatctcctcctgtcgccgccgcagccgccgctccgctgccgccgctcgtcgtcgtcacctcgatctctactaggtcctctcgcttcgtctcgtcgccggcttccgccgccgccgtctcgcctttgtcgttcttggcggcggggcggctggctagcctcgcctccagctcccggttcttctcctccagctccgacagctttgactcgagagactttatgtgctctcttgccctgatcagtatcgacgccttgtctttctgccattaaaaaagagaaatattttaagcaaatagtacggtttttttttcggtcagataatacttgtcgttttggataagcgtgagatcaaactttagagtatttaattatgaattatttttaaaatatttattttttaaatatggtaactatagtaaatatatgtatatagagtagtcttaaaaagtactttaataaggttatatatttgttaacacttttatatatattataatgaaaaataatggttaaagttgtttatttaagatcgtgccttttacaaaacaataacccatattatggaattgctacgtatctgtcgacagattttctattaaaaatcagtcgatttgttgaccgcatgatttactttgagatacgtgcatgtgccattgagtgaaaaaaaaaagtcgctagaaaagggaatcaaacccatgacgtcgggatgccacaacatgcactccaccaactgagcaagcagcggacaacagctttatgtctatacttaacatttttaaaactttcaatgcagttacactacacccactcacaccattgttataccacgattaaaatgtaagtgcactacagatacaatgtaatttttaagtacatgcgggtgtagtttttgttttacatgtacggatttactcatcgttgttttgttgcattgtagttaacttaattgtttgaggtgtgatttgatatttttgggactatatataccgttgtatttttcataaaagaagttttacattgcaagtacccaaagttacatatgtaattttaatgtatttacactgtaagttttaaaattacatatgtaagttgatgtaaataggtgtaagttgcttgtttttccttttcttttagcatcattgaagtgattaacgtccggtgactgacgtacgttgatatgttttcatttgaaccgcacgtgggggtggcttgaaaatccgactaattttctacgaaaaatctgtcgaatgatttttagtctgtctaaatattattaacccggagagagtattagtcaaggtggtgaagaaaatgttcataaag

SEQ ID NO: 2652 - DNA, 1121 bp, Oryza sativa
gaatgattcagtggtaagaaaggctgtgatcctttcttcgatgtggttaaggaaggctcataatgttcatagtcattactgattccagctttgccttcgtcatcttattttaggctaccgctcaaccttcatattttgtcgcagaagagcctgaagatgacaacatccttcgtactaggacatatgacgttagcatcacgtaagctcttttatttgatcttcatgctttttaagtcttttgttagttggttagtattagttgccttattatgtgttattagtttccatattatcttcctcctctttctgagtctgtatatgtttacacagaacttctatagacattaccaggatttatcttcaatcacatgttctttcgaccatccaagttttatattttgcatatctgctcctcggcacttaaatatagcacataacacactatctgtgaacaatgaatcgtagttggcattatatgccttgatttcaaagtatttgcatgtacaacattgtgcaagtgatattgctgttgtcttgaacttctccctgttgcttctgagcaatgatgttgtcctcttggttattttttatttgccatagtattgtgtgcctcagtcttctagtttaagaaagtaacaagtagttctcttatttcagatatgacaaatattaccaaaccccacgtgtctggcttaccggatatgatgaggtaagtcattttgccattagaagtgtcttgttgcagtcctgaagatgaagttgattcatttaattttattgttgttgcagtcaagaatgccactaaagcctgaacttgtgtttgaagatatcagccaagatcatgcacggaagacggtactttcattcattttagtatttgctattgacatgtaaaatgaaacatgaatcaacttgaactggattggttcaccaatatccttaattttgttagtactgcttatattttgaaccgagcctttcaatgtcatagagtacacactacgcattaagccaatgaaaagtatttgaagtattcattttttaaaaaatattttatatcagtaatgtctccagaaattagattttgcaatggtagcataccggaattattggcctccttt

SEQ ID NO: 2653 - DNA, 708 bp, Oryza sativa
agccctccgtgcccctggttggtggtgtcggctgtaaagcctttgtggcgagccttcggaacgtccgttggcccccaaggttccggcccaccatcgccgaaaaatatgacgggagcgtcaaccccgccgagtttctccaggtctacacgaccgggatcgaggccgccgggggtgacgacagggtcatggtgaatttctttcccatggccctgaagggacaggcacggggttggctaatgaacttgccacccgcgtccgttcactcttggaaggatttgtgccaacagttcaccatgaactttcaagtcacatatccgcgccctggtgaagaagcggacttacatgcagtccagcgaagggatgatgagtcacttcgctcatacattcagcggttctgtcaagtccgcaacaccataccatgcatccctgcacacgcggtgatctacgcgttcagggggggtgtgcggcacaaccgcatgctcgaaaagatcgcctccaaagagccccagactaccgtggagctttttcagctcgcggccgagtggctcgcaaggaggaggcctggacttggaacccctccggttccggtgtggcagcttcggccgcccccgggtccgccgctcggtcaggccggcgggacaggaggaggaagaagaggtcggcccattccgacgacgagggtcatgtcctcgccgtcgggctgcagga

SEQ ID NO: 2654 - DNA, 933 bp, Oryza sativa
taatagtctacgtttaatatttataattaattttcaaacatccgatgtgatagggacttaaaagttttagtcccatctaaacagggccttaagctgcgtttgttgggtgatcggagagaaagcacatcgttttccgtgtgcacgcttcccaaattactaaatagtgtaatttttttaaaaaaaatatagagaagttgctttaaaaaaatcatattaatccatttttcaaaaattaaaatagttaatactcaattaatcatgtggtaatggctcacgaacgttttgcatatcttctcaatcttctctctccccttctccccaaactcaaccttagtcgcatttcgatcggtatatacttaggccatgtttagttcgtgtgccaatttttttttaaaaatatacaggcgcacatttgaaatattaaacgtacactaataacaaaacaaattacagattccgtctgtaaactgcaagatgaatttattaagcctaattaatccatcattagtaaatatttaatgtagcatcacattcttaaatcatggcgcaattagactcaaaagattcgtctcgtaatttacatgcaaactgtgcaattggtttttatttttatcgacatttaatattttatgtatgtgtacagatattcgatgtgatggaatttttggaagtttgaagggaagccttagtcgcgtataaataatgttggcgactttggagcacgttgaagatgggagcaacagggacaacgtgattaaactgcagagtcgtagtttgatcgtcagtgcttacgcagcatgcacgcttaatttcagtatttcacacgcggcatatatatatgtgtatatatatatatatatatgtatatatatatatatatatatatatatatatatatatatatatatatatatatatacatatatatatata

SEQ ID NO: 2655 - DNA, 8395 bp, Oryza sativa
aaacgtccaaacgaacacagaggcagtcaatcagctacggatggatggatgctttggctcttctcttatgctccatccgtcttattataagcagagacggtattttccgtgtataacgtttgattttcgttatatttaaaacaatataaacaataagtcacacataaaatattattcatgttttattatctcataataataaaaatattaatcataaaaatatttcaaataaaatggtcggtcaacgttggacatagaaatacacgattttatcatgattttcgttagcacgtctgaaataatttttttatatacaagttatttttaatatagtattagataaatagattttttctaagtttaaaataattaaacctcagtaatcacgtgctaataacttttttgttttttcccctaactttatctttattttaaaaaacgaacagcaacttactttggttcaccgatttttccgttggtaaccaagtggtaaaattactattaaggggcggagtatttttttcttgggaaaattggaacagataaaattacccttttttcttttaccaaacggtttttcaagcctccttacatgtttttgttttacactcgacttcttttagtaacagataaaatttagcttctgcttcaacatgagctactattatttattaaaaagtttttggcttaaaaccaattgtaaaaacatctatcgaagaatgaagaaaagaaatgttgaataaccaccaagtcaccaacaatgagaacactgtacaactctttcgtacagcaaatcattttagttctgctaaaaatttatcgacatttttttttaagaaatcactcgattttccaccgtccaattggtattaagattttgtgctagcgtgaacgttccataaaaaatatctactactcctgggcagcgggattagatccattgatcggattattaccaactgcaaggctctaccaactgagcaaggatgatgtgttgtcaagttagccaaaacaacagctacaaattagttacactaaagttaaactgtgaagattggagtagagaaggcttccttctggactttttgtgtgagtttcagggctggcttttcaattgcaattaatgtaattagactgtaggtgtaagtatagaataattagagtgtacatttttttaaagaaaaaaaatagtataagtgttgacaaggagatagttctaggccttgcagcgtcatgtagtttcgagtttttaagttgcccatgtatacttatttattttaacctggacaatacgctgcttataatctaggcagtatgttgcttgttagatggttaaaaaaaatccgagcatttagaatcatcatctatattctctatatagctaatatctactaatttctacatttcaacatacaagggtgccacatcatcacccactaggaattatcattatctagagtatttaaaatcacatgcaagcatgctacatcatcacccactaatagttattattatttagactatttcaaatctcatgcaaacatgatatagcatttatgattctgttatatttttagaagtcaatatataggaaatgtcaaactatcatctccacatcattttcatattatttaaacatatacatattttctacaatacaacatacatccgttcacatatcccgcaacagagcaagtaagtgttattccctctgtcccataatacaagagattttgagtttttgcttgcaacatttgcccactcgtcttattcaaatttttttgaaattattatttattttatttgtgacttactttattatctataatactttaagtacaacttttcgttttttatatttataaaaaaatttgaataagacgagtggtcaaacgttataaacaaaaactcaaaatcccttatattgtgggacggagggagcatcatttaatccccgtccaaaattgtagggcagatatttttttttcacggccgacaaaggtggggcagagtctaattacctgctacgttacagcctgcacaaaaaaactggacccagagcgtacatgcatacccctgtcacggtggggcgccccacccgctcatctcatgcaacccaacaaaagacctgagcgctgcgccaatccaaatatccaatcccggcgctgcaccgtccacgcataaatccatcatacaaattcaagtacggtgttcgattaaaatacatattttattttgattttctttaccttgttttttaaactgtacattttgtatttaattttttaatatagaaattatttttaaatagtagataaaaataattttaaacttaaaataattaggtgctatttttttttattttacgtgtttatacttaatatttatcttcatcatattgaaataggaaatgtcgaacccatagtttggaggcgaggatcctctatcataagctttactttgtttagttaccaatttttttttccaaaaaggtcgtatcgaatctttgtatacatgcatgaagcattaagtataaataaatgaaaaaaaattaattgcacagtttgcatggaaatcgcgagacgaattttttgagcctaattagtctatgattagccataagtgctacattaacccatatgtggtaatgatggattaattaggctcaaaagattcgtctcgcggtttacatgcgagttatgaaattagtttttttattcatttccaaaaactccttccgacatccagtcaaacgtccgatttaacattaaattaaggccatgatattactaccgttatagtcaccgatatgtaattctcactctcctattgtctcacacgacggtatgtataatgatagtgctactacgatagaggatagaggatgtgagccccatggtccggacaccccgctggcaccgctcgtgcacctataaatttgctttgccatcgcgtcgtcgggatcgtgtactcgtcgtagccaccacaccgcccacacacccacaccgccggtagcgaggcagctcacatggcggcgacggcgacggcgacggcggcgccggaggaggaggaggggaagagggtgatgacgagggcgctggagtgggaagggtgcgtggtgtcgccggtgccgacggcgacggccgacgaggcgtgggctctgctgtcggacttcctcgccttccaccgctggcacccgcgcgtcgccaagtgccgccccgcctcgccgtcggccgcggcgagcacggccgccgccccgccgggctccgtcgtgcggtactgcgagggcacgccgcgcggcgacggggcgccgccggactgggcgcacgagacgctgctcgagcacgacgccgcgcgccgcttcttccgctacgagatgaacgacaacaacatgggcttcggcgtcttcgtcgccacgttccgcgtcgtccccgacgctggcggcggcgacgcggacgcgccggggtgcgagctccggtgggagttcgagggcgaccccgtgcgcggcacgcccaaggaggccctcgtcgcgcgcctgcaggccggcctcgacggcatggcggcgcgcgtgcaggagcacctcatgtccgcccgcgccgccgacgccgccgtcatcgccgccggcggcgtcgaggccgccgacgagctcaaccgggacaaatactctatcgcggtctgagtgttcgtccggtccgtcgatcgatcggtacagtacaccagtatatgcgcggttgctggtcaactttatacgtgaactaatttggctgcaaaaacgtatattgttcgatgaaaatacacgaactctgtcgccgtcttccgtatatatgtacgtacctacgtatacctacctacgtatacggtatactgtgtttgtacgtgcttggggtatgggaataaacgttactaagtactgaaaaaaaaaccagtctctagcttgtctctcctcgtgtactgttcgatcgtggcattatttggttttgtaatttaatttgtaaattttattatatggaagtcaatgcaaggattaattttaatgttgactaattcacatgtactttcctgcatgtgcttgccatgtgctgtgcttactattggccgctgccattttgcctcccctgagccccctccgtggaatcaagttaatatgcagctgagtgctgacgtatgcaattgagaactgtattttttttttggtctattttgtaaggagtgttatgtattcacgatgtaaagattatttatctatgagtttcattgactttatgaaacatttttttttacaatatcgtttcccttttgtttactaggcctagagttgtgtgtgactttgcacaagccagcgcaacatgattccgcaaaattgtatagggtgtaaattagctactgctcgaagctaccccttcgtttatttttttccagtcaaatttaaaaaaactttgaccaagtttatatacgtgaatcaaacatattataaaagagaaattcaatgttgtatttaatgaaactaatttggtgttataaatgttgctattttttataaacatagttaaatataaagaagttttattaaaaaatcaaaacgacttataatatgaaacgaaaagaaggatttgcttttgagatgacatccacggtgaaaatcaacttgcatgtcctcctttgctggttagcttatatcagtcgtggtgaaactaaaatttaaaattttgatataagaatttattttgaagttttttccgtcgtactttattcttcagtattattttaaaaccacaaataacacaatataaaacttttacttataagttatttttaagttacttaatttatcttattagccgtagctcaaacaatttgagagcttaattgcgactagagttataagcattacatgtaagagcaagtttaatagtatagccaactactagcttcaaatcatctatagccaatgtaatagccaattcatataatagttgcttactataatattaatatctggtcctacctgtcatacacacattacgtcttagagtccgtgttgcagctagctagatctgtaacccactgcttttctctcccttctttatctctttaaaatatgtttatagctggcttatagcctgctattgtacatgcttttactgtgctcgtaacgataagcattacctgttttattagcaagattggttccatgatatcgagagatctcgatttcagaaatatccatatattttatctcatgttaatttttaaagaagttgtggagtcgacgaaccccagaaggtaccatagaagttgtggaccgatctgggcataagggggaaaaaggtactacaatgatggtatttttctttatcgctaagtaggaattgcgagattgtagtgtactagagtaggagtattatgaaaaaaaaatgctaaaagaaatgcacatgttgtccctgttatttttttattctggatttttcaagatactaaatggtaacgttttataaaaaaaatatataatatttttcttaaatacttatctaaaataaaattttaactgtgtactaatttattattcattcgtttatgccttcaaataacaatcacacaaattaaattattcattaactttagctaccttaaacaagggggttaattgcattatactccatccatcccactgtagacatttgtgcactcattgatgtttgtatatccggtcgattttcataccctcgtcagctaggaaatgtgggcgcctgttgaccccaagagtttccatgctgtaatcaaagaggatttgcacatccatcgccatctgccgttgttgatgtatagtaaccccagcccaagaaattgtccttatctcctcgtggcaattggcacgccccatatatgtcatgtgtgtagaagagtcaaaaaccggtaagccgttacatattaatttagtgacatttcggccatgtgtttgcatattttaaattttcctagctaccactagtttttactactattagacacgtgtattaattaatttagacgaataaatatgtcatactcctccctccagctctataattcttgacgttgaagcgttctgcgttgtggccaggagttcctattgtttgagctcgaaagtggtgtttttggactgttttgcccaatggtgatgtttcaaacaagataaagccgctcatcatttgctatttggttgataagccgtagaacaatgaacgaagaaataagaatattttacaataaaacttttatatatttgtttttagtgatttacgattaaaaaactcaaaatccactataaaattaagcttcaaaaattcaatttttggctagggttgataagcaaacatatttacggcattccttgcacgcttgaattagtggacatgactagaatgagagtaaagagcaccgatgtccactccggcaagtggaacgaagagcgaagattagattgccgggctcaccaacgacgttgagatgtccacagagcagagtgaagatagggttgctaggctcaccaatggcgacgaattgaatctagttctacatgacaaagatctatgttcttaaccagctgagtgtacctacacttttaccaacaattgaatagtactttgatcctttttttttctcgctactggcctcttgcctgtgtttagtgttggacggagttttgaactcataagcaacccgactcattgacggcgccactccggtatatttaataaagtgcaaggcagggaatagataaggtacataagttaatcactcatttaagaccatataccttttgatagagatagaaaatgtaaactatttctattactaaaaagatagtcactcctggataagtgaggattacctccgaagcaacgagtattatagcactggagggagtatcatatattactccctccgtattttaatatatgacaccgttgactttttaatcaacgtttgaccactcgtcttattcaaaatttttatgcaaatataaaaatatttatgtcatgcttaaagaacatttaatgataaatcaaatcacaatagaaaaaatataattacataaattttttaaataagacgaaaggtcaaacatttatcaaaaagtcaaagacatcatacattaaaatatggagggagtattcaattgattgatgaatagtcaactcccgtttgcttttcctctcgtccgaaaattaaagagacggccagtacccagtgttctttgagataataaccgagtaattaattaaccagcggagtacacagtagtacagcaccgtctgctcgccggaaacgatgggccatagctaaatttaggcgatcaagagcaggtttaactgtaaagggactcatatcttataatagagagttattatatattacagatgagttataaggttatttttattttttctcctctctctatcctttacttatatatttaatatatttatcttaagatatgtgtttacttatatatttaatatatttattttgaaatatgtgaatagctagttcttttttattttttaagttttctcttctccttgtaattataccatcctattaaacttactctgaacgtggttttgggttatagttaggatgtgtacgtgtgcgtgcgtgtgacggcgacgtggttgaaagagagagagggatggacggaacggcacggaggacgtgatttattggcgatggcggcgtgagaggctggaggacgcccgtgcagcgaccgcggcgacgacggcgacggcgacggcccacggatccaccgaagccggcgccgcagcgaacatacggccgcacctgcccgcgcgcacgtcttatctggtttgctacggcccaaattatcagctgctgccgccgccgcactgcgcgcatccatcatcatccatgcgcctcgccatgcatgctacacggtgacgcaaaagaagacggcacccgacacggcaagcaacatgcatgtagagcctccatcttgtgattctccctttttcgcttacggcagcagcattctttttccttttaaatgtgcaaggtatgtatatgtatactgtcggtcttaaaaaagaggaaaaattacgaattaccctctcccccgaagtatcgcggtcgtccaaattacacccctgaaccacaaaaccagacattcttcacccccaactatgcaaaccggacgaattacccacctggacccaatccacggtggttttggtttacgtggcactccagtcagcattttatttattaaaaataggtgggccccacctgtcagtctctctctcatctatctcttctctccttcttcagacggcgcggcgaggcgagtctctctctttctcctctttcaaacggcgcggcggcggctgcggcggaggag

SEQ ID NO: 2656 - DNA, 1200 bp, Oryza sativa
cacatctatgacactaaacatatatattgttagcttgattcttagtcaaggtttgcaatgttgattttcttaaaattgtggcatcttatattttgaaacggagggagtatcttcttaatggcaaaattgcatttgaggtccgcgaaatattgcctttcgtctatcaagctcgtgtactttctagtttgtacagtgaatttggctttgaaacttggcaacatgataaatatagttggtttcagtgcaggtcaactgtttcagtatttttcaataccacacgtgccatattttgcaaaagatacatggggatgcatcctaaaagggggatatattctaatctttcagatcataaaatttcaaatctatattcactctacaaaggcctgtattgtatctggcacatgggccattttgtcatcaacagcaggtgtaatgaagggcctaattaaacatattcaagtagttgagggacttgagctaacaaatttaaagtattgagattttattagacaaaatgcagcagtccaggtacctcaattgcaattttgcccttttgttttcagagtcgtgtttgagaatcagacaagaatataactgtttgctctaatgtttacaacattgtcatggtttatggttgatgaccttttgaattaagatacttctattatttatagtctgttgctttctttcttgttttaggagctttctgtcattgtggcaaggagcagagacggttctacggtgtgctatcctgttgttgaaaccatccacaagtaagattttcttttatgattaccttgtgttattgattggcattgtctgtgttgtgcttttgccctttggaattcccaaaatatgaatccttagattggaacatccagggataacatctgccatgttgttgaggctcctgccgaggtgcctgataaaataaagaagttggctactaatgtagctgaaaaggctatcaaatcattggaaggtgctggtgttttcgctgtagaattatttttaacacaagataatcaggtttgctgggaacatacctgtatcataagttttaatccttcttgagtggtgttggcatatttatacccatgttgataatttcactaggttttattgaatgaagtagctccaaggcctcacaacagtgggcatcacacaattgagtcatgttatacctcgcaatatgagcaa

SEQ ID NO: 2657 - DNA, 2275 bp, Oryza sativa
tcacttcgagctacttcccaatatattgtacatatgcaaagatgttcacacatgcattatctgtttcttagggcctgtttagttggtgaaatgaaaatttttgagtgtcacatcggacgtttgaccggatgtcggaaggggtttttggacaggaatgaaaaaactaatttcataactcgcctggaaactgcgagacgaatcttttgagcctaattaagccgtcattagcatatgtgggttactgtagcacttatggctaatcatggacattaggctcaaaagattcgtctcgcgatttacatgcaaactgtgcaattagtttttctttttatctatatttaatgcttcatacatgtgtccaaagattcgatgtgatgtttttgcgaaaagtttttggggaactaaacagggccttagtggagttggatttttttggggtgaaagataaacattgtaaaagaagataacattagcatgctatcggaacaattctttggtttggttcataagaaaatggtatttgtagataacaaaaataacgcttgtatcatttggactatcaggttttttagctttagcttgtgtaagagaaaattaagattacatgttaattacgagagtttttccaaagtggagagtgggaggagagttgtacttttgagctctcaatgcacttcctttaacttatgtagaaaaaataaatcacatcgaagtcctcaagatgcttgcctttttgagaaaagatatttgccctttttctgtgttagaagataattaaattgtatgtcagttatctgttttttttacaaagtggatggtgagagtgatgattgtagttttaatccctcaaatgtgcccccttgtacttatctggcaaattagctgagtaaaatctcttgtagattatatttctgaatcaaattattcaatgttctgcagatcgtgaaagaggaaaactgggaaacatgcattgctgattcactgctctatgctaaggtgcattgatacagaatgattctgacctctcatcccatgattcattgatgcgaaatgatcaacttgatttccggtttgatatctaatagcatgcaaaagtagggggaaagtggaatactagaatcattgtagtttattctacaattaacattgcagagtgttgtaaatcttcctttaatttttcttattttgatctgtagggattattgctggcagttactttggttatcgattattggctgactgtctcctacttactgggatttgttggtatgaattttttttttgcgatattattgcgtaatgagtaatacctgtttctgaagtgcaatgaaaatatttgatggatttggtaccctccttgactataaatttacctttcacgtgttgcaggaacttaaaaggatactctattcctatttaagttcctgtagtgtacattctatatttgcccttttattcaagatgtacattcatgttaatgaaatgctgcaatctcctattgtctcttaattatatggtactgtataatgttctttggcatatttagttggagcaatcatgcatcagtctcctggtttgaatgatgaaactattataccctgtcctgcttagccaagttagtctatccattaggatatggaacctgtataccagatttttcatgcttatgcccaaggacaactcatcagagagcgtaggtgtgcgtttaccctgtctgttgaacacccttctcagttttatagaatgaagaaactggttagattgtgtcaaatgttagattaaacctgtggaatttcatcccaaaaaagtgctcacaacatttcctaccttattgccaaggagtgtaagctgcaatacaattttggcccaattctgtgagtaaattatccatctttttcttcatgcatagcccaattttaacatgaaggaccacaaaagcactgcccctggtttatctttgtaagcaggatgagaacaacttgtttagcttgctctctcatactctgataacaaatttgaggtgtagcctatctgtcgcctcctgttcccctatcagtgattgcaattgattccaattgttgtagtgtagcgatgctgatgctagtgattgtgcagtaaatctgtgattcagtaatctggttttacagtcactacagcacaatatcaatgtatgtttttgtcatatgggtcctatgctagtcatagtagcaattggcaaacacattaatactgcccatgatagattatccaatatgggacacagtgatagtggatt

SEQ ID NO: 2658 - DNA, 2154 bp, Oryza sativa
tttacaagccagttacattttgagcttgctctccttttcttttggctattgatatgcaatagaaacacggtaattatcttttatcaaatctaaaacaattaagtcatcaaagtttttacctgatacaggatatgcatccagttcgcatcccttggaccagggacatgtctcaagactataccacacttctcaaattctctcagtaccaagttggtatcgccaggtaaaaaactggaaggacaaagacaggggcaacattatcaaagtgaattatgtaaaacagtgtaatcaaatatgcaccaagtcaggggaactattcgagatagagtaagacgaggacaaacctaagtacaacaatgagaatcatattctattgaaagctaaattaagggaacaatatgtacagagcgaatgcatggtcatatgaatacattcatgacgattcccccaaaagaaagaatagcatcaggatgctgtttctgactgtctagtgcacgtgaaattatatattaattcatcccaagaaaaaggtttgctaaactatttaactagatttttgggatctccttttccaacttcctacactcaaaaccttaaaattttccaattactgaaatgaatcacgatctctattctctacttcagcatatcgattcaactacaacagaaacatcaagacaacatagcatccaatcacatactcactgatcaacttagacaatcatcgttttgcagtactatgtagatttaattgaaatatggcataacacatactcaactatatgaacccaatgccacaaatttcatcaaacttatactagtttataacttaatcatcctactatcataacagtaagaggagaggccacatacccaaaaacggtgacccactcctcctcgtcgacacggccagcggaaggtgtcgaatccttcggcatctccggccgcgcaacttccctgggtggcggcagcgtgatgagcgtcaccttctgctgctgcgactgctgcccagacgccgtcgtcggagacggctgctgctgcggctgcacgacaccatcgaccggcgagccctccctggccatctcctccctcgaggaggaccaccacgcggccggggagggggacccattggagcgcagcggggtggaggagaagaggccgccgcggtggggagggggaggcgaggggctcatggccgccgcctgaggtggggtggcgggcctcggcgagggggagtggtgggagaggtcgtcgaggaacagcagcggcggcggcggcggcggcggggtggtggaaccttgcgtctcgcggcggagggaggccgggggcagccgcacggccgaggagatcggcgacgagaggtcccggagaaacggcgggtggtgccgccggtgatccggcctggatgcgctcatctctgatccggcggcgacggcgacggcgagcggcggcggcggcggcgagaaaccctagtggagaagcgagtgcccgttcgtgtcagtgactcgtgtgcgtggcctttgggtttatcaaggatagatgggcccacctgtcagtgggacaacagaagtctgaccagaaagcgtaaattcgtcaatacgtaagctcgcttcggaggcgtagttatcaataggacaatgaaatcctgctagaaggcgtagagttagaatacgttattccttttagaaggcgtaatttagttttattttgggcttttagttcaaactgacagcggagcggagaagcgtcggaggagatggaggttgcgacggcgacggaggcgtcggcgccggcggcgagcaggcggagccacccgttcccgtggctagacctggccatctccgagccctactacttcctccacctcgtcgccttcttctcctacttcgcggcccgcagcacggtgccctcggccgacgacggcctcctcctccgccgggtgagatactgagatgagataccggatctatttgcagtgtaaacgatccggatcgtgccgtttgggtggtgatcgaactatttcggctcatgtggatcggtggtggttggtgtgtttttttttctgctgcaggagatccaggcggtgctcacgttcctcgtgctcttcgtcgtgaaggtacgatcgttctcgtacggtgtttcgtgacgaatgct

SEQ ID NO: 2659 - DNA, 1378 bp, Oryza sativa
tggtattggatgatccactgaatgcttacgagcgaaacaccaggaacactggctccagaccgaccgggtgatataccagtatgacaccctgatgatcttaggctcggtacaatacaaattctgtggaccaataatgtcacttcggtgcgaaaaacccaacaatggaaatgttatgatcagtaatcctggatttgccttggaacagccaaaagaataacagccagtacttggtaacaggatttagaggccgaacatcacgtccataactttggacaatactgattttgtgggtgaagcaatggcccccgaagcaccacggccactcccgttgccgattccatttggcatataattgctaggcaaaggtgctagtgcatttctagttgtaaatgaacttggtgctacatgctgtgatggaaatggatctgttgcaccaacttgaaagttctcatttgtcttctcattcaggtactgccgctgccatgggtccacttgcttcacaccgatgataagaacactgtttaactgttgaccgtgcttggtgagagctttttgtgcatcatgccggctctggaagatgtcgaacaagatagagatcagcaattagaaacatacataacaaacaatggtcagaactggcaacaggaacattcagtgatatctcgcatatatttgtagtttgtaatcatgattgaattaagcatatggtcaagccctacatacgaacattattgctggtaggaaaagctcatcacatcaatgtactgttatcatactacatctgaattctgcaatctatcctaacaaaatacacatgacgatcaaatgaaagggaaatattgacccttgagccacattgtcacctcatagttcatgcatgagatattgtcatgtactaggtccacaaatcacaaactgtgcgtctgtgacaccatccatcttttggtttagtgttgatttgttttcacatctaaacaatttaaattctgaaacaaatgcagagagaccaaaactagcagagagcaggcatatgagaggatctccaaaagactacgtgtatgactagccatcccaaaatttggctagcgtagcaaaaaaaaaaaaaaaaagaggtcctccaacagactagccattggttgggccatccggctagccattccccacctacactcactattatggcccaccaaaaaatatgaactatggagagtgtgatttgggaatttggctagtctgttggagtgcacaggaaatatggctaggcactttcttggctagctagccataagaccatttggctaacctcttggagatgctcttagctgcttacataattacataatgttccaaacttttcataatcatgtcctgaccaaaa

SEQ ID NO: 2660 - DNA, 644 bp, Oryza sativa
catgtcactggttaaccggccgctccctgcactgtatggaatttgcacggcctcggcgaagaccagagcttggtggctctgcagagatggcaatctcccatcaacaagtcgaatttcttgcacagagccatcgaatgggggttctgtcatggagttggaggtaatggaccgcaatgagcagacataccatgagaattcttctgcttctgaggatgaggacgatgatgaggaagaggctgtagagtggagcaaagatgagcttgatgccatctcggcactctttgaccggccgatgcgccagaagccaccaaagccgccaaacccggtgaggcagcgacctctcccgctgccactgcctcacaagacacgactgcccaatgctcctgcaccaaagcagcatatcaggctggcagcaagggctgcactttcttcacgctcttcattcagtgaccaggtgtgcaagaacccggaggtcctcattgggattgcccgggagattgcagcgctgccaccggagtctgacgtgtccattgtgctcgatcggtgggttcggttcctccggaaaggatccttgtcaatgaccattcgggagcttgggcacatggggctcccagagagggcattgcagacactttgctgggctc

SEQ ID NO: 2661 - DNA, 12961 bp, Oryza sativa
tcctaagctgtgcccaagtatactactgtactgggaactaagagaaagccattagataagcaacgaaatagctgcattatcatatgaaattcatttccatgctttcatgtaggtagcatgtgctttcaactagaaatccaaatggcatatgagtatctcaatatcacatcagttttaggaaaatgtcacaaacagtagttgagtaattattatgaccacaggtggttctattccacatgaagataacatgagggaattattaaaaaaaaaacttagttgaactaggaatttcacaaggatttgatagaaaatttacagaaagcagtattttcatctctacataaacataagaaatttcatgtatttcaagtgggccttacagagagcatttcaatgtggtccaaactgtccctttatttttgtccttcgagctgtgtttgatctggctgattgggtgtacaaggaggctaaaatttttactgcctaacctggaatcgagaccagaggcatgtcaaagaccatagggtgaaaagaaagcggtaaaaagaaaaaggaaagcctgggtgaaaagaaatttgtgagagctttgtttgatctgggtgactgactgggttatgaagaggctagattttttttttttaccgtctatcctggaatcaaaccaggtagggtagtacactatactccatccgttctattttaaatgcaaccataagttttcgtgtctaattttaatcgttcgtcttatttaaagattttttataattagtatttttgttatgagatgttaaaacatgaatagtttactcgtaacttatgtttttaatttttttcaaaaaaaaaattaaataagacagacggttaaagtttaactcgaaaaactatggctgcacttaaaaacggcacagatggagtagcaaagtattagcaaatagcaatgcccaaagaagcggtaaaaagataaaggaaagcctggggtaaaaaatattttttacggtggccgtggtgatacggaatctgcgtggcggatcagggtccaagatgcggatcgccgcctttaatcgggctccaaatgccgagaaaatccgctttttctccgggtcttctgcctctacacaacccgacccgataatattttaaccgtcctcctccccccctcgtgccgttcaaaaatccaaggacaaagaaaactgctgctgtctccaatctcgaggaaaattctcttggtttcactcaggtatccaagtccaatcacatatcctcttttccttttttttcccttttccgttcgctaatgacaaagagaattgtccctaatgacaaagagaattgtccccaaatcaaaaaaagtaataatgaaaagaataagagaaaacagttatatttgcaggctaaatatttagggagaaatgtgagtttttgctaggagattttcagtgtttttataaggacgaaaccagaggcagttcgtgcaaaggagcactagatcgaattcacgcaaatccacgggaaatatctcctaattatttatgggatcgagaattcacgccctgactcagggggagaatgtcttgagtacaacgctagtaaaaatattaaaaggagagcaaaaagaaaaaggaaaagagattcctttaagcacatctaaattttatttttttttcctcctcttctctcctctctctctctctgggtgtgatgggagaaaggaaaagatacagattgtattctaccgatggaagaaaaagaaaagcttggaatctctaaagcatgtgcagaaagctttcaattatttgcgtaaactatctgctcgttaatttgttaatctgccattaacttcacctcaacttgttactccaagaccatgtttattcagaatatgttccccttctaaagtgcatgtcatttaaattcaaaatatgacggttcgatataccacggtcaaaacgaatatgaaaaatattctcaagcccccaaaagtttcatattcgagtcttattcagaccaaatgcttttcttaacaaatattaataagaatttcacatgaaccaattcaattcacacggaaatcagagaggttaaagcatttcaaagaagcccccttacagaaaggtaaatgatacacgtcaaagaaacttatttacatgcgtcttagaaaaactgatgtggcatgctacgattgtttcttgatatttcataactaattgcttactaaattcaaaaaactgtttataaaagttcagtaaggttttgtaagtacatactctcgcttctcggtcccaaaataagttcatttttcacctattacacatataccagtataaaataaacaaaactataatactctcactttattaaaagtttttacgcgaacactttattaaattttaatataattagttctatctttatttgctctcaatgcatttattctctactttcacaaaattcgatgtagtaaatactcagaaataaacttattttggaacaaacgggaaatgataaaaataatcttatgagggtgcagtatagcattactcttacagaaatgcctcgtggaagagttacacaccatggtcttaggcgggcctcacaatctctgatggtaaagtgataatgacacacgaagatcatcataatgttttgatggatggatggatggagagtactcctacgaaattacatgcgccaatctcctataacaatctagaatgattggacatttcatagtatccgtccagattcgttgtaatatgaaatgtcttatctaattctaggttatattatgggatggatggaatataaaaattttttgaaaaaatgtttgtttttttttttaaaaaaaaaagaaaattacatgtgccaaatgtgcattcgccggcgacgtcgcagccgggaactttcctttttcccgcaatttattagcgcgcgcgcgccgcgccaccgccgtcctcgcgtttaaaggcgacgagacgacgaacaacacgaagctctccttccccccctcacctcgatgtcgccatcgagctctacgccttctcggctatagcctagcttgcttgcattgagctcgatcgatctggcatggtggcgtcggcggcggcgatggacgcgagcaagtacgtgaggtacacgccggaacaggtggaggcgctggagaggctgtactacgagtgtcccaagccgagctcgctgcggcggcagcagctggtgcgggagtgcccggcgctggcgaacgtggacccgaagcagatcaaggtgtggttccagaaccgccggtgccgggagaagcagcgcaaggagtcgtcgcggctgcaggcgctcaaccgcaagctcaccgccatgaacaagctcctcatggaggagaacgaccgcctccagaagcaggtctcccagctcgtctacgaccacggccgccacggcgtcgccgccgccgggatgatgcggcgagttcctgccttccctcctcaggccgccgccgccgccggccaccagctcgccaccgccaccgacaccagctgcgagtcggtcgtcaccagcggccatcatcatcagcagcagcagcacaacgtcgtccagccgccgccgcgcgacgcaagcccagctgggtacgtgacgtcaccacctgcgccatcgttcttgcaggtgcagctctagcttactcgttgttgcgcaggctgatgtcgatcgcggaggagacattgacggagtttctgtccaaggccaccggaaccgccgtcgagtggctccaaatgcctgggatgaaggtcacaacaatttgctcttcatcgtcaccaacttctcaattgcaaaagcttgatttgattttcgtcgtcgtcgtttgcagcctggtccggattccattggaatcatcgccatctcgcatggctgcgccggcgtcgccgcgcgagcttgcggcctcgtcggcatggagcccgctaaggtaattaaccttcttgtcactgtcacttctgcaataagcaacagtatttctgatcgatcgattgattggttggttggttgattgatgagttgtggcaatgatttcatcaggttgccgaaatactcaaggatcggccgctgtggctgcgcgattgccggtccatggatgtggtgaacgtgctccctgctggcgccaacggcaccatcgagctgctctacatgcaggcaagaacacacaagcctgaaaattctgaacctgaacctgaaattctgaagctgaaatttgtattcgatcttcagctctatgctccgacgacgctggcgccggctcgcgacttctggctgctgcggtacacctccattctcgacgatggaagcttagtggtgagctgctctgatcatggagcgtgtaaaacaaattatccatgtgtaattagtaccaaagtatttgtgtgtcactatgatgtcctgcctgcttgcctgaacgttcttgctctgaattctgaaggtgtgtgagagatcactcagtagcaagcaaggaggcccaagcatgccacttgtccagccttttatcagaggtgagatgcttcccagtgggttcttgatccggcctagcgatgttggaggcagcgtgatacacatcgttgatcatatggacctcgaggtactaaccattacaatttcttgtccaaatagttcattcatctagcagaatgaaatttaagccattttgtggtcgcagccttggagcgtgcctgaagttgtacgacctttgtatgaatcttctgccatggttgcgcagaagatctcgatggcggtacagtaattatagcactctgttcttgcttatttgtagaaattcttgactaattcagttatgcaaaattcaggctttgcgctacctgaggcaggttgcacacgaagatacacgttctgtgatcacaggatggggaaggcagcctgcggctttgcgtgctctgagccaaaagctcaccaggtaggactgactcctgaacagcagatgcttcttggttcttgccatgaatcttctccagctcaaaagtgtgaattttttttttgcatgctctcttttcagaggattcaatgaagctctcaatgggcttgccgatgatggatggtccgtgatcgagagcgatggcgtcgacgatgtttgcatctctgtcaattcatccaaagtgatcggttgcaatgcaacattcagcagtggactccctattgtcagtaccggtgttctttgtgccaaggcatccatgctgttgcaggttagcttcactatgaaactagaattaatattttttttgtttggttgatcatgtccagtttttttcatacaatatttctgctgtttgctaggatgtctctcctccatcactactgcaatttttgcgcgaacaccggtcacagtgggccgacagcaatttagacgcattcttcgcctccacgatgaaaccaaacttctgcaatttacccatgtcccgtcttggaggattcagtggtcaggtcatacttcctttagcacacacgtttgaacctgaagaggtaagttcatcttctactgtctgtcagttacataaaaggtcctgtccaattctgtcctcctgctcaattattttgatgcaaccatctattgtttttcagttcctggaagttatcaagctaggaaacgccagcaactaccaagatacactggtgcaccgtgatctgttcctcttgcaggtgacttcttgattcatgagacttatcaccagttgaagaatcattttcttttttttttcctctgtaaaacttgtgttcttggcctgattgcaatggcagatgtacaatggagtagaggagagcagtgcaggaacatgttcagagctcatctttgcgcccatcgacgcatcgttcagtgatgattccccactgctgccttccggtttccgcatcatcccaatcgattctcctctcgtaagtaaatctcacacaatagtttcaaatcaaatcttctgaatttttatgtttaaaaagaagttgttctgaatattctttccctgcaaatgtcaggacacgtcgagcccgaactgcacgttggatctcgcgtccacgctcgaagccgcgacgccacggagcaggatcagcggcgtcaatggcggcggcggcggctgtgctgctgctgcggcgagctctagctccaaggcggtgatgacgatcgcgttccagttcgcgttcgacggccacctgcaggacagcgtggccgccatggcgcggcagtacatgcgcaacatcatctcgtcggtgcagaggatcgccgtggcgctctcgtcctcccgcctcgtccctcccggcgccggcgccgccgccgcgcagctctcaccggtgactccggaggcggcgacgctgcccagatggatttgccagagctacaggtctgtggcttcgcagctgcttgtgtgatacagttcatatctgtcaagaaattttcacttgccatcatcgcaagattttttaaaaaaagttcactcttttttgaacgaaaaaaaaaagttcactcttcataactgatgatgctatgcttatacagatttcattttggagatgaactcatcaaatctgtagatgcaaacagcagcaatgaatcgattctgaaagcagtttggcatcatccgagtgccatactctgctgctctctcaaggtttcttcagccccctttttttcttatttagatacagattttatcttaatttttataagcatgttaattaaactgttaaactgtatatttcgtacgaaaatttttatatagaaactttaaaatataagataaatctatttttaaatttaaataattaaaatttaattaacgagatgttaaatgttaataactttctcattttacctgtccgtaatcttttatcttaaactcgaatggggccagtactcatactgctatgcatggaggattgtttgttctctgaatttatttccgggacttatgaatctttgctacagctcgactgaaattttgttttgacacaaattcaccttaaagttgacagtgtaacgcaccatttaaccatctgatttttcatgtaggcgatgccagtgttcacatttgcaaaccagtctggcctcgacatgctcgaaacaactctggtggcgctccaagacatgacgctggagaaagttttcgacgatcaagggaggaagaacctgtgcacagagctccccaacatcatggagcaggtataatcatatcacaaactgacatgagataagtactaatgcaaaaattatttttcatacataaaaaaagatacttttagattaataagtaattttgactttgatcaaaattaaactacttcaagtttgatcaagtttgattaattaagtttgtagataaatatagtaatatttacaacaccaaattagttttattaaattaataattaaatatatttttataatatatttgttttaggttaaaaatgttactacttttttcagtttgactttgaccttaagtcaaaaatgagttataatctaaaatggagcgagtacattacatggaatgcattaataatcttatcatcttatcaatagaagatacagtaagatttcaccgaggctttcatcagttgcaaattgattaattagtggcacgcgattaactaaattgcaggggatggcgtgcatggagggaggggtgtgcgtgtcgagcgttgggagggcggcgtcgtacgagaaggcggtggcgtggaaggtggtcgacggcgacggcggcggcgcccactgcatctgcttcatgttcatcaactggaccttcctttgatttcatttcattatacaccccaatgcaaaacggatatataatattacaactagtgcaatttacgtacgtaatctcatgaaacagcgtgtacaaatgttttggattttgagaaccgcggtgctagtttttgtacggatcgatagtggatacattctctgttcggagtagggataaaaatggcttcttctttttttttttctttgaaatggaatcagaacgatagagactaactcgggaacaacttattgtgaaggcaaacaagctggtcacagtcatatgcaaactttataaattaacatcgtatacgtaattattagcgaaaattcaaagaagcaagtaactaatttaagcactccattatatattttgtattaacatcggaaaaagttgttacaaacaggcgcaacaactatgtacgctccacctagatgggcgctcctgcctccctcgagagcatggcctccgatgttgctagctccgctattccctgcatggtcttgcattaaccattgaaaacccggttgtttcgttacttccatatcgtgtaggccatcaagatgatgatggtgtcaaaccctcatctttgggccgctatgattttgtctcggcgtctcaccataatatggaaggattgctcatttgatccagtgccatatagaactatccaccatagctatagtgtttatcggcattggatcagaaggttggtcaattgactcctcactttgattacaaaagacgcatttctacggaccaagcagtgtcggccctcacttgctcagcctatcaccaatccaacatcaacggtggactaccaaccaattgaaataccgatatcgtggcggcgtgtggttcttctatatttgcttgtcaagtaaggattctctccttagcaaaaaagcgtgataagctgatctagaggagtattgcttcgaggactcctagcaccagaggagcgtgtttcctagtggagaaagggtttttgcattgatccgtgcccatacggcaagattgttcatcaaggcagttgtctcattgactggccctaaggagctcgatgggattggcatcatcgatctccacttgccacagcactgttgtattatgtgtttcttttaagatattaacgtgcacttcataacaatcaacacttacagcactagcgcgttcgtaaaatatcatcgcatgatatcaacactgacaatacttcataacaatcatatactatatgtaactattttgatgaaacacatcagacttattttgatggtttagtttgtgcgataaatttctctcgaaattccggatggaaaaaaaaaagatcatttaaggacggtatttggaatcgaaataaaataaccgtgtaccgtttcacccctattttcgaagcaaacaaatacggcgccgcgcaaacgagcttcggcccaccgcgacgttgggctgggccgaaagcctgaaatcccacgttgcaaaccacaggccgcgcgtcaaaccaaagtttgctacgtcacgcatgcaatgacaccattgatttttttttcttttaaactaagtttgatcattcgtctttaaaaaacatagaaaatataaatcgtgatgaaagaatatttaatcataattaaatgattttttagtaaaatatgaattaattggttaaatgtatctcacaaaaagttaattgtatcgtatattaaaaaacggatggagagagtacaatactcatgtagctagacactacagtgcactcagatcatacaatgcaactgatccacatacgtacatgttcaatattaggtaggagtactaacactactgtctactgggccgcactgatgcagtgacagtacactaccgttggatctaagctagctagcttggttaatatatagcgtgatatataccctatctgccaaaaaaacgaatcgaactagatatgacacattctaatataacgaatctagacaaagatatatctagattcgtagtattagaatatatcacatccagtattagattgatttttcatgaggcggagagagcatttacttagaaaatacgattggttacacatatatacaaccacatactaacatcgatagagagcgatcgagttaattactatcgaacaccatggagctcgatcatctgcaccgatcgccgggaggagcgccgccgttgatgacgtcggcggcgaggaggctgcagaagcgcgggtcgcagctggcggacctggcgagcgccaccgccttggacgccgccgcgccgaggcgccgctcctggcacgacgccgacgtcctcttgtcgaagctccgccgcgcgatgcggcgcatggagcccgccagcgacagcgtcgggttcagcctcgtcgtcgcgttgaagtccctgcactccgccgcgtgcgacgccagcgccgccgccacgccgccgcccggcgccgggtcgcgccgcgccgtctccttcacggcctccgagcacagcccgcacagccagtcgccgcagaacgccgcgcgcacgccgccgatgtacgccgccgtgcactcctccgccacgccgcagcacgcgcaccgcacggtctccacctcgccgccgccgtcgtcatggcgtgcgtcgccgctgccgctgccgctactcttgatgatgatgagcttctccatcttgtttgagctttgtgagtcgttggctacgtgaagctcttgttctccctgaaaaaacgcatgtgtgacttagacttgtatatatggacgcatgcatgagaatatagaagtgtattttcatttctggatgtctcattatctgtctctgcttgtcaaattaaattatattagtgaatcaacaaattttattttgtatagaagaatcaactactatgtaaaacttaatatgctattagaaccaaatatagttcttcttttgacagtcggcagctacaactattcccagaataccagtccggattcacatttgcattctacagaaccagaaaatgaactagtcaaaaatttggtttctccacattctcaccatctcgatcgatacgtactagctaattctcaaaatctccgtatatatctctttaagtagggccatagtcaatttgagacttaggataattcaaaatcattccacgtacgatgctcaaatttcaacttaattattagggtggataactaatttgatatatgaataaatacatgttatgttattgtgcttcgtgcatatccacagtattggccaatggccagtcaatgtgaaactgacgacatcagtgatgatgtgttgtgggaattagagcaaactaactacttagatggtattaagaatcaacacaaacaacatatatatgcagagtctaatatttatgtctacaacttcaaaatgatttgtctttgggaagaacttgggagttgagatttttcttttaccttgggagagaacctgcttgtgtttctttggataactgcagtttcctggtgctgcatctatctgatcttcaggaacctgtgtatatgttagtctgatccacaatatatgatagatgcatcaagatgtgatcatgtccccatatttataggcacagagtgatgagcatctaaccactcaaaagtggtaactaaagtttaaaaagtgcaacttgaatctcatcttttaaaaatttgcaacctagaagaaggtgacaggtgatactctcctagctagttgcactgcatgtagctagctagcttgtaaaggagcatgcaggttctcctaatcgtagggcaccatatcttatgtgtgaaagggaagcttgtgacaggggcaatctctacagttcagttaagaggccggaaagggtgtaaaagattgcactttagttaacatcaattcactaatatgtggcactgtccatgtccaacatgcaatgcaccccaactgagccgcaaagcaaagttccctaggaaaacgaaggcatctaggctcggttcatgcatcccatgcaaatggcagtgttgatgtgtgtgttatcaacttatcatcacactatcaatgagtaatcatgcatcatgctaaaggtgtaaagagagaagaaaagcttatgttagctgatcacaaatggatgcaaggaacatacccaattttgggttttaattagctttttttatatatgcaaggataaaaattagtacacttctcgcgagcgaggaaaagaaaggggaggggggtgcgtatagtttatacgaaattaataaaagtataaagcaactatagtaaagattaaatttaagcgctttttaaaaagataatggatgaatcaggcgctccgcccctagaattaagttcgatcatatgctacatacaccgttattgagttatattcacgagtcagttataccctaaaaacataaaactaattagaaagagaattcaattcaatactccctccgtcccaaaatataagcaattttagcatagtatcaagtcaaacatttttttaactttaactattaatagcaaacaaaatataaaaaatatcaatcatgtaaaattgatgttattagatttatcatccttagacaaactatcataatatagaactcttgttatttaaaacatcttttatagatattgttggtcaaagtagtatctcgaagattatgtcgaagtccaaaaatacttatattttgggatgcagtgagtatatacttatactcaccttccggaagaaaccccctcatgcctcaaacatgaaattaaactgtattttatttttattcaacactactcccttcgtccctaaatatttgatgccgttaacttttttttaagtatatttgaccattagtcttattcaaaaacttttgtaaaatatttaaaactatatgtatatataaaagtatatttaacaatgaaccaaatgataggaaaggaattaataattacttaaattttttaaataagataaacggtcaaacatgttttaaaaaatcaatggcgtcaaatatttagagacagagggggagtatatttgtgttgcaagtatgtagtagcattcaatttataaaaaaaacttaagctggtgagtaatggtaggcgtcgtccacagtaatcttgcttgatccttaaaccacacatccaacacatcaacaaatcaatcatattcgagcaattgggtgaagtgctccaacggtgcaggcaaaaactgctaa

SEQ ID NO: 2662 - DNA, 2486 bp, Oryza sativa
ttccttcttttactgataatgacgctagtgctttcccagtcaatgtctgataattagttaataatcttcaaagtacctttttttgtcctgagtatagtatatttcatacttttttatgtaatcttgttcacactttattaatgcagatactctaacaagaacatttcgtttggaataattgatcttgggcattttccaaatgctgcagcaaagtttggaatatccatgtggggtaaatttctagtcttattctgtgcagtattgctcttctcaacttgatatggagtgcctgcatttctttactgtattgtgttcagaattttgtgtctgtttctttcaaaatggttccttattctcatttgaatttcgtttggcagatcatcttcccacttatatactctttgacaaggccactgaagttgcacgattcccagaaatcatgaatgaatcaaaagtatttgtgccaaaaattacaaaggttgtttttttcccactgtgctttcttatttttgttatgagttatgaacaaaataagttgcatcatgtttgcatcttatttcgggtagactagtatgatttggcacagttttgcaattttaacctaccctgttgcagaagatttaacattactagtaccatatgattacttacacatataagcaaattaggcctatgcttaaactctcagcatcaaaccaacataaatataattcctcaaaagtaatctagatgctgtctatggtgtgttgcatcaccctttaaatttgaagttcaaattcaaagtatgatgctagtacttactagtaacaaatgtgataaattctacagaaagtaacaaatggaactgaacttgaaatgttataataagtagggtattttatatgcgcatccacattttcttctcatttcatttcatttctttatgtgtgcatactggggcagggcgggaggcagcttttgcactaaatatacttttcatacggccaattattccagttgaaggggaaataggaaaccattgttcctgaaaagaaatgaaagaagacacacataggagattagctagtgtgacaggataatggtgcttagagaaacatatctcccacttattgaaatgggtggaaccgataaaaataaaatgaaatggccagcctaaaaaaaggtgcgagagaggatcatatgcagtacagtatgacaacacagttcctttttggtttggccaaaacatccaggttggttacctggcactgtacttcaatcgaaatagtgagaactgacgtgacaaatttattgaagccaccaatgatagaattcctgaaacatcagttagctatcgagtcgtcctcaataacctaagtgtgaaaaattgactgtatcaagtactgctgatgtggtccaattttgtggtattgctttttgtgggggattgttaatattattcttataacttctcttacagaaacttctctgccagcacttcgaccttgacaggcgactgattgaatacctatctagatgtaagtcagccagagattactttcactgtctttttctcttcaccatcaatagaacacctgttaactgaatgcatactgtcgcaggacccatcatctatcccagctgtctcaaaaagaaagcgccaattcccttttgtcgacgaaccagatgaatgaaccggacagttgtgcggcagcaatcacttcagggggtatcttcaagcttgttttattctatgagtttacttgtacccatccaatcaaggacagtatactttagggtagggtgggggtgggcaggattatgatttgcatcttactaccatatgtcacctcttgaattacggaatgttaccacacctgtggagatcttgcaatgatatgccaactatgttttccactgcagttagtgatcaattcagacaccattcgtttccagggcaggcagtgtctcggaatttgttcgttgacaccctttttccgtagtggtagtggcctgcatggtaggtcatcctggctcccctccaattccattgcattacctgccatgcctgatgcttttccttgccaatttacatcttaaatatgcctagtgctccctgataaccttgattaaaacacaaagccgttgcatttgggcaccaccattatcaagtggaggaaaagtgggattttggtggtattattaacaaaagctgattgtccagtaaaaggagggattggtgatgggttagaataacaaaaggctgtgtatgttgggtgttcaaaaggaggagagggaggggggtgtttgataagatcaccatagaatagttttgcaaatctggggaggccaaatggtagcatggatgggtgatttggcttagaataacacaaaaggtgtgcatatccaggccatgacacgtcagacccaggtaagtggttggtagtgggataggacaagctctagcttttttagcttttggttatcgtctctttccattttcttat

SEQ ID NO: 2663 - DNA, 791 bp, Oryza sativa
gatatttcaagcttaggctgcgttcgttactttgtgttcccaacacagctgctgcgcacggaaaacggagcggtccattagcgcatgattaattaagtattagcaatttttttccaaaatagatcaatatgatttttttaagcaactttcatacaaaaactttttgcaaaaaacgcaccatttagcagtttgaaaagcgtgcgcacggaaaacgagaggagtgagttgggaactcccggtaacgaatgcaaccttagttacctcgccagatatctcacacaaaatgaaaaggcaaagcatgaataaaattcttactggtaattgagaaaaggaaaaatatgatgtgaaacaaattaccagccaaaatcgtgttgttggctcctccgttagtaggccttccagttgcaatggagtcaaatgatttgaatgacctagataaaaaaaaagaatgccttcaatccaacttaagaggaaactgctgtgatttttcaatttagaatcgaaaacgaggaaagttaatttaatacttctaatcaatagaacaaaagcaatccagtaatttcattttatttaagaagttaaatgaatgcatgaatagggatacgaatgggttgacctatggggtacccatcgactaacagtagttcattttccttacaatttttccacctaataatgaactagaaagtggagggaaaacacatttctaatagaatagtgtgggtcatggggtaccggtacccataagtaggcaaacttgcatccctaattccctatgcatgagtatattc

SEQ ID NO: 2664 - DNA, 6671 bp, Oryza sativa
cctgcagccctgctgtcaggcgtctaacgactttctactaacttaattaatttctcttaacatgcctatgagggctatgtacctatacaaattgaccttgatacttttaaaacgatcttattaggagataaataaatattcataagaaagatgatcatagcatcccaattacacatatgatctatgaagtcactaatcataataggtattcatctagcaatatagacaataggttaaaaataaatgtgtggccagttgaacatcataccaataagcatgtgggttgcacctaggaatcttaacagtgaaacaaccttgaggcggcctttacaattggaaattgagcaaatgttgctagatttaaaacccactgtaaatagaaaaattctgtttgaatgaatatatatatatatatatatatatatatatatatatatatatatatatatatatatatatatatatatataatacaatcaatcaaaaaattgatattattggatttttttggttgtaagatatcctactggggagttaaatatcctgaattttcttataggaaccacctcctttgtttcgacacaatattttctcatcaattcaaaaccacatgttctcaagtaattttattttagaatttaaatgttacaagggtaattataagaaaataatcagcgctcgaatcacacaaaatacatttaactttataatataataaaaaatattttaataaataacaccaacacataaatattcataataaaatttcacatattatataagaaggtgcccgcgcatgtgcgcgggctatctttctagttgaaacaaaagttgttcaacctggctagggtcagggatcaccggtgtcgtcgtattcgtcttcgatcggggggctgtattccgtacgcttcaccttgcaaaccacgtcgccactattactgtccttgtcgacgccggcgccttggattggtccattactcagcgccatcaatccagccacagcgtcttgagcggcaagttcgttggctgctcgctggcgacaggtgaactgtaagacatgcatgtctttcacattgatctacttatgtctttcggtgggaggcaacaggtgcccatgcatacgtttagctaattaccattgatcaactgctgtatacattgtgttcatacgtactttatcaggataatggaattcaacggtctcccaggagtcgagcagatagcagcagcagcctccggggaggacaacaaccttcggcctcccaaattggaagccgccaatggcagcgtcctctggaatcgatgcgggcggtcgtgagggcctcccgggggcaggcgtctgctacagcctcccgatgttgaggcaaacggtggaaggaggcaacggcggcggcggcaacctaccctagcgccgccgtaatttttcttccttttttttctttcgctcggttcgctgcatttgaagtggctacaccggtctagacgtcgtttggattagcgtccatccgcggacgctgtttacaggagcgtcctgatgcggaagctgtttagaatagcgtccttcttattttggtaaatactcacaaggaattactaattatttaatttaaatattattaattattataaataaaaaattcggctatttttttaagctacgctcaatttgcacttggcgacatgaatctaaccagttgatctatatttactgtgactctaaccagaacctaactagttgagtgtctttgcacttggtcacattatgacactttttttttacgtacctcacttcgcgcttggtcatattatgactatttttttttgaatcactgactcaacacgtgtacatgagtctctgactaaaaaaaaatgcctattgtttggagagttgcttataagggtaattgtgcatacgtgtatatgaacgtatgtatgtgttatatgttttttttaaagaaacaatatgtcacatgtcatcttgcattatacgaaaagaaaaacatcatgtcaaatgtgaagaagacactgtcaaaggagacaaatagacgatggatgaactgggacacaacaatgattttgtaggttaatgaaaagcacgcaattttttcatcttttcctttcgatcggatgattgtacactgatgaagccgtggtgttctctttttttttaccacaccacgaagactctcccacacgacacaaaatgcaccaacctcgagtcactgacaccccgaccccaccaccaccacccttaaaaatctctccctaatccccaccattaatttcgtcattttttttactgtttcccccctctaacaagttattaattccattatactacacgcaggcacacgtacacgtatacgtatacgcatacacgcctcgcttggtacacacgtacgtacgtacgtactagtagtatactagtatatatatagtacaagatgcgaagaagaaatcgtagccgtctgatggatggatggatggacggtgtggatcagtggaggcatggctcggcgtcggccatctcgacgccgccgtcgccggcggcggcggcgcggccggccttgtacttgtaccacctggcggcgacgaggtatacgaggaggttggcgaggcagacgccggcgaggagccagtagaacttgtggagctggcccttgttgaggtcgtcggcgagccaggggtggcggtcgccggtgagcttgtggacggcggcgacgagcgccgagctgacgaagaaccccagcgagagcgtgctcaggaacagccccgtgctcatcgtcttcatccccttggggcactcgcggaggaagaagtcgagctggccgatgtaggtgaacgcctcgccggcgccgacgaacaggaactgcgggatcagccagaacacggtcatgggcacggcctcgccgccgccgacgcgcgcgtccctcgccacgcggagccgcctcacctccgtcagcgcggcgcacaccatggcgacgatggacagcaccagcccgacgccgatgcgctggagcggggtgagcccgtgcgggttgccggtggcgcgccgcgccacgggcacgacgaggcggtcgtagatgggcacggtgaggaggatggagccgacgaagaagacggtgagggagcccgccgggatctggaaggaggcgccgatgtggcggtccatggtggtcgcctgggacacggagaaggtggtcatctgggcgtacaccgtccagaacatgatcgtcgtcgcccagatcggcagcatcctcgccaccgtcttcacctcctccacgtccgtcagcgtcgccagcgtccacttgctctgctcgccgtccggcgcgtcgttgatcgccgcatggtccaagaacctgaggagaaaaacatttgcaacttttgttaagcttacttgcagaagaacatcagttttcagttactaccaagtttcagccatttgtattgtactgtacatcaagttctttcaggttaagtttcaatcatcatatgtattgtaacatcaagtttgttcagtttaagtttcaatcatgtgtattgtgcatcaagttttttcagttaagtttcaataatatgtattgtacatttaagttttttcagttaagtttcaatcatgtgtgtgtacatcagtattcagtgaagctgcaatcatgcgtgcatcaattttcagttgagtttcgatcatgtgtagtacaattgtcagttgagtttcaatcatgtgtgcatcaatttcagtcaagttgcaatcatgtgtagtgcagagtttattaagcttacttgcaaaaagaaaaaaaaatcaatttccagttaagattcaatcacgtgtgcatcgattttcagtttaagcttcaatgatgagtgcatcaattttcagttaaaattttcaaccatgtatagtttcaatctttgtgtgcattaactttcagttaagtttcaatcatgtgtactacagttgtcactgaagtttcaaccatgtgtccatcaattttcacttaagtttcaaacacgtgtacatcaattgtcagttcagtttcaaccatgtgtagtacaatcgtcagctaattctttcaatcagcatgcaggaatttcgaaggattgagttgttctcttcagagttcagattcagaaacctcatcagcaatttttgcaaacttggtaacttttcaaaaagtttaggcagtgattgcagaaaacatataaagtaagacttttgcaatacttgtgtctatcattgacctattttaattgaaacaaaagctattgcaatgttcttttcacctttgggaccaaagaaaaaaaaaggcaacaaggaggtcgtgtgcaagctaaagcagtggtcacagaaacaagatgcttcacaagaacaagacacaaatccaatcataacactaaaacaattttatcccagttagttgctctgattatgcccccattaacatgaccatctataatctattcgtcaaattaaaatcaccctctcatttcgtgagggaatcgtcgtcagcagctaagtcttccagggcttatctttctgaaaacaacatcgtcagagtttccagccaaaactaaggactaaacaatttgtcaagtgtgtctcatagttggcagtattcttcccatttgcacaagttgatctgatctgtcaagctactaattagtatcaggaacaagcaacatgttttcatgtgatttgatgcaatgttgataataatcatatacgcatctgcggctctatacatccccagataaactctgaagatgtgagttcataatctggagacactgacagatcgaacagagactaaacaaccatgtagactgacaccaacctatcgataagataaaacataatctcataatgtttttattcaaagtgttaatctgacatgactttgattgttactgttcaaaaaaaggagctgaactttatcatgtggaacaccatggggctgaagagttcatggcagggaagttgccatgaaggcattttcttgaactctgccctactatatccgtgctgaggccgactaccatggctaaaatgaatgtgatcacgtgtgcctaactaaaataacagtcatgaatctcgaggtgagtgacacgacaagtgtcgctcgcaggcttaaaaagtgtaattaattaaccacgaggtgtacctgaattctcacatatcaccactgctcttttgacttaaaaaggcggctttttaatctatgcgaacaataataataactacggagggtagatttggtttctcctatcaacctcaccaacataagataactataggggaagagaaggtaacttttttatcgatgcggacaataataataactatggggggtagatttagtttctcccatcaacctcaccaacctaagacaactataggggagacccacaatgctaaaactacactgctcacatgcccctccttccttttctcaagctacttttgcatatggtccaatccatggagatgaatgatccccattgcttttgaagcatcaagaaaatggacagatgtgcaatgcaactccaagtgagccatgccaaaatgaaaggctgatgcatgtgagaaagagaaagacaagagagacagagagaggtttgctgcttagatctccttgtcctgatcacttgcaagatggagattgcctacacaaaatgatacactagctcttgttaagctagttgtggcttctagggctaactttcttctgtttttttctacctttttcctggcctctaactttcggtgtgcacacgtctcggtcctgttcagaaacagtctgctaataattgagacgatatgccatatttttttactagttgcttttggattagctttctaatggcccacaatggagttctcatcatggaatttcttgtacacacgtgtatgtttagtcactattagtaactagtgattcttgaatattttcttagttctaatgcttgatcctactgtactgtgtttgcaatagtagcagataagcacagcttcttcaaggcttcaaagagaggcttaacctctctttgaagcaatgtcactttgatttgataaataatatgtagaaataagactttttaggttatatagtttatttatagagcaaatgagatttgactttcacaagctaactccatgatatggttaaatacttcaagtgataaaaagttgatgctgatgagacatgtactggcatttttgaatggtaattaggttaacttttgttttaacttgcaaagatcaaatcatcaagaagatgacatgaggaaatgacagccgatttactctctcagaccagatgggagaccaaacagaagtactagaatacaagctttttctcttgagaagctattccaaccaccgtactagtccatgacacatgtgagctaaatgctttagctaacaatattcttgcccccactctaagttaatacttggttaactttactatgttcatgtcttaatcacactgaagaatggtgttctaggcttcgctaattattcgagatttatttttcaaaaatcaggtatttttctaataacactttaggaccaaggaatctgaatcaaccttttgctccaaaacgtttccagctatcataaattgcaggatgttgagagcaccaaaacatcaaagcactattgatcctatttt

SEQ ID NO: 2665 - DNA, 2948 bp, Oryza sativa
tttaagagttttaactggtgcaactgtttgacattctccataatcttttattctttctttctgatcaatttatcatcatactgttaaactttaaatttctcttccagtcacattggcaggcagtgcttgatctcatatattattagcttgtcagatctttaaacatgaactctatgcaattgcaatgatgcaaatctagcattcatctcatatcagatcatatcataccacaagtgttgaacatgtcagggtaaaacctgagagaagttaagagaagataaataatgtacaagcattacttgtgtgctgctaccgttggatcgtcagaaaatcttcaggttggaacgaagcaaagttcaggcgacccgccgccgccgccgcgcttcaggaacagcatcgccgccgccgccacgaccacgccgacgacgaaccctagcagcagactcagcacgtgccagtgccacacagccggagacgtcgtagccgccgccgccgccgcaggcctctccccctccgacgccgtggctatcaccgtcgacgtcgacgtcgacgacggcgacggcggcgacgagccactctccttcccgccgctgccaactcctgtcatcttctcctcctccgccgccgccgccgccgacgcattgccgccgccggcggtgacatggtcgccgttgctgccggacatgtcgccgtcgcgattcatctgtgcggcggcggcggctggcggtgactctcttctgtatacgatacggcggcggagagtcgcttctggtctctcttcttgaggcttcgtggggggttgtgggccgtcggatcgggtggggaggcgacgtgggccgtcggatcgccaactaactcccggatttgtaggctgtagcctacgccgcgcctttctgggaaagtggcacacgctttttctttgggagtttgcatgcacgtttgtggggttttttttgatttggtttggagtttggatgaacatgaacacaagttgagtgaaattggagtttttggggatatttcttttttgaaaattcatgggccgggttgcctcgttgggtgtggtctatttcgtaggaaattacaagggaacaatgatgaagaggtttcatactctagttagtttgttcatgccgccaaaagggtagtttccatgctttctcaaaaggacaaaatatagctcggatttactttcttaaaacaaaactatgtagcttcgtttaactatgcagtttcctttctttaaaacaaaacatttataactcacacataacattagtggtaaggatttaaacccttaaatgtatagttgtgtgataattttattattaaatctgtagttttgtgatatttagccttaaacttgtatagtttatgataaatgtattgctaaatttttagttttgtgatacatcatcttaaagaaactttgtagcttggatttcctttctttgatggagggctagtttataactatatgtagtttactttctttaaaaaaaaactatgtagcttggatttcctttctttaaataaagtatggagttattatttttcactgtttaattattttgaataaatttgatttgatggtatctccaactcaacatgtcgaatcggcaacacctattatattcttaacagtattcttcaatatgatttaaccaagtttatttaaaaatttccaaatgcaaattcgatactccctccatcctactagcatataagtatttttagctttgaatcggaacacctatgagcatctccagaagactgagccagtatatcttgatattaacgaagtcaccacatgcacctcaacaccggaacatgcacccaccacagcaactaaaacaactatgagcatctccggaagaccatgccggtatatcttgagattgacgaagtcaccacgagcgcaactcaccacaaggaacctaatcagttgagctatgctcacttcgcacttggtcacaagaacctaaccagttgagctacgctcaatgtgaccctaaccagttgagtgtctttgcccttggtcacattatgactattttttccaaattttttatttataataataagtaatatttaaattaaataattagtaattctctaggaggattaactaaaataggatggacgcgggtagaaacagcgtccagacttggacgctcattcaaacagcgtccagacatggacgctactagaaattgtctggacgctactagaaacaacgtccaccttcctggtgcagtcagaccatcactacgccaccaatacgctaagagaagtatctatctatctattatatactaaaagtccattaaactttctacaaacgctctcaagccgccacgtggcgctcctacaaacgcttctagatcggcacgtggagctttaacatccaaccatcggttttcatttaatctagtggacccattatttttaaccactagatctttattttaagaaaaaacaaatcaatctatctaaaagaatcccacgttactcggccgtgtcccctggacctatatgtccgtatgtccgatgtacgtacatatcccctccatgtccttttctttttccttcttatatacttagattagatgaaaaactaaaaagttcatgttaaccatatgttttaagttgtaaaaatatatgttattttaagttttattctaaatagcgcatctcattgaaacatccataaaaaaatattaataattaacattatagactatatgattgtatatcacaattaaattggacttataattaaaaaagcaatttaaattttgagtagcattttaaaaatttactcacgccctattgtgtaatactgatatatccaaatgacattattaaatttatcaagaatgtattttcatatattctatgtttctgtattcatatattttttttggaaaattaagggctgcaggaat

SEQ ID NO: 2666 - DNA, 7124 bp, Oryza sativa
ttagaagcaccaagaaacagaagtaaaagaaatttttggaaataaacagcaagtaaagttggaggatctcagtccagagttttgaatggatttaagcgtctttcatagaagaaacaagtctcaggttaacgagaaagacatcacagaagcctccatacaacttaagaaacactaagaaactgaagtaaaggaaattttggaaagaaacgggtaagtaaagttggaggatctcagtctagagttttgaatggatttaagcgtctttcatagaagaaacaagtctcaggttaacgagaaagacatcattgtaacctccaactttgcaacacaggtatttacatgccgggatgcaagtcacaaaaaagtatacaaacaagattattaggaagtaggaacacatggtacacccctcaccacgctacaatatcagcaagatattaaagctgctcagataagttttggaatggatagatatagtcctcatggtagatctcaggttaacgagaaaaccatcattgcagccaccaaaaataataagcaaatcgtagtgtaaaaagatgttcacttctatgcattataattgaatagaaacaattgtgagaaagacaatgagcataggatactccaaagggaacaaaacaataaatatgctcaacaacagcagaagaatcaatagaactggaggtgctcagcactttcaggtaaaaatgaactttgtatcatcacttctagcaatattgcttaacaagaagccattattgccagtactcttgaattcctgagaatatgtatgtgtgtatgcatgtgtgatgactgacaggttgccttccagatagatagatagatagatagacagacagacaggcaggaaggcagccaggcaggcaggcagagagagagagagagagagagagagagagagagagagagagagagagagagagagagagaggagaccatttggcaagagtacccggattagaaagaatcatcacagcaccctccagttcccgcgtgttttaacacatgaacatgtcaatgaacttacgaaaacatcgaaaagagcatcatagtaggcttgaagcctcccactttttgaagaaaaagataaatgtaagcgctcactattgtgttcatcatgacacttcaatcttgtataccttggtttgaaaaatcatgaatccttttcaaacaaaaaaaacaactttcaaaacacataagattatctacttgccatgcaacttaaatatattgtcttaaaacatcagataaaacccgtttgttgcttacacgaaatgaacgctttagaacaaaacaactcaaagcaaagtatttcagtaccttggttgtgaagttatctagtattaaatgggggtacgcttctgacattttacccatggccttcctatctttaatatcgtggcgtgtacctgttcaacaattatatccagggttaccaaaagtattgcctcgcaacccaaatcgtacatgacgaagactcagcatacattgataataacacagatatgcactacttaccacattgagcaacccaaaatatgcagttggcccaaatggaagatggcagacgattaaaccatcgggctggccacgatgttcatgcaccaaaacaaggtcggtgatatcatgcgaacggcaagactcaacaatttccgatatcacctgccgaaaagaaactatagatcagtaagatgcacctgaaccaagttcacaaaagcttgaaccgcatttcccaactattcactcctagcaacccaaatctgaattctattcaagcacgcgcgacaaaaagagacaacaacatggagtattgccgaattatacctgaccaccacggttcattctttgcgagttagggaagacgactttgagctcctatcaaatggacagaaacggctggtttagcttcatcatccaaatgcacccattttcaacttatcgagaacccaaaaaaaaaaaagagaagtccacgaatcaaaagccgcaccttgacaaactgagtgaggggcgcgctgggattgcgagaggtggtgagtaggatcttgggctcgcggagcgccgcgcccgcgtactcgtcatcgatgaggctcctcggaactgcatcacaacatcacagggccaaatctaaggcgacggggagcgggagaggaaggggaggagggaaggggagggagctggaccagcggagtccttgtcctcgaggtcgatctcgcggcggagggcgagctcctcgttgcggagctcggtggggatgggcttcccctcgtcgagcgcctcccggaggcgccgcttcttctcgtagtgctgccgctccttcccctcgaggctcttgcggtacaggtactcccgccggagccgcgtgttccgccgcagcatctcgccgccgccgccgccgcgtgcaaaaccctagtgaagtggtcggagcggcggcgataaaccctagcggcttcaccggcggcgacgccggacaagggcacgtttatgtagacgcctagagggggggaatgcgtgggtgtgggccttgatgggcttggcccattaggcccatcatggtatatgggccgagcccataatgtcccgcttcttcttttttttttttaagacaatgtgtcaatgtcttgttttttttgttgtccaccccataatatatatagcaacatagttacgcaaatgaaacatatcataatactggagtaaatctatacatgatgtgtctcattccatactagattgctatattatgagacgaggaagtagtatgattttcgtacgagcgaaaattgttcaacaaaaagaaaatcttttgaaacactaagtctatgttttatactatattttcccaatttttacttccttattttcttcgcgacgtttctcggatggttaaacggttcgttttttcaaaaaaaaagaaattatataagaaagctagtttatttttaaaatttttatatctaatatttatttaatcacgtgttccgctccttattttaagtacctgcccaaggaaaggattcctagcccaccacctattgtaagtgcgggagtacaagtgaattgtacttcttttatatagttgaaaaaaaatgttcaatgaagagttggaattctcaaaaagtgtttcgtttgagattcgttctaccaaacggaatcgcaaattgcagcgaatggaatggaagatcaattttatttgaatttgagcaaagccatcgtcaatcagtgagaggcacacacgttgtttctcccacctgcactttaatctatttatttactgacgggtggggccaccctcgcacgcccattaaagcgccacgtcacgcctcgccccagctcagcctaaataccatccatacccctcacccccttgcgctcacacccacccaaaccgagggcattatcgtcattttaccgcagggtcccaacgaacaccaactcattcattcactcgacgaaatttctcccatttttaataaaagcttccatccatccatcgcggttgcatccacgagctcgcgagcggagattttcccccacgatttttgctgttcatccgtgtgggggaggagagattccgcgtcgattggtggtcggatcggagcgaggagaagcccccgtgttcttggctttttttcccccgatcgaatccggtggaaagcgagcaataaaaaccacttcttttctttttcgtttctggttttctttttcttgttgggtttctcttcctcctgctcgagtttgatctcttgattcgtgaggagtgtggccagatgagcgcgagtttcctcgagatccagccttcggagctctcattcccctgtaagtttttggcccagatctcgcctccttcccctccccctgctcgaattgatcgatgtgagtcgttgatggatcttggtcaaagctttggatcttgggggtggaagagaggctgtttgctctctgtttgatccgtgtcagcttgagattcgtcgagtgctgtggtcgattcggccattggatcgtggaagagagaaagagagagagagagagagagagtgtgtgtgtgtgtgtgtgtgattcttgtggtggttgctcttgctgctactgcatgtgtgtctgccttgtttgttttgctgggatttgtgtgagctaggtctcgtgtggttggttgatgaatcgatacggggactaaatttggtgatggcctgcttcgcatttgcgtagaatcatcgtttggtagctgtctgtacttccaggagttttgggatcttgtcagctagtatgtgccttttgaccatgctgatctgctcctgatttgtcgggaagctcgaatgcaatgtccatgcaattcttcatggttattgggatttgattcgatggcagttataagtcttagattgatatagcatgcttagtatgttgatttttttttcatttttttacttaagtttgttgcttcttttttcattttgtcctaaaatgatagagtatgtctttgtagcgaatgtccggtgggttctattgtgttttttttttttttttgcttcagatattctcttgaaactaatttactgtttcgtatatgcagttgaactactgaagcagagctcatgctccatgcaactcaccaataagaccgaccattatgttgcatttaaggtaatctacttgagatgtcacctctcacacgtttctagttgtcaccattcatttctgaatgatttaaatctgttacctcatccatggctggcaggtcaaaacaaccaacccaaagcaatactgtgtgcgccctaatattggcgtcgtattgccggggtctacatgtgatgttacaggtagctgccactccattacatagtgaaactataggataataccagtacaagtctgtttaagatagatagctcagatatctatttagaagtctgcttaacatttggttttattagtgacgatgcaagcacagagggaggcacctccggatatgcagtgcaaggataagttccttgttcaaagtgttgcagctgagaatggtgcaacaactcaagatattagtgcagaaatggtaactactttgcagctcttcattttgtgttgtttcaatcaatttgctatatgcatctgttacaacatctcatcccttatgtttttattatgataacagttcaataaggtggcaggaaaggttgttgaggaattcaagctacgtgtagtctatgtgccaacgactacatcctccgcaatgcctgaagactctgaacaaggaagttctgctcggccatttgcacaagaaaatggtatccataattcaacaatgccacaacctgtaagtcgatcatgtttcctcatttctttattttgtgctcttgtttgtaatcagacttcggaggatctattttttaattatttgtaccgatgtgcaacatttaggtttttagatcatctgctgaaccaacaaaggagaggcccacagaggtagtctttttatcttacttttgtagttagatatttaattgaagaatcagtattattatagaaaagtattgcaactttctagatgaactaagtgtcaaataataatgttggaattatgtgatgtgcccttgttcttttcgactttacttattgtgctcaagtaactaataatgcacagcttatgataacaaagttaagtaaaactggagataattgcagagcataagcccaggcatcctggatctgagtatatgctgtagttgaattgcaagtgatcatgaatcctgactgccgcgcagcatgacattttagtgtttagtatgctttcatgagaccaaaattatagcttttgtttgctttcccagcatgcccctctttaaaattgaattgatgagcacaattacaacatatatgtggagatgcgacatgtacttataagtaattcatggatggcatgtcaccacatatatgtttattatctcactgaattgatttatgcaaaatatctgattacttgctaatatctaatctgaaagctagaatcaacttagctttaaattcagtactacacaagtcaatattttcttttggaaaaccggggcgccttggttgtttatgattcatatgaacttgtctatttgctgcaagcttttccttgctttagccatgaatgacagagtgcatccaatgagtgatgagcttggcacacaggaaaatataggtcatgatagtaatcaggcattttacgtaccgtatgagataattcagtgataatagaaaagccaaaatacaggaacaggagctacatttagttgttagcatgtctttatattccaaaatgcttttaagatttcttttgataaatcacttgttgatgatttatattcttatcagccatcgtccatgatctccaaactaaatgaggagaatagggttgctattcagcaaaaccagaagttacgacatgagctggtaagtacttcaaccattatgaaacagcactagtcgtaccatcattcaaaggaaataaataattgcgatcacaagaactgatggttgacattgctaaaaggcatatcaagaagttgctgctttcttcgtacaactggacttctactttttttttttatggactgtgaatttcaaatttgtgacccattggccattgtttttttgttctgcttaattcaattaaaccaatcatatcaactgtcatgtgatgactagaatctggtgactaagttctcactgacaaatccagatttgtcgatttggagacaaaacaaacatgcgcaatacaaatccggctgctaaattctgcacttgctcaatgctgcattttatctatagcttgcacacgcctgtgaatttaatggattctacgaactgaacattgtgttgatgaaatctctatttatctttcaatcaggagctcctacggaaagaaagcagcaaaagcagtggcggtttctccctcaccttcttggccatcgttggtcttctcggcatcatcgtgggctacatcctcaagaagacatagaagaggtagaggttcccaacaaaagttatactcccaggaaaggatacccctcatattggtatgccgcgcatcgtgtttttttccctcctaaaaggagcacctgtcctaa

SEQ ID NO: 2667 - DNA, 6674 bp, Oryza sativa
aaaaattccatgaaacaggacatgaaatttctctgaagtttcgactagatagcagcagtagtaggtgtgagacagctttctctccacaggaggaacaaggtgagtgatagatagactgcaaatgtactattactcataaaaaaaacatgccaattaatcgaagtcttaaatggccatttggcatagcctgccgaccagcctgatgagtcctgatctccaatatcttctgactagttttatctttcagaggatagtgttctgtttcagagtctgcatttcagtgcagagcatcaggcacaggatgacatgttcatcaggattttcaggatcagatggaggtcagtagcagaactacaggaagcatagtccgtgacacatgctgcccgattagaatacatgcaattattggctggtcactgccaaattttctgtttgtcttctcctatatggaagtccatgcatggttgttggttatcctagatgttatattctctagggccatcttgtcttcaagaaagggatttttcgaaaaacagttcaattctcgtcggaatccagaaaattttcctcttgactctcccagaatctagaaataaaatctcttaattctcgtatccggaaaaaaaattccctaactcttgtcggaacccaaaaatttctcccttatttcaccggctgtcgtagccgacataccatttgtcggcaactattatagccgacatcccacttgtcgatgacccaattgatagttcaagttagtaccatgatgaataggtgacggatagaaaccacggcgagacggatccaagccctagaggaatatggacccgtccgcagaattcctacgcggttagcaataccatagatggtactgcatctaagaaacacaagacacatttgcggattggtaaataactacaaatgcaccaaaatgcattcattggtgtaaggtgaacatcatcatgtgacattgcaacttgggagaagatgataaaactagctggagtagggggacaagatgaacagtgcaatctgaatctacacccaacttgcaaatttgattggacccctcaatgttgtacattaaaatctataaacaattctcctcaagtcttatttttttgttgtcttcctctcctatggttaaaaaaagttgggaacaaccatggtcctatatcactacatcatcagtgtccatgcaagtttgacccatatatactcaagcaaccaatggctgaaccatgtgctaattaatctatgattatcacaagcaaacggtgcaattaggagttgtttaatactaataaataattaatcaatcaattatcatatatactcaagcaaccaatgcccaaatcacgaggtaattaatctataatcatcatcagaaccaaattgtgcattcaatcaaacaactactacctctgtcccatataaattgtaatttatttagcatatattaaattttgaaaagaaagactatgatgcatcttattaaatggtgcataggtaagaatggaagcgtagttaagggtaaaataaggagacatttaaatggaaagtgattaataagatcattaatactttatcatgacaattattttgaaacaaattttaaatatgggacagaggtagtataagaaaaaatcatcatcaattacttaagcaaaaaactaaaagaaattagataaataattacctgaattgcttggtgtgggggagtcgctgcttgagcttgctcttcttggaggaggcggccagctcgacctcggcggcggcgagcttgccgacgtcgatgtcgtagagcatggcggggtcggaggggagctcgaggcggcgcttccgccacgcggcgacgacgacggcggcgatctgcgtcagggggctccccaccagcttcttgaacctgtacctccgcgtcccggcgaggaacacgacgagccccgccgcgatggcggcggcgcacgcgccgtacccccacggccggccgaggttgtcctggacgtagacgagcacggtgacggcgagcagcgagccgaggctgatgaagaagaagaaccagttgaagaaccgcatcatctgcgacttctcgccggagtccgactcgtcgaactggtcggagccgaagccggagacgctcgacttgagcccgccggtgcccagcgccgtcaggtagagcgccaggtacagcacccccatctgcgcccccgtcgcgcgctcgcacgccgccgaccccgccgcgcacgccgccggcctcagccccggcgccgccgtcgagatcgtcaggatcgtcaccccctgcacgcacgaaattatttttattaatttttatacttattataattaattgaattatcatatgatgaaaaatatataagcaaaaaaaaaagttttcaatcttggcatgtgtagtacatggagtttgtttaatatttaaattttactaccacggaaaattactgacattttgtactgtaataattaattagtcatatgaaaaatatgtgagaagaaatgaaattcaatcttggcttgtgtagtattaattacatgatatgatggcagctgctggtgatggttagtccagatacttgatttatttaacaattgattaatactgttgttgttttggtgcatgttattttcacaagagaatctcccaaaaaaggtttgatccttttttttttactgctccactatgcatggtaaaaatccaaaaatggagaaaaatactggatattttctgctcatcgaattaaaataactaaccaaccatccatccatccatcctcaaaagataaaaagtaaaaaaaacttttcaagataaaaaaaaaagcagagtcagatttaaaaacaaaaaaaaaagcaccatctctcctgagttgccggagagctcagctcgctccggccatggcggccggctcagctcgcactggtggcacgaacgccaaagcagttcgcacgaacgtcaaagcagtgagcacgaacgtcaaatcaggggactgaccgaggcttggacggcggtgaagatggcgatggtgaggtagcggccgaggaaggagtcggcgacgaagccgccgaggaggcagagcatgaaggaggtgcccatgaagttggtgacgacgttggcggcctcggcgttgccggcgtgcatcgtcgccgtcaggtaggtgaccaggttcacggcgatccccagcgtcgtcagccgctcgttcagctccgccaccagtatcatcgccgccgcgccccacctccccgtccgcgacctcgccgccggccgcccccggtagtcccacgcgtcgcccagcacctcctccgccgccgcctgcgcattcgtctccggcaacatccccaccatcttctctctctctcttcttcttcttcctcgccgccggcgacaaacgcaggtgagagtgagagggaggaggagctcgtcggaggcgagtggtggtggtggtgaggttggaggggaggtggccatggctatatatacttcgccgagggagagaatctactatgctacccccaggtgggggcccacgtgtgggggtgggcctactggaccgtggtcgttaaattagatggtggtgatgattgattagtggtgagattaagcttgattaatcctcacttaccgttgggttgggtttttgtatcaacaaggggaagatagatagatagattatagatagatatatactccatacgtcctaagatagcaaagtcttatccagattagttgtcttaggatataatatattctgtcttaaaattatgatttttaggatggagtgagtagatggatagatagatagatagactgactagggatataaccttgaaaacaaatcatgcctggatcagggcactcactgcttcacttggttcagagtgaaattggacactgcttcacttagctcagagtgaaattggaggcaactatgaaaaataaggattatggatgaaacttggctttatggtaggatgggtttcacttgcttagcatgtgtttgatttagagataaggtgaaatgagttagacttatccttgttttttttatggtggtcccattatcagtttgccatgagggatggagtggttttgtcttttttaggtatgggaggttatggcccacatgtcaataatagagagtaaatgtgttggattgatatgctagattttaaggtgtgaagctaactcggatttcgggggaatattctcgttacggaatcaaccttatcccacctatcttcaaactaaacattttgaaaattggttcgatccaacctgacctactctacctattcaaccaaatacatacatgatagggttatagatggaattgagtttactgtagttatttaaggacataaatggatgaattaaataaaagtgaaatgttggttttgtaagaaatgctgataaataacttattttttaaaatatgcgttgtttaagtagcttgagaagtgacatatcataattaataatccttaagaggaaaagaatggccctaagttgtggcagtagttatatattttttggatagaaaaaatagttacatgtttttgtttatatggaatacacatactatctacaagtgtgtcttccttaattaacaattactaatgaaatgaatatcttgtgctagagcgtattcaccaataatacatagtagcaaaaaaaaatgttatagcaccttctttttttttatagtaatgttatagcaccttcttggtgaaaaagaatatgtattacatcaccttgaaaagttatgcaccctccagttattatattattatattttatattaataatgatgggataaaaaacgcataagcattcaattactattggtgacttctaaaatcataacagacatgctagatatattcttgggtttgaaagcacttcttttcccaagtacaattccgacgtatagatgcatacacatcacactcatgcccaacgtatatgttgttcagattcgttaatatatagaagtttttctagacggatggagtacgtctaaacgagattagagaggatgaaataggaagataacacacaaatgttattaagaacaaaacattgcaattacgatgcaattaaacatcatacacctcaagaagaaaaacaaaaaacaaaaggagtggtcttacgtgggagatcgaacgatcaatcatgtcacacacagtcacggacttggatcgatttgggtctcttctagacgctatcagaaaaaaactagaaatttcgttacatttacgttaattctccggtcataattgggacaagcggtagttaagttgttgtaatgtgaaggttctttgagataagacacctacaccattatttttctcctagttaagccaaaaagagtaagacaggaggatggggatttgcctgcgcgatgaggtggggcatgctttgtgtgcgggcgctgggcgtttggagtttgtcagtgatgctatctcagctgaagcaaaggcgtgtttggcagctttattagccattctggcgcaaggtgtttcggtggttgatattgagtctgattcggaattgttggtgtcggcaatcaagtcctcttcgcatgacttagctactggtgctacaatcttcactgagataaaaacggttctccaatttcagttttctagttttgatttctattttgcgccacggtcttataataatgttgcgcatgaacttgctcgacttggtgtgagttgggatccgggtcaatcttatgtgtgggttgaccccctcccaaggtttgtaagggccaaagtgattcgtgattccactgaatccaggtattaataaacaacccggtggtgaagttcaaaaaaaaaaaagagtaggttttaatttttcacatgtttttctaattatttttctggtgatgataatgatgcaaaaaagaggcaatatacaatcggaatgtactaaacaagagtcatcgatcaattggataggatcgaataatagtaaaccaatgttttttttttcttgtcaatgcatgtaattatcgaataaccatataaattcctttgttcctgtaggatcgtaaagggctttttccaccccaaaagctagccattgaggtgaggggctcccccacttatatcttaggtcatttgcccttccacaaccaatgtgggactattcaacaatccccccttcacacattggtgtccctcagcccttcaccgccccttcaccgtatccgggcccccaccggcccacggtccatcaggtatacgggccccgcaggcacccacggtccatcaggccttcacacgtgtcattgtaaaatcaaaggtgtttttgattattattctgtgatgaacgattgggcattggagattattggttttgttatttggaatttattcacgaagtggttttggagatgattggatttcacaggtgaatatatatgtgggaccggtcagaccgggcttgtgctgccggtcagaccggcgtgtaatgcgcggtcagaccggcgcagcctgcggtctgaccggccgacactgtgtcggtttcggtttcggattgtttatttggatatccgagtttattccatgattatgacttctagatggatactatacgtatgtaatactattgtttgctgctaatgagtcaagttggaaagggctgcaggaat

SEQ ID NO: 2668 - DNA, 3748 bp, Oryza sativa
attcctgcagccccatgttatttaaaatccttgacaaattcacatatcctcttaggagtactattggccatcgtttcaaacctctaatgtaaaaaaaagtggtatcgtccacattttaaattactcaaattagtacaaactaattagtacaaaaataaattgtatattaacaatatgtcgtatgaacaaatttaaattctctgagatttccaaatttaactagtacttactgttatgctaaattaattagtacaaacaaatttaaatagcgaaactaatagctacttactattatgctaaattaattactacaaacaaatttgtacaaaatttgatttgttattatcaagtagtgcactaattgacttccttatttcatcgacatgttgactaaaaaaaatggaaaaggcaaacatatcctccactttttttaaaaaaaatgttaacataccctccaacatgttatttaaaatccttgacaaattcacatatcctgcaaaattgaaacaggctgtcagtgtgaaacaggctggtggaagatatactttgccattcttttctccttcttgagggtgtaactcttccttgattcccatctcgactaggtccatccttgattgcagaccatctttagtcttcttcggcatgtccaacaatgttccaactatgttgtcaaacacattcttctctagatgcatgacgtctatggtatgccgaacctccagatctttccagtacgggaggtacttaaaaaatatggaatgcttcttgaatgggggagggagtttatcatctggcttcgaactgtcatcttgcttcttactatcccctcccttcgtattcttctcgggcttcttccgatttgtcccctttgatggtttcttagtcatttttccaaactcacaaacaattttctctatcattgcacacacattttctcccgatgtaggttttggtgcaggatcagtctcttcagtaccatcgaactccgccttcatcttgcggtacttgtgatttgtacgtaggaaccgccggtgccgcatgtacacaagcttgttggaacccgggagatacctatagtacgttccattcaagcagatcacacatcctgttttacctttaatttgacctgaaactgaaaacattgctggataatcgttaatggtcacgaagatgatggccttcactgtgaagtattcccttaagtactcgtcccacactttcaatccctctttccataaatcagccatatcttccaacaatggttcaagaaatacgtctatatcaataccaggttgatggggtccctgtatgacgatacagagtagtacgtattttcgtttttgacaaagctaggtaggaagattatacatggtgagaagcactggccaagtactatgtgaactgctcatgtctccaaaaggattaactccatcagtactcagggcaaatctaatgttccgtgggtttttagcaaactctctatactgagcattaaagtttatctactgatgagcatctgccggatgtcgaatcatcccatccttcttgcgcccttcttcatgttagcgcattagttccacatctcgcgggtttgagtatatccgtttaatgcggtctttgacaggaaggtaccacatcacaagctgcgggatttttctctgtcgtcccttagttgcttctgagggttctaggccagtattgctattcgacttgtaccggcttgcaccgcatgttggatattcatctaaagaagcgtactctttcctgtatagtatgcagtgatttacgcacgcatgaatcttttccacaccaagtgaaagggggcatatgagtttctttgcttgatatgtgctggatggtagtgagttaggcctcggtagcattttctgcagaagttctaacagactgtcgaaactggtatcagaccatccatgtctcgcctttaacctcataagttcaagaactgactggagtgttgtgaactcactgtcacagcccttcgactcatcgtacaaaacttcctttgctgccttctgtaaagcttcaaagtaatttaaccctctagctgaccccatcagcacctcaggttctgcatgacgtaacatttcctctaggtcgattttgtcctcaacagaaccatcgtcatgcaccatgtcttcaacttgtgtcggaactacattttcatgcccgtccacttgttcttcaccatgacgtgtccatatttcgtgcttgtccataaatccacgagttactaagtgctccttcactttaaaagcatcgtcaaagtcccaggatatttcattcttacagtcagcacatgaacaaattatcttcctcatattgttcttctcagcgtgtgccttggcaataccaataaatttagccacttcgtttctatatggagacaaaaacctcggccaatgatacatccattcccgactttccatatctctaaaaaaaatatacgtaaaatatttgcacaattaataccaaatttgtagggtttattgaaaaaacttatcgctattcaaaactaattaactaaaggttaagtgtaaagtaataaaaaatcaaagtttatttcaattttttttacacagacatgccaaattagtacattaggaaaatctaaaaaaatcatatcatcggcatattacaaaatactataactattttttgattgcaccgaataaatagacatttaaaattttattctctctctatatatgacaagatctagatctagatctagaactaggtggtggatgtgatagcaaaaataaaaaaaagagaatttatgttaccatattaaaccactacaacaagaggcatcaagtattacacatacatctaacatcaacatatgaaaagaaataaaattaaaaaacatggagctcttccttcacaattttggatgcataaatccatcacaaattaaggtctaaaagcttaaaaaattgcatacctagtgtggaaatgagtagatctaagtaccgtagaaaattcccccgaagatttgaagttcaaaacctcccccctatatttaagtcactttaggagagagaaacgtcggggagaatgaacagggctcggggaggaaaaagactatataggggtatctttgcaggcgggccatataagcgtcgcctgcgaagatcgatcttcgcaggcgcctgcaaagatcaatcttcacaggcggaccgccccctccaccccaggtactttttttgccggcggggttttggctccaaattacatgcccgcctgcgaaaatcaatcccctacgatgccgaaaatgagttttctagtagtgttctctagccaaattataatacttggtcaaaactaatgaacatctttttttcatctaggccataacagttggtactagtttgtgtacttgtgagattgcaaatataggagtatatatgaatatatagtcttggttgtctttgaataaacaaagctttcgcgtaaaaaaaaaacacaaagcttgattaactagacacctggcataaattgattggttatgtatgacaatacgagtccctgagcgactacaaatacctatgcgaaatctccaaaccgcgtcacattccaaccccaaccacgcctcggatcaaaataagaccagaacaaaaaaaaaccctcaaaaatccttgtagaaaaaagagtcgaggactcagaaagggagtagagaaaaagaagccgagagatcatgcgctgctcttgcatggtctgtctc

SEQ ID NO: 2669 - DNA, 3313 bp, Oryza sativa
  unsure (1)..(3313): unsure at all n locations
tcaggtcgggggcggggggggggngggggggctgagtttgggtggatgggtgaacttgctagcttaagattgctgttgggcgagtttggcatcacaagttccaattgaacgtttaccaggagctcgaaatgtttcaaattgggaccattgtttggtttgagtcgctacttcgatgtttcagggggaatgaatttatcatttgtagcgtatgaacaaccatgtgtaacttcaaattttgtgcactacaattacaaggaaacggtgttctgtttttgttgtaacttgtaatataaggtgtgtagtgaagcaattaggattgaacctgctagcagtgtacttataatgcaagcaatcggtggaacatgtactgttgtcataagttgtgaggcatcgaatcgaatttgtactttgcagagtcattgttgtgcggttccgtgtacctgttgagttgggaagctctgatctttacaatgaagtttaaatttttcagtacgcccgaggtttagttattgtgttgataataacatggactagatggatttgatagtattgagtcatcaggtttaatggttctgcttcagcaatgtgttatgtgcttcattacaagattaccattgcatgtgatgtgtgtaaaaaaacataatttttggggtggtatttgatgtggtttctgtgttgctttgcatctttgtagaggcaaatgtcagtggtgcagatagagcatgcagaaaccatggaaagggggaagcccaagcctggtggcttgagtgaccctcggttggggactattgaccagaagatcaaatgtgagacatgcatggctgggatggcggagtgcccaggccactttggccaccttgagcttgctaagccaatgttccatatcggcttcatcaagactgtactctccataatgcgttgcgtctgcttcaattgttccaagatccttgcggatgaggtacatggaccccacttctcgggtttggctgttttgcaggactttgttatatgaaaaatatcttaacaaaggaggcaccattgattttatgctacacatgctaaactggaactgaaccctatttattctgattcctgactattcatggaaacacagctatacttgtaatttgccatttttaactctgttatgttttgcatgttttgtgtttgcaaactaaatctggtaatatccttttatgttacactcgtttaacatgtgaaaatacaatttttttttgcgacttacttttccccttctgttgtcctcttttttactgttaaggcaaaaaccggaagatgcctttgttttcaatgctggacatgctaaactggaatcatattgatataaaatgtttattcggactatacatgcaaacgtaaatcttattttatctttgtaccggatctagctcttacgttttccatcttttctcaactctgagtttatttatcaatgggtgaatgcttttgttgcaggatgataccaagttcaagcaggctcttaaaataaggaacccaaaaaatagactgaaaagaatatatgatgcttgcaagagcaaaaaagtttgcgcggggggtgatgacctcgatgttcaggagcagcaagatactgatgagccagtaaagaaaaggggtggctgtggtgctcagcagccaaatatcactgttgatggtatgaagatggttgcagagtttaaagcaccaaagaagaaaaacgatgatcaagagcaactccctgaaccagtggagcgaaagcaaatcctctcagctgagagggtatgcacacaatctttactcaggttcaatacattatttttaagaatatccatttaactatgtggttcctgtttattttgtacttaggtgctcaatgttcttaaacgtataagtgatgaggactgtcttctattgggtctgaaccctaaatttgcccgccctgatggatgattttgcaagtccttccaattcccccaccccctgtgaggccatctgtcatgatggatacctcttccagaagtgaggtgagttatatgccacacttttttttaaccttcctactggatgattttaagaatgatgcaccttcatgaactctctgctattctttacaggatgatttgactcatcaattagctatgataattcgacataatgagaacttgaggaggcaagagagaaatggggccccagctcacataataacagagtttgctcaattgttgcaatttcacattgcaacatactttgacaatgaacttcctggccagccaagggtgagcagattacagtcgttttgccattttacttgatgcaaataagttatcctgattatctttttgttggaattttcaggccacacagcgttctggaaggcctattaaatcaatttgcagcaggctgaaagcaaaggaaggccgcattagaggaaacttgatgggaaagcgtgttgatttctcagctcgtactgtcatcacaccagatccgaatattaacattgatgaattgggagtgccatggagtattgctttgaacttgacatacccagaaactgtcactccatataacatcgagaggtaaaaaaaaaaaacatctttactgttattgaggcatgatcacagttctttaatgatcacttacacctaaattcaatgatctcagattgaaagagcttgttgaatatgggcctcaccctccccctggcaagacaggtgcaaagtatattatcagggaagacggtcagaggcttgatcttcgttatgtgaagaaaagtagtgatcagcatctggagctgggatacaaggtgaataccaactttattgtagaatctgctttactgatgttcatatgacaatattgtcttctatattagtcccctcatttggtgttctatttcatcaggtggaaaggcacctcaatgatggggattttgttctcttcaaccggcagcccagtcttcacaaaatgtctatcatggggcatcgcattaaaatcatgccgtattcaacttttcgcctaaacctgtccgttacttcaccatacaatgcagattttgatggggatgaaatgaatatgcatgttccgcagtcatttgagaccagagctgaagttctagagttgatgatggttccaaaatgtattgtgtctcctcagtcgaataggcctgttatgggtattgtccaggacacgcttcttggctgtcgcaaaattactaaaagagatactcttattgaaaaggttagcaagtctgcacatgataccttaattagttcttttctgctcagttatgctcatcattccctttttttctccagga

SEQ ID NO: 2670 - DNA, 895 bp, Oryza sativa
attcctgcagccctgaaaactttcagctcgagatttaaaaaattttaagttaagatttgaaaatttttaagttaattttaaaaactttctacaaagacatttgaaaaacacgtgttgttggaagattaaaaaagtaataaaatgtgaaaaaaaatcacggaaaaaagaaagcgaaacttttttctaaaaataatcgaaaaaaggaaaggaaaaaatcaccaaaaaaaagaaaagcgaaaaaaataagtaacgctgtcggcgcgcgcgccggcgggcccgcgaattagctctaccgcacaagtataccctataaatgaacgcacacacgggtattcggtattccatataaaaaaaactagtttgtcatattttaagatgacacctcgtcgcctaagactgattcaaacacctatgcctaatctagaacttaaacacgaatggagcacaaagaaaaactaacatcttgtgtcatactctgaatctgatgcattcagattcatcaattataacatcagtaaaacattcctttaaatgattttggaagttctatcttgcatgatgtgggctgccatttctacaaaaattggccgttattgggccccaatccacagcagaggtgtaaaaacaatccaacaaattggacccagtaactatttcgatggaaccattatcacagcaggatacattagacacactgagctaacgttacaaggatgaaacagaaactcaaaattgatgtactacagcagttgcagccttgcaggctaatcaggcaccaagagatttttgcttcttcgctgtgttcatgtatggccgtagcacaaactcgttttgcgcctccgcttggtcgacagttcctcgcttgatctgcaagatcaaatgagcaaagaattaa

SEQ ID NO: 2671 - DNA, 561 bp, Oryza sativa
aataacaataaaattttgtttcccctaagtggcgaaaaaaaccgtagatccgattcctataaaaggcaaaaaaaagtggtgaaaaataaaggccagatccgattcctttaaaaacagaaaaataaagtctgattccaataaaggcgaaaaaatctgaaaaaacatctaaaaaaaattcgtccgattccctaagaaagtggcgaaaaaatggttcgtaaaaaataaaaatgcacgcgagaaaaaaatggaaagggcgaaacaaattccgatttcttatcagtatatatctcttctctatctctaatctaatctaactatttaaaaagagaaaatgcacgagaaaaataaaaacggttcaaaaaagtgcgtgagaaaaaagcacaaaaaaaatgctaaaaaggttttccatcttccataaaaaaccgtgcgagaaatattatttccatcgtcggtaattttttttaaaaaaaacatgcaaggaaaaaaatgtaagaaaaaatgcgccatttctaagaaattatttgaaaaaaccgcgcaagaaaaaaaactgtctattaaaaa

SEQ ID NO: 2672 - DNA, 544 bp, Oryza sativa
ctgttttggttttccatcacatacccaacaacaaagaatgagtaaccatccagatggtaggtctgaacaccagtgtcattgttctgaaagacgatctcgaggaagcccttgtacgatgcgttcagcgtggatgaagccatttttggtggagcattgcctggcattgtggggaagtcagtcttgtacactccagtcaagttgtggagatcagcaagcctcagtggagtctctggtggagagtatgagaccccgtttatcgtccttcgacgctttccattgatgagcaaaggtaactcgttcttgagaacgaaggtctgagtgatgttgatagagtcgtagcggaatgatccctgtggatttggacgtgcagcaccagcagttgtattcattctgaaaaatacaattgcaatggttatcaatggagaacatgtcatcttgagatgtagtcactggaaatgacaaccttgaaactagatgattcttacaatcaagaaaactatcattaatcaacagcatcatagttactaataatgcaaggatattt

SEQ ID NO: 2673 - DNA, 662 bp, Oryza sativa
atctttgtatgttctaatgttctcttcaggatttctaccaggtctctaccatcgatgctatcaatgttgggtgaacaccgttgcaacatgtgacgtaccatcttcctcatgatgtcagaagcgttgaacttctgagacactgtgatccaaatatggcaatcaaactgattcttgattctctcatcttcatagatactattggcaagagtggttttcccagatcctcccataccccagacagtgataaccgatgtcgaacatgtttttaaccagttcatcatcattgttctttcttgttcaacacccaccatctcatcagctgggtaagaaagatgatgcggaagccggtgatcctccacatcggttgaaactctattgccatttggaagctgaatctcatactgcacccacaaattccggagattctgaaggtgacattgcgaatccttcagctctctagcaattttgtgccaagaagttttaccgagtttacggaagtaactcatgaactccccattgaaaaacctgttcttgtgcttaacagacaggtaaagaaactcatcgatgatgtcctcaatttcaaaagctgcttttcttacttcctgcaggtagacttcagtgggctcgctatagccttcttgtttttgcgcttggcgcaggaa

SEQ ID NO: 2674 - DNA, 14177 bp, Oryza sativa
  unsure (1)..(14177): unsure at all n locations
caacgtccgtctgcgaaaataatcttcgcaggcggacggccgccccgcctgcgaagacccttttcgaccgcttgcgataatgcttttcctagtagtggaacacattattcggatacaccaaaaaataatttgagtatatatatatatatatatatatacgggtttatgattattgaggcataggtggaattgtatgttgtgttttctttctgaaactttaattttatacattatgatggagagcgagaatggctatagattctgttgaagcaaatgtcggggtttatccattatctaaagagaaaatgaagagatcgaggggatgccatgttaatattcacatggatattttcattattgacatggatatcttaaatatattttttatctaagtattagaacgttgagtgataagcaataacttttggactaagcgacaatcttcttcagactgtctatccatttgtcaggtgatttctaaccaaaaatcacccaaattttttctactcctagatttacatccaacggactacaaaagaatataacaaatacatatttacttaacatttttttatcaaaattacggtgcacttacatgtcttatcaactgaatttacaaatgtaattttagttatataggactgtaattttatattttaaagaaaattacaaatatatatttacttacacattattttttttcaaaattacagggcacttacatgtcatatcaactgatttacaaatataattttaattttagttatataggactgtaattttatattttaaagaaaataacaatatatatttacttacacattatttttatcaaaattacagtgcacttacatgccatatcaactgaatttacaaatgtaattttagttatatatgactgtaattttatattttaaagaaaacaacaaatatatatttacttacacattatttttatcaaaattacaaggcatttacatgatatatcaactgaatttacaaatgtaattttagttatataggattgtaactttgtatttcacggtgacgacgacgacgagagtggccgtactgccggcggccagctcaatcagaggccaccttggcaccgtgcttctccatcatcacgcgcgcacgcggtagctaggtaacacaggccgacgtgcctgccggccggcgagctgcatggaacgtcgaccttgcaaattgccgctcgcatcgcaagctgcatggaggccaaaaaaaagtgtcaaatgccagcaaaaaaatcacacgggagatggatagcaaaatcaaaaaaacaatcttcttttcagataggaagacacgtctgtcatgggcatttaatgggccaggtaaagacctattgaacgggccctgatgtaaatcaccactgcgtggccaggcccaaccccaatttggaaacctgactagttatgggataagttcatctgaggtcccttaactttacaccgaatccgattttcgtccctcgatcagaaaaccagacacagcgggtccctcaattattaaaaccggtgcagattaggtccctcggctgttttgagagcggttttggctgacgtgacacctatgtggctaatttgactcggtctttgtccgacgtggcgcttacgtggcaattcgacccgtgggacccacatgtcagtctcacatagaaaataataaaaaatcgtgggacccacgtgggtcccacatgtcagtccaactcacccctcttcttcctcctctctccccatctccctctcttcatctccctatctctgctctctccaggcgccacggaagacaacggcgcgtggcggcgcgcggccggcggcaggagaggagggagcaacgcgcaaagaccggcgaggtgggcagggagggaggacgcaaggaggccggcgatggccaagcgccgtgggcgggggcttgatggcgacggacagagggagaggtgcgcagccgacggcggccagcgggagagggagcggcgaccgccctccgccgcaacctacctccaccaccaagctcgtcagcgactgcccaccggagtgagcaggacgacagccggcgacgggtgaagaggatgaaggcggcggtatggagcagaggtcggaggagggcccccagccgctaggatggcgctcgatccgtcgcgtttcaccaccaccgagctcgtcagctgcagcccaccggagcgaggagcgaggagcttccgcttccccttcctcccattgacgccgcagccgcagcaactgaggcgccgctccccatgccgccgcttctgtggctgttaacagtaaaatttggtaagcccggagtagtcattggcttagagtcaatatcggtttggaagtcctgagattagccgatgagagttgtcaagtcgtcagttgtcggattcttgctatattcggttaaggaaattgatctactaaaggaagcttattcagaagagaccaagttcaaagagaatgcggcatagcaagttatctattaattaggaatagtttgttagtttccttttatctctaggaaagtgtgtttagtgtcctataaggactttatcattttcttttatctttaggaaagtttctttcttgtccgacaaggacttgtatcaacccatgggtataaatatgtacacccggggtctatgtaatctatctccacgatcaatacaattcggtgcatcgccaccttttaccttttctactttattttatcatccggcgggacttggcacttgacgcggggctgcatcggtgttcgatctccggctaaggggtaagtccaatgttccgccggcccagggaattgtatcgtttacgtcggcgtcgttcaaggctgcatcagtacattcgacctcttggattgctctggtttggatgatatatttgcctacctatttatcatatgtatctgttaatctagtcttagcatatcaatttagctctatcggctacttctcgttttagggtttctgccggtatcggctaaatcgtgttgctagattagattagcttagacatctaccaccctgaaaactcagtcaatggcttgattgtctagatattatgtttcttttcatacttagtgctgcatcagttaagtttgtctactaagtcgtgcttagaaccataatctctagcctgcttcttgattgccaataagggtatcatcggggtttcagccagtgagttatctggacgttgcatcggctcataaggattgcatatacatataagttggatttagccgatgacaataaaggtttcactatttaatctaatcttgtggatttcatgacatcggacctccagccaatgtgtgctttaaacctcggatcgatgcttatttatcatatcattgctagccgattggtttctaccggattatattgcaatattatactatcatcagccgattgcttttatatcatcatctacattggacatatagccgatttatcaaaatcctatcgctatcggctggtattggcatcggctattatcgatatcggctgagattgctccatcggcttgtcagccaatcgactgttttgatctactatttgcatatcttgtcagtttcaggatcaaactgactggcacgcccgcatctcatcaatctttggacctgcacaggagctaagcagatctcccaggccagtatgttcgattttttcgtcaacagtggcgcacgccggatgcggacggggacgccatggccgtggccgcggacgacgtcgacgtcgacctcggcatcctcggcaactcccaggggccccgcgccgccaccactaccgggaggaatagcgcacggcggacgtcctcctcctccggctgccaccgccacgcctccccgcatggctgcatctcctcctcctccttcggcggccatcgctgcacgccgccccttctccccgccggccaccgcccttctcccggccgccactgccggatctcgattgccggcgctgctctggggggagctgtgttaacaaccaaatttggtaatatcagcatcggaaaggaagatcagatcgaagcggaatcgaagatgaggattatcgctgaaacagagtaagaattggctggagtccagatcggctatgattggatcggctgagcccgagtcagacttggttaagtgatgtagccgattccgacaatatgacctaatgtacaacgtcgggttgaattgatatgcttcaagatgattgccacgcatggatagagtcctgataaggcaattgtatctattaattaggatattttgtgtaatttccatagagatatgtttggacaaaagtctgccgcaaagatttatggtatcttagagtttgttagagataagagtcgtgtctgatatggacatagtttgtaattttcgggtataaatagaccccgaaccccatgtaatcaattaacacacacgttcaatacactttcggtgcatcgccaccctttttgctttagtttatttcgacgagttcttactttcgggttgagctgcatcggtttcgatcttcaacaagaggtaaaacttgttatgacggcttgcgttctcgggattggtgcttccatctttatgatactctaatattgtttatgtaattcgtcgagttatcatatattttacataatctctggcaatatcgcaatttaacctattatcggctaaacatctgtcggtagaaggcagccgattaggttaaatatcgatgttgactttgattatataggatatctaccactctatgaaacctccagtgacttgattgtctagatattgttcttcttttcatacttaatgctgcatcagttgagtttgatctattaagtcgtgcttagaatatcaatctctagcctgccttctggttgccgattagggtagtatcggggttgcagtcgatcttatcttatttaactatatttactctatatgcttcattgatatgttaaatctgccctttatattaagatcttgttgcatttaagtatattagacttttgtttgatatatcctacttgtcttaatatcttagtataaaatggtatcggagtattagccgatacatgctaaatctgtttgatcggctatgctatgaacatatataatcctattattaatatatatttcgatctaagtgatttatactgtctcggcatagcgaccgatctatctcaatcacttgatttaagtatatatcgatataaggattatatattgttaatatctacaaccgatcgaatagatttagttccttcatatttaataatgactgccgatcgatgtatatatgacatcggctcaaagataaatgatatgtcatcggcacttagccgatcggctatcgtttatggatttaaccacggtttctttgtttttgtttcttgttgattgcaggatcaaatcaactggcacgctagcataacccgcagcgagttttggacctgcactggagttaagcagatctcccaggcctcgtgttttacatcaacaacctgccgccgcccgggtcgatctgttccgcccaccgccatcgccgattcccttttatcgccccagcttcctcctccagctcggtgctctcgctggtgggcgtcggtctcgccgccccctctagctcgccgctctcgccggaagaggagaggagaggggagagtgatgaagagagggagatggggagagaggatgaagaagaggaagggtgagtttgactgacatgtggggcccacgatttttttattattttctatgtgagactaacatgtgggtcccatggattttattatttttccggatcgaattgccacataagcgccacgtcaatgccacgtcggacgaagaccgagtcaaattagccatgtaggcgtcatgtcagccaaaaccgccatcaaaaccgccgagagacctaatctgcactggttttgatagttgagggacccgttgtgtcttattttccgattgagggatgaaaatcggatttggtgtaaagttaagggacctcagatgaacttattccactagttattagtgtactttttcctattaggaaaggcctgttacaagcctaaatttaaccctcctctcaaaacaagaaaggtcaaagctttaggttgatcgtccttaaattcttctgtaggacgtttttttttctttttaaaaaaatcagtattaattctgaccgttgatttcttgtgagttgtattcttagtttcaacttaacagccaccaacatcatttagacggaattgctacatcacatttaacaaaaaaaagtggaggccggctagctataatcttgtagttttcttacattagggaatgcttcacgattcgtgcgagagctcattctcctctagcttcagtgcatccaatgaactacagcaaccgacagcgactcaacaattaaggttcagtgttcaaggtagggtcaagggtggacgctcacaatttcttctttaaaaaaatatttggactttggagggatgtcttttcctccaaatctctttttttttaatattagtcaatcccttatttgaaatcactttgaaatatagatccgtatatataaattcaaattaaccaactggaaaaggttcaaccattaagcaaagtctggttagaacgcgctaatactctctttagttataaatatttgacgcatagggaaagattttgtcaaccttttaaactttgatgcgagcatctccaacagattatccaaatcggactctccaaacacccatatagccaactctccatctaatttggctagtcaaactagttacttactccaacagactctccattatgtatctatgacagcgggacccatatgtcagcctcaaataccccttcttcttcctcctcttttctccccttttccccgagccctccctcaccgacccctctaccacgtcgtctccaatctcactagtgtcgccgctccattcatgctgccgccgctcatcccttcttctctctctccggtgctcgagagcagacggcgagtgggaggccttcgcggcggtcgaaatcggcactaggcgctggcggcagcgagcgggaggctgcagcgatgctcgccgtcatgctacctgctgccgcggccgcgggcggatcttgtgctaattgtctcgccaccgcccaagtctccaccactgcgcagccgactaggcgggaaggcgagaagcgaggcgagatgggtggagcagatgacggggaggaggaaagggtggggcgacggaggcctggggcggagatgttgacggcaatggcgaggctgggtgacgactgtgctgccgcgtcggatggggagatggcggcggtggctgctcgaggcgaggggatttgcgcgacgcttgacgcttctactcgcgggcgatgtgatggtggcgacgccgtgacgatggggagaggtggatgggaggtggtggtggcggcgaggtagctgctcggaactcaggaggcgttgtcactggcatttctcagggcagtgttgcttgatgatgtctttggccagccaaaccagctggctagatttggctagcccacctgatcatttggccagcgagatggcttagccatccaaatggagagtttgttgcacctcattttcttgctatgtttgctattttttaacttggagagtgggatggctgaccggttggagatgctcttagatgcctaaaatctttttaaagaaatgttgagatttggcttggaaagttatataataaatttattggaatttacaaatttattctaatataaaattaaagatcaatgtttcacaagtttaataaaactttatcctaaacattaaatatctatgaccaaagagcatatatactccctttaaatgaactaaacaacatcatacacaaattaaatgtaaagagggagcagtatttttcatggatgcatatgagcatatccaaaacggtcgttgtatatatccggcccttatttaggatagaacatgtgtgctaggtagcacacggtaatcgaattttaatttgtcgttctcataacgtcagctggtagcagcaatactcgttcgtccgttcttggttgtacaaaactaattgcgctactccctccgttttgtaataggtaacaacgttaatgttttatcatatatttaacgatcgtcttattaaaaacattatctaattataatttattttttaagttattttgtccttaaaagtattatgagcatgattgatatcttatacattcacataaaaattttaaataagacgaatgataaaatatatgtttaaaagtcaacaacgttatctattaaaaaatgaagggagtaaactttgccttgtacaagggaccaagaaagagacgacgccgttgacacgctagctagctcactgcattaatcacacacacaaaacaacaaatcaaatgggactaggaggagaccaaaccaatcagtaacatggctatatatatagagagagagagagacacacacacacccatcctgatccagctcgatctaaccgatcgattcatcatcaacaattcacaagaactccatcacttacagtgcaaatcaagctgatttcatcagacaaatttcactaataactagcttagctgccgtagagccgtgtgcgatcaagatcgtatcatccatggcgttctacaagtacggcttcgccttcttggccggcaccggcttcggcgccgcgctcaccagcctccgccgcgacggcgacagctgctgccccatgcgccgccgccgccgccgctgtcgccgccaccaccacgacgacgacgaccagctggtcgacggcgacggcgacggcgaggctgcaggggaagagcgagacatgaaggagagcaagagggcgacgacgacgacgaatccgaaggccaagaaaggcagcaacaaggagaagaaggcagctgctagtgttgctagggaggaggaggatgacgatgatgaataggattaatttgagttgattattaattaagttcagtttgagttcagctattatatatttttaggtgcttgattccgttgctgtgccagtttaattgtgcttgtttagctctgtactcgttatcctgttgtgtgtattgacaaaaataagagaatatacatatatacctctctgttgttaaaaaataagtacctttgtttgacggtttttattttttgcgttgtgaacgggagtcgtcagccatctcgatcttgaggaactcacaactaagataataataaaactagctagtagaataaatttaggctaactcgggataaactcccattttgtgaccggaatggaaaattttctggataaatctacaaacgaattacgcttagcaaaacgataaagattgaacaaactaaggcaagatagagatatataatatgaaaagatgacacaattagctaattgtgtgttggattgttggttgttgtcaataaaacctaccatatttgttataaagatatcggtcttataatatgagagtttctccatgtctgttatagagatcaattaatacttgataaatctcaacacaagcaacaaaatatgagaaatatctcaactaggctcggaatcagagtttactggtcaaactggccatcatggcctggttggactgctagatttcagttagaccggcccatataatggttagatcggcctcttctatataggtattgggctttttaaatataatttggtcttgctataactgcccaactacaaaatttggttgtcaacatacaattccttttcttctttttttttttacaaatcaggaattaaaaagcacctacacatcggtattaagggcaataaaccattatcaaccataaaaaaacccttgtgagcatctcaaaaaaccggatatcttactgtagaaaaataattaaccgtaaataagaagactcggatcgtactaaacaggtaaaaaaactaattaactgagctaagcccacctcactatatttcaacacaattaattaactgcgcaagtctcctagattgctagcgagagaggcacaagaaaaataaaaaggccacaatttaatcgaccagacaaggacaagccttgctcggtgggtggttgggggtattacaaaaggtataaattcctgaagttcagctgttgtagtctgacccttggagaagaagttgatcatgaatcttttatccaccaaaaccgtgtgatagtggccaccccttgcaacgtcagatcatttcaactattatactactagtagttagcaatatcaattactacctccgtttcaacgttggacctattcgtgttatttgaaaaattagtgtaaatatgaaaaagaataagtcatgcttaaagcacttttgataataaagcaattcacaaacaaaataaataataattttatattttttaaaaaataagacgaatgattaaaagttaccaatctatacctaattaaaaaataagtaaggcttccggttaatctttttgtccgtcattaagagtgggcccacacgataattcgtcgctaatccacgatccgaaagcgtggccacgatctcttacgcctgcaaataaaggagaaaagaaaaataaaaagagaaaaccttgtttgtggagcagcccatccaaagcagcctggattggattagtgacgaggcagcccatccaaagcagctgcagaccggcccagatagcagccgcagcccaccagcgagcccacagagcggaggagaagcagcccaccagcccagcacagtactgcgcaacactgtagcaaccgaacacgaataaagtttggactcacgccaagcaggaaaaagaagagatcttattacttaaaacatgtagtcaccaataaaatgaattatttaccgacaaaataaattcttttttaaaaataaaaataatcacatgtgtctttctttttttttagaaagagtaatcaccaacaaattgaatcatgtttacatttggatttttttcgctcatcaattgcttattcgccacaggacacctaatcacatcactttttttttcattcattgtataatttcttctattatttagagtgaaagttattctgcgatataccacatttttttctttccttctgattatttaagtgagtggttatgcaattggagtgcagtgaggttgatctgatagctagcaaaaaatatttcttatattatggctactctttacaatatgaaaaaaaagtgcttatcaatatcgagtaccaaaaaaaaaacaaagtactgcaattgactcataataatacatgacaaaaaagtaaatattttttgtggtttcaaagtttagtatccatgtcagtggatttagagcaacaaataattatatcatgttagcgtcttatttgcactacaaagattcgattcgactataaagacctcaatgaacctggtggttttatgctcccacacactaattactattttttcttcccccaatgcaacgcatgggcattttgctagtaaagactcaaagcgataagtattttaagatggaggtagtattcaactcttgcatagaacatggccatcaataggttattaatctgttgtatactctgcactattattcctagatctttacatttccttagctttgctcccttcaattcctttcttgaacccttgtccaagaaacacatattcatccgattgatggacacactgatgctagcttcttcaatccagctaattaattacacacacataacacatataaatagcagcacagatacacgaattgttctcatccattaacaccacttctcatctgcagttcagacacacacacacacactgacacaaacatatatacttacatataaatacagatatatatatataggtggttagctacctgtatagtttatacattagctagtgtatgtgttgttgttgatcatcgatcgccggcgacgacagggagagatcgatccacgatgggttgcctgctgcggcggctgttcccgttcctggtcggcacggcggtgggcgtgtacgcggcgcagaattacaaggtccccaacctccggggcctcgccgaccgcggcgtcgacgccgccaagcactacgaggaggcctaccgcaagaagccctccgccggcggcggcggcggcgggagcaggaagaagatgaacaagaccgtcgagatcgacgacgacgaggagtaaattagttgatactgctagtgctagctcactagttattacattttctatgaaaacgagcagctagtgtgtatgatatgtaaattattggaatgttcttatgtgtacacgtaaaacttatacgtaaaccttatttgtactgtttctaaattaaaaaattaaaaagaacggatatattaataaaaataaaggacgaaaaattgatcaaatggcgaagtagtggccactttcactattgcaatcagccgaacgtgtaggtgaatcgaccattttgactcccatagaatcagattcgtaatctactactggagaaactatcgacgtttgatgtcgcgattccggtatttgtatagtatggggatcgttggtactaggatatatgtgagacttaggtaaaagagacggagaacacaccagcctatctaactgttgtcgacttggcggtctgtagtactgactcgtagtcgacaacagggtagccttcctcctcgaatccgcatccggcgagatcagagacagcgctatatctctcctgacagtatccgtaggcaccgtaggggactagccatgcctatctctgaaatcgatatccgacgtcttgtcttggcgtatgttggcttgtatgttgatcttgtgtcttgatctattgttccgtgtatgttgattgtgtcctctctcctcctaaggggcctaatatttatgggtaatttggaaccatgccattataacttttgtaaagtttgagatatgccatcggtatctcaatgacatgcaggacccacatgagtcaatgacatgtgggtcaggatggcatatttcaaattnngcaaaatnanaanggcanggttccaaatttccctatatttatacccataggtgttcccttgtccaagtagaactagggaaaccaatatggatacaatccgagtagtccttgtcgtttccatgtagaactctaatcatccttccttatgcggaactcctcctatatccgaaggttgtttcggatacaatgcacagcctcctgtaccgataggagcaagccggccaagcataatgttctcagtgacacctctcaggtagtcagattcagcatatacagcagcatcaagcaagatatccaccgtctcttcaaaggaacatctcataagaggccctgtgtcattacggttgataccatgccttgtaatagccatcagatgccctctgtatgtcattgtatcacaaagaatggccagatgtctgtaattgacataagaaccatcgaaagatatgaccacccgcagctcatccaagagagctcgacgaacagcctcgattccaagaacctcaattacttcgatcaaatggttacttgttgtcctagtagcatcaacatcttcatggcacatgacagccaagagattaacaccttccgtatcaagcatccactcattatctgctttgaagccaacattgtcctcaaatttattgaccttcccatatttgataaaaactttgttaatatctggaattccacgaagtgccatctctgtcaatatcctcagcagactcatgttactttcaatcttcttgaggaagacatcatcctcagcagactcatcttgtatttctccctttggagcttcatcatttgtgatgcggacacgaaggatcagtttatctgcattatcatcattaaatatgcatgacaagtcatcatcaaattcatgattgatcttctctgcaatatcagccatgctcaacttcttatcaaccatcatctcacgattcagctcgatacgcagcagccacggtgaaattttatctgggtcaatatcctcatcaggcatttcataataggaccggacaaattcaacatcttcttcaataatggttcccagtggatcaggatcataccatatctctgtagcatgtgtcacactgcgcagagtaggggctgcaggaattc

SEQ ID NO: 2675 - DNA, 1374 bp, Oryza sativa
ccctacaaagccagaaatatttgaagacccttctcctatgaaagaccccgatgtgccacgagtgcttaggagccatgactccaagtccaaagatgagaacaaggagaagttcatagtaaccgtcttcagagggggtaaggaacgtgccaagctcaaagatgacaacccccagaaggctgctgaactagccgggccaacatacttcgcaaccgatgattgcccggaaaagtacgaacatgggaaagcactcttgccggaatgggcactgaaagaagcactatgggagatgagaaggttacataacttctacatggaggccagcaagaaaggcttgggcaatataacagcttgatcacctgcagattgtttcggcgaagaaggttacgtatggctagatttctcagatctccacgccatatatcgtcgggataagatggacgtcaattacgtcggtgtttggtgcatgtgagtatgagttttaattaattagatgaaaaaaaatgtacaatacaaatccatgtgattgttactaacaaacttcttctataggatgcaatacatggatgctaagaagaaaaaagaacccatcagcttcttgtatccaactcggatctgccaaacacagcataccgtgatgctagcaccagggtcaaaccagctgaagggcaagaatccaaaagagatagcagaatacaagaagggcttgcacaaggagaaattgattactgtcgcatagtacattagatgagccttcttgcactttcaaaataagagagtcgttatagccgcttataattttaagtaagtccggtacatttatcttgtacacatatgtcttattttagctggtactaaataactataatgttgttaatatgtagcgatcattatatctgtttactcatccaccctaaagacggaaccatggtagtcttggatcctctcgattacagtcacaagcaatacaaagaatttctaacaatcttacagtagtaagttattatgactcttgcatttgtatatgaatgtattacaaataaatatcctccttactctgaaacggtacgacatccatatacatccatatagtgcataccaatactataagttcaagggtggagaacagacccgaacacgggagaagctgctagtacgtacctattggccggtaatactccactcactttatgtattccaattgtttcactaattgcaaattttaactacttttttctatgatatgtcctgaagtgtcacaagcaaccgcgaggaacggtcctttgcaggtattatgcgtgcgaattccttaggggttaatggacggtacaggactaacgcggaggatgtaagtctctatactatgtactagacagc

SEQ ID NO: 2676 - DNA, 676 bp, Oryza sativa
aattttcagacaagaatgcattcagtaacaaaaccttcaggcaaaatacagtcataagctatatacctgcatgtttccaataagatgtgagaagaagacgagtcccatgatgcatatcaggatgcagaaaatggtttctcccctgtatgtgctgttctccaagttctgtccatacgaactaacaaacaattcgcaggaaaaaaaacacatcaatgtacaaaattatgcatcattatctgtatcaacaacaatctgcgatcaggtgagaagaatgcaagaattcagagatacctgaggttcctgaacccccaccagaggcagtagagatacttgtcccagaagttcaccttggcgacatccaggttgagcgcatcggcgaacaagccgtagacgtaggtggcctcagggaggagacactggtggtcgatctcgctgcgcgagtgccagtccatccggatgggatcctccagcgtcttgcagtccaggtagctcatgtagcacttgggtatcgccgggttcgtgccgttctccctagtgcacacgtccatccagcatgtgtactgcctctctatcgacagaagataccacagcgccccaagaacctgcatcacaatatgatgcatactatgaattcattatattcgggttagaatctttaatctctactactccctcc

SEQ ID NO: 2677 - DNA, 649 bp, Oryza sativa
aaagcttccgaagtaagtactcactacttatcatataaaattggctgtgtgtctattggcagaggccggagatgtagccacttccattatctgaaaaaaataactaacctgttcttggtgagattggccctgtttagttcaggggtgaaaagttttgacgtgtcacatcgaatatacggacacacatttaaagtattaaacgtagactaataacaaaacaaattacatattccgcctataaactgcgagacgaatttattatgtctaattaatctgtcattagcaaatgtttattgtagcaccacattgtcaaatcatggagcaattaggcttaaaagattcgtctcgcaatttacacgcaatttgtgtaattggtttttttttatatttaatactccatgcatgtgtccaaacattcaatgttacagggtgaaaagtttttgcgtaggaactaaactggccattatcaatcagttggccttagaggataaaggtgtttttttttaagggattgcatgaagctgctggccatttctatgcctgcaaggcaatcctgcactgcagtccacattattgtcctcatgtactggtgactttttgctgtgaaacagagcaaagcagcaggggcactagacactacccaagcagt

SEQ ID NO: 2678 - DNA, 10131 bp, Oryza sativa
tactcatgtttatcaaatattatatgcttgggcaattacctttgggaaggtaattgagatgcggcatgtggagacatgagcgccatattgccatgataatgatgacatgatttgtgaaagtaggaaagaaattaaacaacttgttttagactggggcggacggtggatttgggtggtatctgggaaaggctagtaccgtccccggtcaattaaggaccgagccatgaagttaagcatgaaacgaccccgtacaaccacacttctcgtatggggatagacctagcggagtaaatagctgagcggaggcagtatccatgcatagtggtttcttgatgtgtaaggcaggggctctacggtggggcaaccattggtaggaccgcgaggcgggtgtctacagtggtgtcaccatcggtaggactgccatgtgagaatctaaaacataattataacttaatgcatgtgtgagtcttcccttcccaggtgcgccagaactcctctcactgctagaaaccgtgtacgcctagagtgcatgaggatgtaacgttcatggagcgggtactgccaatgcgaggttatcgaaaagctttaccgtgacgcgtctcatgtgttgagacaaggctcatgtgttgggcagtcgcggagtgtgggtaaagtgtacatccactgcagtgtgagtaaaccaaatctattcgaatagccgtgctcgcggttattgagcaccgggacatgtattacacttggttttatgttcaatcccttgaagtatttatggacaattatgatcggcatgacaattatgttcaatggacaattttgaacataaaacacgtgctttaatcccttgaagtatcatgccattggctcgctccacctgtccattgctcatggggtgcgccacggaggcatagcaaatcttgattccaaagtcctcacaaaagtctttaaaaactccgccagtgaattgtgtgccattatcagtgatgatccgattgggcactccaaatctatgtacaatgttgatgaagaagtctcgagcattatctgctgtgattgtgacaaccggtttagcttcaatccacttggagaacttatcaatggccacgaagagatgcgtgtaaccgccgactgcctttttaaacgggccaaccatgtcgagcccccaaaccgcaaacggccaagacagcgggatagtttgcaactcttgagctggtagatgaatttgtctagcgaaaaattggcaaccttcgcacgtgcgcacaatcttgtcggcgtcggacacagcagtaggccagaaaaaaccctgccggtaagctttgccgacaatggtgcgtgcagcggcatggtttccgcatatcccagaatgtatgtctttcagcaattgtctcccttcctctaaagatacgcagcgttgcagaactcctgaagggcttttcttgtatagctcagattcatgcataacatagagtttgctccgccttgaaatccgctcggcttcatctttattttgagggagctcttgagaagttaagaatcgtatgaagggctctcgccagtcggcttcaaccatagctatgtcatgagtgtccgcatcttgagtagtatctttatgaggtacggtcggtgtataaaggtgttcgacgaaaacatctgagggcgccgtctcgcgcttggatccaagattggcaagtctgtcggcggcttcattgttgtgtcgaagaacgtgactgagctcgagtccatcgaacttgtcttccaatttgcgcacctcttgtcgatatgccatcatattgtcgtcaatgcaggaccactctttcatgacttggttgacgaccagctgtgaatcgcctcgaacaatcagacgctttatccctagggaaattgcaatccgtagtccatgaaggagggcctcatactcggcaacgttgtgggacgccgaaaaatgtatccaaagcacatagctcaatctttctccagtcggggaaatcaaaaccactcctgctccagtgcccgaaagtctttttgacccgtcaaaatgcatggtccagtgctccatgttctccgcaggggtatcctcctggcactcggtccattcggcgacaaaatcagctagcgcttgggacttgattgaaattcggggcttgaatgatatgtccaaagacatcaactccaaagcccacttagcaatacgtccgtttgcctcgcggttgtgcagtatatcaccgagtggaaatgatgtgaccaccgttaccgagtgaccttgaaagtagtgagatagcttcctggtagtaattagaataccatataacagcttctgaacctgagggtacctcgttttggagtcggctaggacctcgctgacaaaataaatcggtcgctggactttttggacatggccttcttcctcgcgctcaacgaccaagactgtgctcacaacctgggaggtggctgatacatacagcaacaacggctcctgcgggtgtggcgaggctaagactggtggctcggtgaggagtttcttgaaatcttcgaaggcctcctgtgcttcgggtccccactggaaattatctgttttcttcagcagcttaaagaagggcatcccccgctcgccaagtcttgaaacaaatcggctgagcgccgccatgcatccagtcagcttctgaacatctttctgggtacttggcggtttcatgttgaggatggcagtaactttctccgggttggcttggatgcccctatgagacaccataaagccaagcagcttccctgacggtactccgaaggtgcacttttcagggttcaatttcatcctgaaagcacggatgctcgcaaaggtttcttctagatccgagatcaaatcatccttttgcttggtcttaacgactacatcatccacataggcttcaacgttgcggccgatctgcgttgagaagcatctttggatcatacgttgataagttgctcctgcgttttttagtccgaacggcatggtgacgtagcagtatgccccaaaaggcgtgatgaatgaagtcttcaagcagtcggattccttcagtcggatctgatgataccccgagtagcaatccaaaaaactgagaagctcacagccggcggtcgagtcgactacctggtcaatgcgaggcaacccaaaaggatctttgggacaagacttgttgaggtcggtataatcgacacacatgcgccattgccctgttttcttccgaactagaaccgggtttgccagccagtcgggatgaaggacttctttgatgaagcctgctgctaacagcttggttaattcctccttgatcgcgtccttcctgtcttgtgcgaatcggcggagtcgttgtttgatgggctttgcatcttctttgacatgtaaggagtgctcaatcacctctctaggaataccgggcatatccgatggtttccacgcaaagatatctttattattctgaagaaaggtgatgagcgcgctttcctatttacaatctaactcggcgcctattacagcagttttagtaggatcagagggatctaggggaatcttcttagtcttggcttcgctttctccactttttgaagtcttggtagcaggtatttctccttcgcttgccgtggctgcagccagtcggatatcctctcgggcagacgccatctcgcgggtttgagccatgtcgcaactctccttgtcgcatgtgacggcttgcttgatgtcactccgtagggatagcactcctcggggaccaggcatcttcatcatcatgtaagtgtagtgcgggacggccatgaacttggctaacgccgggcgtccgagtatggcatggtaagctgtctcgaaatcggcgacttcgaagctgatattctctgtgcgaaagttttcccgagtgccgaaagtgaccgggagggtgatctggccgagtggagttgcggataatcctggaatcactccgtgaaaaggcgcattgcttggttttagctcggagcgaggaatctgcatatcatccaaggtcttggcgaagaggatattgagtgcgctgccaccgtcaatgagggttctgcgaagcttgacattgcggaccactgggtctagtaccagggggtaccgccccgggtggaccactcggtcaggatgatccgagcggtcaaacttgattgcaatctctgaccatcgaagatactggggcatgtcgggctgaacagcattgatctcccgttcagtcaacttctgcttccgtttagactcataagccagggggccgccgaagatatggttgagctccttgcggtgatcttgaaaacctgccggggtgtcgccgtcgtccttcttcctcgacgtgctttgttcttcgtcggaattcttccgtgcagtcttggtgtattgatccgcgaattgcttgtagacgaagcaatctttggccacatggttggagttaggatggtgcgggcattgggagttcatgatcttgtcgaacgtgttgacgcgcgaacgctgtcgagaagagtggctggcggttgcaacaagttccgcaggcttacgcttgcggtccttatgattgttacttccacctcctcccgtagccggcgtatccttttttggcttccaactgggacccgactgctttgatgcggtgacggcgtcttcagctttggcgtactcgttggctttttcaaacatgagcttgactgtcctgggaggcttgcgcccaaacttgccgactagttcttcgtggcgaatccctttggtgaacgcggcgatgatgacgtcgtcggtgatgtcggagatcttgttacgttgttcagaaaaccgccggatgtaatctcgaagggattctccggacttctgaatgacgttgtagagatcatattgtgtgccgggacgctcgaaggtgccttggaagttggcgatgaagtggtcgcgtagttcggcccaagatccaattgtgccacggggcaatccatggagccaagatcgggcggaatccgctaaagccactggtaaatagttcgccatggccttgttgtctcctcctgctgcgcggattgcgagaccgtagacggtgagccacgattcggggttagtggtgccgtcatacttctctattccagtcggtttgaagccggctggccaatccactcgacgcaggtcgtctgtgaaggctgctactccgtcaaggtcgtcgtcgtggcggtccggcgagtgatggtagcctcgagccgctcggcgctgtatgattgtgtcgcgaagatcgatggggcggcgacgaggtggtgagcgaggccgttccactcggtgctccctatgaaggtcgggaggtgagtgaacagaccgctcgtcgtgacccctgctcctgcggttggatcctgcgccggtgatgctgaggcttggatgacggtagtcatgagatcggaagtggggaactcggctgccagtcggcgtgtggacactttcggagttaactgggaccgaggccgcaatcatggtcttcgtctggttcaagatgttgacgacgtggtcggatcgattgagctcgttttggttgaggagggtgtcgagaagggtgatcgcggcaaccgcattctgttgaggggtacggaaaaccggtgtcccttcgacgtcttgttggccgatgagatcacgcgctcggcgccctgcttccaaagctcgctgacgtcgatcctcagcctccttcgcggtccgctcacggtcctgctgctcacgccgtagccgttcttgttcttgtgcttgatgctcctcctccagtcggcgacgttcttcggtctcccgggcttggcgttgctcctccgtctcattattggccatgaaaacgccaaagtagagaggggtgtagttgtcatctaggcttccgtcgaagtcgtcgaagtcgttgaagtcgttgtagcgagaactaaattcgtcgtactccacgatgtcagtaggacgtgagtcggcggtgggagagctgttgtagtcatccagctgatccgtcgaaaccgtgccgagtggttggaggatgacgccaacttccctgaagctaggcgaaatcggtgttgaagccgacttctgcctaggcctacgggatgaagacgctgtcgtggtggagacggccgctaagtcgtcggggagcttcatcaggactggtgggtaagtcccatcatcttggtctggtgtcgttggagaagatgcgatctcggccgagtggtttgaagccgactcggttgagatggtcttgaagtagctttcagccgcgttcgggaatccaaacccgaccgaaatccggttctctcccgactggtctgattccgagtcgaggagagaaatcttgccaaagttgttggtgatgaagtcgaggctgccgaaccgaaacgtctgcccgggagggaagacgaggtcgtcgatgccggagacggaacccattgcgctgatcggcgaaaagcttgacgctacccctacctggcgcgccaactgtcgaaactagatttcggcaataataaaagggggtggctatcaagctagaaaagtgtatgggtttggagacaaaagatttatacaggttcaggccttcttataaaagaagtaataccctactcctgtccggggatgaatccgccgagtgtattattgattgtatgattttagagaaaattaacctccgcccctagaggcgcccggaccccccttatatatgggaaggagtccgggttacaaaagataatctatatccctaacggaatacaaatacagtcgtgaccgactaaatctcaaggtgtttccttgttgtacaagttaagaaacaaacccgagatacaaataagatattctatacatattcggtatcctatatccagcccaaatagtatcgccgtgtagatatgggatatccataatctccacagctagtctctaaattcttaacttgtgtgggatgggttgttgcatgatgaatttttatgctgatggagccacttcctgagaagggggaaagtgagcgtcctcagaaaaccataacgattcaatggtgggaagctatccttgggatcacaatggatggtggacagaaccgtcgttgtttaaatataaacactggtactaaaatttgatcagtcaatgctaggtcttaggtttgtgaaaagaattacaaaacttgctttgcgcaaaagaaccatagccatcctttgaaataccccctttcatatgcattgttgctgtggtggcttgctgagtacggttggtactcacccttgcaaatataaacttaatcagaagcgggagataaagctccggaggatccctatgcctactaccaggaggaagatgaagacgatggcgctcagtaggtcttagtacggtcgttgcctgtggcaatggcatgccgctgcctaaattccgctgccttatctaattctgcttttggttgtattccggaccgcttggtctaatgatttaagacagtgcctgagggcttatgatgtaataattagcactagactctcgtgtatgtgcatttggtatttcagctatgaactcgtgtgtccagactacttgatccagggaaatggtacggtttacaccaatgattcctgttataaaaacgggggtccacacaacttcggtcagaccgcgttccgtcgatttcgagggtaacttttatttccgctaaaagttttcggtttttgggtataccaaccattcaccccccctctggttggcttagttccctcaaaactcaaaagtgcaagagtcttgtgaatgtatctttctcgaaaaagggtatatataagtcttgtgaatgtatctttctagaaaagagtgaatatataggaagggaaccaatttacctacaagaacaatttagtttgtagcatagattatctgtggggtaacacacaattggaatcccttaaaggttaattttatgacaaagaatttaagtatactttttttttcataatattagtgctcgctgcaacaataaattttgaatttgatactcaaaacttgttttgtggcactggcaaaacttcaggtttggatccagaatctgttttcttcacacttgcgataaaacactcataaaagttcaatcacattccaataaggtcaattggttcactagtgcctttttttttctcaattcgacctagatttatatataattctaataagtacataacatagactatatccaaaatattctttcatcttgtagggttccctcctagagaactgtgcatgctgatccacttccagttaataaattcatgtgccaaataaattaaaagccaataagaaaaaacgaatcagccacattaacaattcagatggtacaatttccacctttgttcctcaatcatatttctaatttaaatggatacaaaacaatgttataagtacgtactgaatatgtcggtgagatttgaaaccaatttattgccaccggatattttaatactaacaagataaataattaatagagatatttgtgtttttttcgtgtaactcaaaaggatttggcataaagtgattttaatatgtagcccgcaatcccatattttggtgtgatctaagttacactacaaatatttggtgccctcttcctgggaatattttgtggttatagttgtcataactccataggtttacatgcaaagattggttacctcacccaccataccttttgacaaaatcatatataacatcaaaaccatattacgcttgcacgagtggagctaggaatctaagatatcaaaacggaataaaccatgtgagatgattacattggtttttttttattacagtggatcaaatggaagaaaaaaaacaagcgcgcctctttagccaattcatgattttaacaagatttctcattttaaactgtacttttcttcgaccgacaagattatttgaaaatacaaatcgtattaaccgaatacaaaatatgttatcagtggcacacattgaatgaagaaaagggaagaaaatgaaggggggaagagaattgaagtaaattgatgctcctattgggaagtcatccagcctatcaaatattgcagctgatcaacttgataatgatcatagccaggttattgctaggggaggcagaaatgccccccataaaagggcaactaaaatatggaattaattcaaagcatcatttgtattctttatctcactatctggcccacacaaaaaaacacctataataactaataagccagagctgagcaagaagagaaaaaacaacacaaataattgacaataattaagattagttattttaatctgatgtgattcttgataggctaagatgccgccggcgaggtcgacgcgtgccgccaccaccaccggccgccgccggccggccagcgacggttgcgtctccgatcagctcagcactgcagcagcatctgcatctatatctgaaccttatctctgaatttctcctccagctacaacagcatcagagcgaggaagaagaagacgtggagagctctcggagcgccacgtcggcggtgaccgtgctgacttgtcaccggctgattggccggcgaccggtgacctgtccggccggtagcccattgaggattcgatgcccattgaggaggaggctgtcagtgatcgtgttgtcatttttttcatttctctaatcttgtttccttttttttactttcgttcttttttctgaataaattctctgctcttcgcgtggtaaattaaactgcacgtgtagctttttttttcttttttggttcttgttttgatagaactgcacgtgtaggtgtagcttgtatttttcttttccgaatatattcatgtgtaacgttagtaagaagtggtactactagagaaatcgatattaataacggttgtgggtttatatgtgtgcatctactttctagcttagcaaagtcgacggtgcacaagcactgttgctgccaagggcaaatcctcttttgctatatgagttatataacccattagatgcaattactattacaaacaacatcatcaagtaaacaagctaatcacttctttctataaagttaaggccaaacgctcaaatctcgtgctttcacgtcatcatcaaattgtgaaccgttagatgaatgtattagattgcttctcagacgttg

SEQ ID NO: 2679 - DNA, 1299 bp, Oryza sativa
ggaaatgaaatgttgggctatcctgtttctaacaaccaattttattcctagcaatataaactggtaaattttgtttttacatgttttagattggcatcaaatgctcgtcaatggtgccaagtccttttattttctgctgccgtcctatctgaagaagtggagatcttgaggatcagtctttcattcctttgctttgcatacagtacaatcttgagtaaacgccattgcttgttgtgaccaatgtttcgtggctgcccatctcgaccacctcgcctttgtccatcacgacgatcacatctgcacttgtgactgtggatagtctgtgcgcaattgtgatactcgtgatcttgttcgatagctcaccttccttgcttttccactcctttgctgccagggagctcatcaccaccttctcggtttcaccatccagcgcacttgtcgcctcatctaggagtagtatgactggcctcttcagtatagttcttgcaatggctattctctgcttctgccctcctgaaagttggcttcctttgtccccgaccaccgtgtcgtacccatttgacaggccactgatgaactcatggatgtttgcctccattgcagcctcaactatttctgtttccgatgcaccttcatttccatagctgatgttctctcttatggacaaattaaacaagattggctcttgctgaactagtcctatctgttttcttaggaacctcagattgtattctctgacgtccttaccgtcaacaagtacctgccctctgcaaggatcatagaatcttagcagaagagatacgattgtggattttcctgcaccactgggcccaactaatgctaccctttggcctggttcaatagctagactgaatccatccaatatgatcacatcttgtcttgatgggtagctgaaactgacatcttgaaactcaatgttgccagtaattctgtcttcacaatgcacttttggttcatctggcacgatctgcgtttctctgtcgagaatgtcgagtgcaggatccaatattgcgatggccgatataaccatagggatcaaagaccataactctgtgatggaagttattgtcagtgcaattgcttgataggcccgtacacagttttcaaatgttgctaggctcttgtcaagtagcacaatggtgtaactcaatgcgatggcatgtgtcatgtgccacaagcagagggaaaccccttgtaccaccccatactttatgctctctatcctgcttgtctgcattggttcttgcagcgacaaatctgctttctttagtatttcct

SEQ ID NO: 2680 - DNA, 3029 bp, Oryza sativa
ttcctgcagcccgtatgttgtacctatgatcactcacatattctgttcttcatctatttgttttagaacttttattaagcatcggaagtaaacaaccagagataatatgtcatcattgacatatttaactccgaagtgccattatgatatgtaagtgtgcttggaataaaggcccgtaggcctagttgaatgtcctatacccaagtgacatgccatgacaacacgatggaggcggctgccacaaggccaggtgaaacagtgggaagctaatgacttgtttgtttctattaaaagagacgcaaccccatccttataaagatgggatgactcgacccctaagaaatcttatctaaaattaaggaaataggctaaaactcaacctaagttatctctaaaacaaaaaaaaaacaaaaaaaaaaacacccaaccgactacttcagtacttgtgggtactgttcatgtgcatttgcatgtgacgtggtaataccacctaaggtttaggttgtaatgcgttgtacgttgtgcatctaagatgcacatgtttgcatttgtatgatgttttcttctttgagcagggcatcaagtgtttatagcatacttctgctactactccgtgactcaaacaattacaagataaggatgcatgcagctgttgccttagcagttccagtctcacggcttggttggttccttgattgcttttgtttcccacctttggtcaactgttgtccttccacattctacaaataccacaccatatcacactgaagtaatagagctttgttctgttggagtattatctattgagtaaatttagattttattttcccatatcacatgcttttttttccattgttgtatgtgtagtctagacacatctactcattccaaaatttaatttgtgatgctgctcagttgctgcatagttcgtcgtggcgatatttatgtagtggctatgcactcgttctgtcatgatgctgctttatttctttctctaatctgcgaattgatttttctaatagaataaaatgtattccaatttcttatattttccctcttctgtatagattatggtagctcatttccagatgttgttcgaggaatcgagcatgttcttgagtcattgagttccaacagtttatcatcaccttcaaatttcaaacataaaggcaaccttgagaaacaggttagtgtttctgtagtgcttatatagacttttctttttgcatcaaagcagctttatttttgtaccagctcagagcatctatatttggcagcactgttgaagcttttgcccctttattttacaggttacatttactgctcttcatttgtttagttttgtttcaccaaaagatgatcaaagcctgagagattttcttatcaaggtaaggaactattttagcctatggaaatggcctatgtatttagtggttacttatatggtagttccgtagttggcatctgtaaaaatgttgtccaatgaaaaatattacgcccatcagtttgttattgtacgaaaatgtggatgcttagttggctatatcatatatagaacatcgaatttgcaagccctttgtggtcaaattttgagtttatttttcagtcctgcaaaagaaatcatatccctctttgctaattttatttcagtacttactaaatgtaaatggttattattctgcatttatatttggtttggtgattgttagttcacactattcagtggacttggggattattgtcagctaatgtttgttacgttctgtgattgtaccgtctatttttgcttggtaacattgcttgtactggtgcatgtatctgatgtagtccgtttggtgttaacataccaatgcactaagagaaaaatcctaaaccgtatgcagaaaatgaaaagaaattacttaaaatgctgcttggccctgggtgtgctggcaatcttctttttgattcttctgtctctatgtttaattgcttttctagctaatttgtgtgttattttgagcagaaagcatcctttctagaagactggctgaagtcattgttctcattgttcaataatgttgaggaccagcctttggcaaatgaggccataaatgacgaggatggtttcagcccaaacgtggcacaaaaagctatgttgtcttctgctgtgaagtccttgctcgacatatatacaagtgaaaatcagcacactgttgctcagagatttgagcaattggcaagaagcctagaattatagtgtgaatgacaaacaagatggtggtctcgatccccattaacaagcagcatgacagtggccgtcttcctcccggaaaagccaactcatcatctattcattttcaatctccttcataaagagaggcaacatgccctattgcaagtattccatgaactcaatgaagcttctgaatttcgatgataccagacgttggacattatgttcatgaacaagctcctggcagcttctaatgggaagggggggggggattcaaaactgcatctgcgtatcttatttatattgtaaaatagctttacctgttttttccaggtgtggccatgttctgcaccttatgtgtaaattttgagctttgtacaaagatttgcatgatcatatcattgtgagtgtaccatatatgtctcagcattttagtgaggaaatcttccacaaattttgtatgtacatttctggtagaccagatagcttcatgctacttaagatttgtcctgggcttgaatgcctggttagcttgattagaccactagcttgatgattgttcctcactatctattactcctatctgttagtactgaaaaactgatcagttgtcaatgtcttaatgcaacagaaaatgaatgccagccatttcagttggcgctgtcgtttgctttggtgtcacactctagaagtgttcatctaacaaccgccataaatggctgtgcactgttccattgctccaatgtttgaactcatggcattgctgagcagggatgatccaatcaagtgctacattcaactttttcccagcttt

SEQ ID NO: 2681 - DNA, 2885 bp, Oryza sativa
atgtgggaagagcactgtgatctttcctgttcaacggttctatgatcctatatcaggtatgcttctatgatatatctctatcaccgagcaaaaaatgggttgaagtgtatattctacagtctgtgtgctttttagagtacagaagagctagagtttactactttacatgacatgctttgcgtattaaattataatttctagagaaaaataaaaatggcatgttgtcactgcctacaggatccatttttttctaaaaatatgtgctgcatagagataaacttttagatcttgcttttgttaattagatgatgttataatgcaggtaatattcttatcgatggtcaaaatattaaggaacttgatctgaagtccctcaggagaagtataggttctgtctctcaagaaccatcactattttccggtacgatcatggataacttgagaattggcaaaatggatggaactgatgaagagataattgaaatagcaaaatcagctaatgtgcactcctttgtatccaaactcccaaaccaatactcaacggaggtaaagactccatgctcgtgaaaaatgagagttgtaaaaaccttacaaattgaatcaaactatgtcaaacgatgcatacatattcaaatagaaggacaaaattcaggctatgtttcaagttttggaccaatatactgcttttagttgttcccttggaaattcatctcgatggcagtaatgtgttatgttctttttagaggaatatgctgaatatgcccaaattaaatagacaagttttttgagtagttatatactgaacctacaaatagtaagcaactaagcatcagtacaaatccaagcatccccgcttatcttcaataaatgaaaaacttagtattaccaatgtattaaactatggcaatcacttcaggtaggagaaagaggtgtgcagttatcaggaggtcagaaacaaagaatagcaattgcaagggctatgctaaaagatccgccaattcttcttcttgatgaagccacaagtgcacttgattcagaatcagagaagttggttcaggaagctcttgatggagctatgaaaggaaggacagttattttgattgcccacagaatgtcaacaatcataaattcagacaagattgttgttgtggagaatggaaaagtagctcaatctggaactcatgaagaattgctggagaaaagtccattctactcgagtgtatgcagtatgcaaaatctagagaaggaatctggcaagagtgaagaaaggtaagcataattgattgcagtcttttcacaatgtagaatgttcatttatggaatccatcatggcattgtacatatgcaattacgaatgaaaagtattagaaccaatacattctagaagatgcataaatataaagcttaagatgtgttctgctctttgactagagaaacaatacctaaatcggttgctagaattaactgaatagaccagagtatattttactccttattatgatttgtgtggcatcctaattaattttggggaataaattttcagatttactgatcaggtcagagaagaacaagacaatggaagtggaacaagcaatgagccgtcttctactgcacatgaacaagagaagagtctagaactgaacccaaaccaaccgaagcaggatatcagaaacagagcatctgctttctacagaatgttccttggaacatttatgctggagccaggaaagattcttctgggctcaacagcagcagcaatctctgggtctcaaagccaatatttgctttctatatcatgaccgttgccatagcatactttgacccggatgcaaagagaatagttgccaagtactcgataattttgttccttattggattgctcacatttttcagtaacatcttccagcactatatatatggccttgtcggtgaaagggcaatgaataacctaagggaggccctcttttcaggtctgaaactcaagcatagcattttacatatcacgcaagtttgcatttagtagagaagtatatgatcggttgttctttatattgtgacaccatttctctttgtgttaaacacagtcattctgcagaacgaaatcggttggtttgaacaacccaagaacagtgtcggtttcctgacatcacgcgttcttggtgacacctccatgattaaaaccatcatatctgatcgaatgtcagtgattgtgcagtgtatctcttcaattttgatagctacaggattaagcataggagtgaactggaggatgggtctggttgcatgggctctgatgccatgtcagttcatcgctggcctcgtacaagtaaggtcagcaaaaggttttgccactgacacctctacatctcaccggaagctcatctcactcacttcagaggctgttagcaacattcgtacagtggcctcttttggtcaggaagaggaaatactaaagaaagcagatttgtcgctgcaagaaccaatgcagacaagcaggatagagagcataaagtatggggtggtacaaggggtttccctctgcttgtggcacatgacacatgccatcgcattgagttacaccattgtgctacttgacaagagcctagcaacatttgaaaactgtgtacgggcctatcaagcaattgcactgacaataacttccatcacagagttatggtctttgatccctatggttatatcggccatcgcaatattggatcctgcactcgacattctcgacagagaaacgcagatcgtgccagatgaaccaaaagtgcattgtgaagacagaattactggcaacattgagtttcaagatgtcagtttcagctacccatcaagacaagatgtgatcatattggatggattcagtctagctattgaac

SEQ ID NO: 2682 - DNA, 2922 bp, Oryza sativa
tgggagacttgcaggtgccaatcggggacgggatgacaatttgtcggaagctagtagatacctgactgaacaacatactctttctagatatggattttgggcgtgtgcctttttggcttctcgcgacattatcttcaaagggtatctatagaaggatgcaggtaatgatgttcgtggccttttgtgattctgttaagtttgggatatggaggttctgtctcggaatgagggggcaacaatactagtggcttcattcaggcggtacttgttactaattctttaagtccggggttaaatccctaagtctgaccttaattggttgtacttggcaatggatttctttctttcttgaaggcattgtctggagttcacagaatttccctaggtgaaaacctatggtctgatcttagttgattggaacatgacaatgatgacgcgtgcacgcgtcatttcctcattggaggcattgttttaaagggagtccgtatgatagtctaagtgttgttttggtggagataagagatgaagattacttgtggttgtagttcgctgtggcacggttgtaatagttgtgtcgctttttttccttttcttttataatattgataggctgtgtgcatcctagctatgcagaggccgagggtggtcttagaaaaattgtatcctctcgatgtaattgtttaagatcaataaaactctctttatctaaaaaaagttaacttcccctggccggaatcaagctctcagagatcaagctgctttcagccaattgggtaaaaaagatgacagctgagatacacacctcttgtgacatcgcacatatccatagatgatagatgcagtaagttgtgtatgcccaaggtagtactaactgccatggaggcatagacggaaccaaaagttatatcagatgcctgttgttgtatcgaggaacaaaagtactggcaaggctgtttttttgtccaaatgcacttggaactgagcctgccaaatgaaagctatagcttcaagccctgtagcaacagaagcagatgtattgggggtattgcatgtccttgtgatcagatgaacaagtcaatgaactgtttatcgattgcttcattgcttgagggcagtttacttttccattgcaattgattgattttttgtttaatagggatcagtacatggatccaattgttaaaaaaaatgtatttgtgtttaggcaactgccccttaataaaaggggcagttccttaatttccaaaaagattatgtgatccagtatttgtctctaatactcattgacgtttaggcgctagatgcacatgtcagagcaggtataataacaaactataagccagctataaagacatttcgagaagatcaaagaggagagataggagtagcgggctacagatttgtagacacaatgtgtgtatgataagtgtagtatagataactattgtataaagaggtgataaaattagtaggcatggcgtactgtctccatggaaaaaaatatttgttgaaaaaaaatattcacattttgtttagaataagtcaagcttgtagactttgactgtgatgttatgttgtttatttgttttgtttcttgcttgtgttttcttcccatcttttattggatcaatttgcaatggactgactttgaattcttcttgaaaacttgatttctttcaagtcttgctcaagtcaagttgagctggacttgcgttcataccacacttgaattcttgattgccatgaatttcaaccctctctaatgacagtcagacatgtcagagtttgatgaattcacaccactgttaatttgacaacaaaatttattaatatagaatcacacaataaaaaagtgtattaatataggagggatcaaaacaatcagttggtgtagctatcttgacttgagtaatacaatggcagtggatatatcccaacaaaatacccaaaaaaatgcaagagaagttatgtttttgttgcttttcaaagttaacaaatgttgtatacttgtatattcttaatttttttccatgatcgaaaagtttataaaaccatagtaccgtgatagtatttctgataattacctcccatataatttaaaatacattacactaaggtacaaattatacatgataatgttgtcatgcatacggcaattgaaccttttatgtgaaatttctgtataataaatattaggagtattatattcctatgttccaaacaaacagtaggcctatagaaatggaactatgtttgaggtaaggtttgcagttttttgtgccatgaatgccgagcaccatgaatgatctttagtaatatatgatccgtttacctcttgagaacctcaactggtttcttgaaccgaggttagggatgtgctatgggtctatgtctatttcaaaacgtatgttaggaagtgcattacggatgtaagaatatgtggcgcgtgtttagggtatccacaacacgaagcaaaagtagtccataggcaatattatattccattcagctacctattacttttgtgcaactagtccatatagagaaaataacaaaaggtatccataagcatatatggactacctatatggaataaataatattatctatctatatttctctctcatctcctaatgctatcttgtatctatatacattgtgaagattgctatagttaaaatctcttttttagtcctatctatatggatcacttcacgaactatagtggtgtgtgcacacgtctgtaatccaaaaaaaaaaggacagcatgactcaagaaatagacgataattagtttagggtgtgttcgatactcaccattttcaacttcggctacctcatttttcatacactttacaaactataaaacggtgcgtattttataaaaataaatatatagaaaagtttctttaaaatttttat

SEQ ID NO: 2683 - DNA, 948 bp, Oryza sativa
ttttcaccaattgcatcttgtatagcactcatatggttggttgctccagccatgacgtttgctgtggttaggtcagtatcaaaagctccgatatcttgactcagcactgatctcaagtatgccatccgcatgcgtgacatttgtctctgactggtatacatccaacatgtaatttctgcggaaggatcattgtcgcaaaaaggtaagatggtttctttgaatctactccctccgtcccataatataagggtttttggagggatgtgacaattcctagtactacgaatctgaacagcacatccctccaatatcccttatattatgggacggagggagtaacattctaacattattttcatttttttttgttccaatcatgtgatgctcttgttgctgcagacaaacagacaagtagtaacatagggaatggtgttgctatgaattgctcacttttaaagtcttaatctttcgttttctctgcacatttctgtgtcatgatgctctgtactcagggtccaattttctttttcacattttccagacagttatcttcaggtgcctagtagataatatattgttaaggtatatgctacaaatgttgacaatattctaaccaggttggggcatactagattcagtaggttggcctaagctcaaccaaaaagccacttcaccaacctttagccacagtgaaattgctcgaccttctgtcttatattctgttctgtatgcacttatagctgtcaaacaggttatatgatctttggattttgataggttcttcaggcttccactatgctcttactttaaagcataatttaataggtaataacttactttcagtatcttacaaggtacagttccaaatatagaaaatttagaagaatgcactcaccaatcattccaccaggaagtgtaataattgccaatgcccacatataaggaatt

SEQ ID NO: 2684 - DNA, 2448 bp, Oryza sativa
aaaataagcaaaaagggttgatttcagaacctctcttcttcagacagctactccaaacaagcaagaagtttatttagcaacagaagaaactaagaattgaaagcttgagtaactcacatcacaaatggtgagtaattttcttcaatcaatctctcatcgatcctatagtccagtgtagtataaaaacgttatttacacaaccataactaacataagcaataataattacacgctagtactctgtgacaatgacctattaacccacatatccatgaacattatattatattagctccccataccattgatattttcttttctttatagaagattgaaccactagccactgggcatgccaagttgccatcctgcagctttagtaaaatgtctgtatatttctcttctcttttttcgcgagtgatttttaattatatcagcgtatactaaggatatttcttttaattacatgaatatacgatatattatattatcaatttttgtggttgggctaattgcaaaacaagaacaatatgtagtatgaagcatttaaaagcaaataatattgatcatcctacaattattgaaatcaaaatataatgtgactacatgcacatgtttgccagctgcttttttccctaaaaatccatgcacatattgagcaacatgataacgtatagcttatctgtcacgtgtggaaaccacaaatttaaaacgattttctgaccacatgctgccattgcctaactttcagccttagcttgcagctgttcaagggcccttctcattataattatttgcctacataaccattagattggacaacaaaatcgctttgtttctacttcaaagatgatattattttacaattttattgttaaagaacaacctagttaaactaaaaccgttcttggcaatgatgcttcacccaactggtcagagatagaagttttgtcacatattggacaaatttgaagaggatggggcaaatccatccggggtaactaattgcgcaaacaacgatcaagaaaacaacgttttgtttccctcaacttttaatttaaaacaacattctagctgaccattaattaacattcaccatatgcaccagcaattttagctagccaaattctaaaaattagcagcatatatggttacatgcacatctctatttccatgtcttcataaatacttgtcaatactccttccataagtatagttttagttttagctagttaatggtataatccctccagcctaaattgaatataagacgcaaactaccattaatacacataaagaattattagcacattctagtttgaatcgctccaataaatgcaatgcatgcacctaatgagattataaatttaaaaaacgaattaaagaggagagggatttgctagttaacaacacatcacgtcttaaattatgaaacatcgaaaaaaaataatggtattaagcaagagattaaaatactactatgcccctcattaataaaacaagttaagggagaagacgaggtggaggagagattaggattaattcaatggctaaaaatgagaagaaaaaagatgaagtaatctctccatttcatattataaatcgtttgacttttttttctagtcaaaatttattaagattgatcaagtttatagaaaaatttagcaacatctaaaatgccaaattagttttattaaatctaacattgaatatatattgataatatgtttgttttgtgttaaaaacactactataatttcctataaacttggtcaaacttaaagaaatttttctaggaaaaacgccagacgacttataatatgaaacagaaagagtactactaaagagatctattggaccactccaaaactaaatttactgaggctaaactctaaactacacttatttgacaaagagagtatttgttaactgttcatcacttcattactagtatttcaggaacatgtactgaaccatacaactgaatcagttaccaagaaattaatcaatacagtactacaaaaccaacatggattcagagacacacattcggtatacattaattacctgaaatgactgtacttaattgctaattgctgttcagttagtggtgatgtatctacctgcaaaaattttctccatcccaattaattccccaaggagagtacatttagtctctctctctctcagagaccctgattggttcctgctgattagttatggatatctacatcatcgacctacgttcttggtactactgtcatcatgcaggaattatattgtcgtctgcaagttgagaggatgaaatttcagtactcaaatgcagcaaattcagtagtacgattttcgattgaatgcgatcagcgtcaccgcggagctaacgaatacagtgaaggccaaggaatcgatcgatcggtggatcaatcgagaggatgatcagagaggagg

SEQ ID NO: 2685 - DNA, 732 bp, Oryza sativa
tcctgcagccctgctgagtcatccacacctgcaaacaaagtaaactcatgtgagcaacctgaagatagcattccaccgttacgacacaatgcagaagtgcactatatgggatcaaccaaggcaatctatgcgcaaatataatcacacatgaattcctgcttcaaaggaaaccatctcagaacagagttcccatcgaatgccaacccacgcaatcacccttttgagtcatccacaccgatgcaccgccacaaacacgaacaattacagctcaggacgaggtttcctccctttgagacatcaataccacgctcaacactacggacgataccaaccaaccataccaccgctccgcccttaaataggccgcccggacaagacgaaaccgcacagacatcctcctatttgttgtacctactcctgcaatctggagtccaatcaccattatccatcctgaaattcacaaaatggtgatgcaggactgtgtcattttacatgactaaccagaaattcataacacatgatcacatggtaaaagaaactgttttggttttccatcacatacccaacaacaaagaatgagtaaccatccagatggtaggtctgaacaccagtgtcattgttctgaaagacgatctctaggaagcccttgtacgatgcgttcagcgtggatgaagccattttctggtggagcattgcctggcattgtggggaaagtaagtcttgtacactcca

SEQ ID NO: 2686 - DNA, 553 bp, Oryza sativa
ttcagagactgaaataattcaggctgcaatggaggcgaacattcacgaattcatcagcagcctaccaaaagggtatgacacggttgttggggagaaaggaagccagctttcaggagggcagaaacagcggatagctattgcaagaactcttcttaagcgtccagtcattcttcttcttgatgaggcaaccagcgcacttgatggtgaatctgagagagtggtgatgagttctttaggggccaaggactggaaggacagaaatgagggatcaagcaagattacaagtatcacagtggcgcatagattgtccacggtcataaattcaaacacgattgtcgtgatggagagaggcaaagtggttgaacttggtaatcaccacacactgatcactgcagatgatggtgtctactcaagactgttccatttgcaaagcaacatgaaagattgatcattgatgacaccatctgatcaagtccccattgggggcaagctacttaatgaaatacaataggtgctttccaagattagtggcattgcttaaatgcatttacta

SEQ ID NO: 2687 - DNA, 607 bp, Oryza sativa
aatctccagagaatttatacgatgtgatgtcccagatgttccttgtgaagcctagttcacagtcttggtcagtagcaggtgaaccagtacgaggaagccaagcccaagcaagaaagtttgccccttcatattttcaactagctcccacctgtaagtatcaaccagtagacagctgctggtaaagcctgtttgaaatttcatctttattactaccagacgatgcaagcagtaaataaaaacaacaaatattagcaatgaaagttcggtaggtcaggtgaatcgcttgcttgccaggtccaacaaactaaaaagaccagaataaagcaaacacattgatcgttacattttcttcaagtgaataaattgatcaatagatggacattaataaatcatgcatctttcaatgattgatcctgcgattaccattctattccaatataggttcacataatgatgtgagggttgcttaccagtttccagctgaaaaggaactctgttccttagtggcttcctctactgcaaattcttctaacagggcacgttgacgttcattaaccattctgcagattaaattgtgttgatcagaaatctaattgaagtgtgatgc

SEQ ID NO: 2688 - DNA, 694 bp, Oryza sativa
ttctcaaaccgaggtaccgtaagttaaataagcctgccaattcttctggcagaactgtgataggaacatcctgcagctccagaacattcagataccttgcacttcttggtgtacccacagatggaaaagaagaacaggttacatcgaaatggtagagcgagcggagtcgagaaggatctgaaaccgacttgatcctgtcattgtgctcatgtatcgacaaacgacggcacctgtattcgggttcaccggggtgcgatttactatgtgtcatgcagaaggtctcgtcctctgatatggaaatggccagctccctcacaatgtcatgcatctggaattccttcacctttctgaagtgcttcctctccacaacctgtagcaggcatcggtctatcagctcattcaggtactcctcggcgacttcttctactgttcttctcttttccggcttaatgaggccctctgcaacccatagtctgaccagccttttctttgttatcatgtaatcctctggaaagatgctgcagaacacaaatgcattctttaggtggctcggtaagttcttataactcagtttcagaatcttcatcactgaactcaactcctggtcgcgcaatctgtcgcgtaattcccaggttagctgatcattgcacttgctccactcttccatatcttgtttcttgaatgagagcatgtt

SEQ ID NO: 2689 - DNA, 1064 bp, Oryza sativa
tcaagataatagtcacacccaaaactgttttatttaaagggatccactttttgtcagatgatgaatgctagctatatggtagtgaataatggaagaacttctatcaaggaaaaataatgaacagtctccttactgtttttattgcaaccagtccccttcatgctcacttcctttttagctacaattcatttttaaacaaattactctgttagcgggtatctataagtgataccatgtgtatttagtgggcaaataataaagtattctgattttaattctttttctacaattaaatcatggaatacatactatttgtatgtggcagtgatggaagaaattaaaaatccagtacttctgacacatattacagtgtgattcatgcttttttttttgggtatggttctatcacttctctagaggtatatttatctacactgtttttgttccaaaatatcactatttcaatttgagaatctcaaatttcataaaacctgtaccagttcagctaaaacaagatggcagaaggcgtggtattcgctgctctatgcaaaattggatctgtcttggcatcatctgcaagcataacattaggtggacgtttagatgcaaacttgacaataataaatgagattgagagtcgaataaaacagatcgaagttgagctcaagttgatgcaagcattcctgcgccaagcgcaaaaacaagaaggctatagcgagcccactgaagtctacctgcaggaagtaagaaaagcagcttttgaaattgaggacatcatcgatgagtttctttacctgtctgttaagcacaagaacaggtttttcaatggggagttcatgagttacttccgtaaactcggtaaaacttcttggcacaaaattgctagagagctgaaggattcgcaatgtcaccttcagaatctccggaatttgtgggtgcagtatgagattcagcttccaaatggcaatagagtttcaaccgatgtggaggatcaccggcttccgcatcatctttcttacccagctgatgagatggtgggtgttgaacaagaaagaacaatgatg

SEQ ID NO: 2690 - DNA, 1384 bp, Oryza sativa
ttcctgcagccctgagtgagaacttcaaaaacatttgaagaagtggttcttttgaaaatgctgcttccaagcaattcaggacattaacctgttcatactcgtgtaaagtaaaaggaccatccgtttcctgaacatataaataaagtgttaaaaagctcaccagcaaagcatagtgctcattcttatttgagtgtctgtccaacaatctcctgcgcatatctgtgattacagttggcaacaactgcttcggcatgcgggcatacctgttcatttaacatatttacatagtaagtcaagaacagggaagagatacacataggagttcagggatctagatcatacggtgtaacagatatcaaaaggatgagaactttgaacaatgctgaaagcaaagtagtttgagtttcacgctgtatcaaatacaacattcctgccaatcagaaaacaaaatatgtcatataaaactttaaaaatactacccccgtccctaataagtgcatttatagcacttgaaggacgaaattactattgagagaaaatgacttagatgcccccaattaaatgaggggtggttggagctgggagggtggttggagacttgggggtaagatggatgaatgagcggtggttggacagaaaagtggtaatctagaagtgcgcttattttgggataaaatttgaaagctagaagtgcacttatttagggttggaggtaatatatctctttgctgatagcagaaggttctgaacatctagtgaaaggaagtgtccagatattggaaattgagaagtcaccgagcctcctacctgtatgcagctgcataagaatttgaccaagtgaagaagatagcgtagtgaaagatccccgtcttgatgactccttgtactcggcaacttgtgtcaaaactaatgcttgtccttccagcatggaagcaatggttgatgctgcctcaatacgcacctgcacatagacatccaggtaaatcaagagaattatcaaatataaacacactaatttgatagaagtatgggctataaagagtctgcacacattaaatacttttattttaacttttcaagtgtctacatcgactttttgcaaacatttaatatatgttcaactagcaacggtgtcaagacaattgaacaccctcagtcaacagctaaaacacaagctagcatgtaatggataagcacaatgttgtttgaaggtagaattaccagaaaatataaacactaaaaaaagattatataaatcccaattaggtcataggtagcctatagttgagaaacttcacactgaaacatgaaaataaatgtagatagataattacagacttgtacctttattataggatcgaaaatcaagcatgtcatcagagta

SEQ ID NO: 2691 - DNA, 7770 bp, Oryza sativa
aaaaaaaaaagaagaaaaatctctacttctgactttacatggaaacacagaagcaaatgtaattttaagcttacaccaagtcattgttctgatcgttgatctgaagtatggtttgcataccatgttttattttgcaaatgcatgcaagaaattttgattgttcatgctatatctagtttcgattagagttcatcggcacgacaatgttgtagcctttgcacgctaacctgtgtaaacttgaatatctggttcattcaaatgttggagcaaaacaaatcatcgcaaagtaacttatcaattatcagataatggggaccacgcattactaacttctggacaccttgtttttttttttaccaagttaggctagtgtttggttcactgccacacttttctagctcatgtccctacacgtcatacttacaaacttttgccacacttgtggccgacaaatttggtgccacaaaaactatggcatgccataaaatgtttagcaaaatagagcatccaaccaagcatgccctttgtgactaaaattccttgtcagtaattccagggtgtgcatccaaaaatattttcgcagattgatcgttctgatgattaccagatgataattgacaatgcataaaataaatttgggccaaacatggggtgacattgaccaatgatccaattaaataggcacacatacctgtacagactgtagtcacagctaaagaatctcatgagaagagaacaggataggccacatgctaatgcacaacttcacatgtttggttctgacattgcaaatctcacaataactatactgggaaaattttgctacatgttacagtcctaagttcatctagtccacctgatggctgatgttcagaacaaaagaaaaaaaatacacaaaacatgagcagtttattcttgattacctcaacctgagaccatcagcaacctaatcatcagctgattacatgagtatgatctttgacagagacagtcaggactaggagctggtggccaagaaactaatgctttacaatggtagtaacaagccctgcttgaacatgggaaatgttcatagaatggagaatttttttccccggatccatatcaagctctggcagttgagtttgttggtgataggccagtcggtgagttgcatgtgtcaggatcccgtttgcccctggatctcttctttgctttgaacctggacttggccatcagcgtgtccactgtatttgcaaaattacctatcgccattgcgatcagtaggactccacagaccacaacctgtgagagcatgcataggttatgacacgggttaagtatgatagaatcttggttgtattaagagccaaaagttcttacctgccactcagggacgatgcctgtatgagcagtacgaagaagtaaaaatccaacgtaaccctcaaaaccctatacaagtatgtgcgaaatcagataattgacttgagtgtctacacatttatcagaagattataatttagtgttacataaagtcagcatgtgctaagtagatcgcattaccatttagataatagacctggatactacccttcataggaattttcagcacagcattgtgtatttaccaaaaaaaactagaagtatcacaggataaaaaaaaaagagaaccgatctgtccttgatgaggttaactaggtattggtatgctcaacacctgctatcattaaaaaaaaaagtacctgcaacagaaagaggacagggcatagtagcaacaattgaccttcaacaccagcagtctctccccacacaacgtccattcttctagcctaccaaaaaagaaaattcagttatgcaaaattacttggactaaaatgaaggaaatgacatgatctcacaggtaagtgcatatagccacatgatgcttgaaatgccataaaaaagcaaatagataccagaaagttctttggaacagcaggaacatagagtatcagtttgttttttgatcagaaaaatatgttacctttcctaaagcaatccgagtatatagtctttggcgttgatatctgttctgcaacatcatggcgaaaccttgcattatggcccagcacagaaacagctcgacgcctctctgtgaataagtatacaggttatgcacattcattatgtacagtatatagtggaaagaaaaaaaattgcatacctgttttcgagaacaatcaggttgtccctttatctcccatgttagactaataagagacatcagcatggcacaatagtgatggcacatccaccttaagaacaaaagcaatttccataagttccacatgtatcagagtatccagtggtattggtgcttacatgtatagacatatagtgactagaaaagagcagacaaaatcttaacaagcaaagaaaggctggccacctgcatgttataagtggatagacagtttttgaaatttgaacaacacaaaatatttagcatcatttacagtctatataagataacttaaggcttcagaacattgaaatgttcccttgaaataagaggtgaaaatattggtaactactgacatgcaaaaattagagaacaagaatggctacaccctcttcatttttgtatatgggcaattccaaattttgtttttttttccccttaccaaggacggatatcacttccattaactcgtaatatgttctctcgcagagctaaagttgtatacagaaacaacaaccaagcctgtaaaatataaggtatgctcactgtcagtttagtcttttggcatggcataaaacataagataggttaaactgtttgcaatgtccatgaataagcatcagtctacctggtatagctgaactggcaatactgggaagcatccattccataaccatgaccggagtaccaacagaatcattgggaaaccaagaaaaagcaatgcagtcctatcctggaagaaagggggaggtttatttatgaacaggacaaagagttattgctgtttatggttatctatcagtatactctaaggtgatcactcactgaatcgttcaaacaatattgtaggaaatattctcatttaaaattcttgtaacaatcttggcctcagtttgcacagaaaggctgctaattttggtgtcatcaccattgcaagcttgaaaaggcatttgaggcaagagttttttttttctacagggatagaacatcaacaagatggatgatagaaaagtttggaggtacaggatttctatgaaaaattaaaagttacactgctgaaatcgccaggtgtttcacttccactaggaagagtgaagaagtcatgggtgcaattccttgattgttatgtttgtcatttatgtaaatttagataagctatgatgttatagttacatagacaaataatagtagattagtttgacttgtttattaacttgaaattaattaattgatcacaatttgcacaagttaggcttatgtattgacttgacaaaacagtttcaaagaaaacataacgaattaaagtagtatgtgaattcaatcgatttgtatatgaattctctaacacctcagtacatctcaagctaacttaaaattatttgaggctcatggtaaaaaaaaacttgaacactaaaatgtgtgcagaattattattattttttttgtctagcagtgcagaatttacaattgtaaaagctttggacaacacaaagacactcttttcttctaaggtacttggatcaatgtgcaaattaaattcctgaactctttatcaaatggaagctcaaagacaccagaatgccacacccaaaattttcatttcaaaacacaacttgatggctatagattatcatcaatagtacaattgtaacataccctgtagctattatactcttccttcaccttgagctgcacctccttcctcggtgcccgcagatttactggtcccaggaacatcttcaggaaagtaccttccaagcccaaaaaccaaagcaaaaatatcagaatcccacatcgccaaaaaaaaaagcaaagcaaaatatcagaatcccacatcaaaaaaaaaaggaataaggacagaaaccaagaacaagttcaaacttttttttccataaaagggaacaattaccatgtgtcttgctcgggagcagcgccgcaatgtctccatcgcttatgaggcacgtcgctcgatccaagtcctcctcaacctgctctcaagcacacacccacccaattccacatccacagtcacatcagcaaccaccaaatgcatacgcacatgcacattgtcatgatcaatcagcagcagatacacatatagctgacagaatgatgattcagagaggcatgaattcccatgttcccacacatctccacactccacagccgcatctagaaactcacaaaaactcgagattgttttttttaaaaaaaaattacagcataccaaacaacccaaacagcacgcagatctctccccagtgatccggcgcccacgaagcatccgcccacgaagcccgaggcgcacccacccaccccggcgatccactccgccaccgacgcaccccacgcacccgcgcgcgagcgcgcgcgcgcaccaacgaggcgaagcagcagcagcggtagagagtaccttgtcgctgtcggcgtgggcggcggccttgcggagcctggcgagctcggcgccgagcgcggcggcgcggcggcggagcgcctcctcctccgccgacgacctcgacaggaggcccgccgccgcgtcctgcagctccctcgcctgctccgccaccctcgccgccgccgccgccgcctcctcctcccccatctcgccgcctctctctctctctctctacactgctcgcgcgcctcgctttctctctctctcctctatagagagagaggaggtggtggtggaggcgggggccagaggctgacaggtggggcccacgccgacgaagggaggaggagaggaagatagaagatggtttggtggtttgatttggaaggaatcaatccccctgatggaggttagtttaatggggtgtttgtgatgtgatttgggagcttaattgtttagtgtaaagggggagaagaaaaaaggagtgctgggcatgtttgtagatttggatgggatggatgattaggatttgatttgttgtttcttgcttttttttccttttctttttgacatgtttagttgttttttgctctcttttattaaggtgagtttgccttttttttttttagggatgagatttttttttcttttcttgtgggggtttatttgggggcacaaatggatagcatgacgcattgggtgtgattttcttttgttgatgtgggtatgtaccctagcacggtgttatatggctttatgtttttaaaggttggtgtgcttacgttggatattaggcatatgtcatccaaatttgtatatgcgtctgagttgtaaatgtgcatgaagcgatagctatggtggataagatggtcgtttttgtgctttttttagtcgtatacataacaaccttataaaagatggatagtatcgtgtgaaagaaagttttataacttgtctaatattacacagctttttacatgagtacgtaacaaattgctataatatggttagtgtcatgatgagaaaagtttcatggcttgagtacaccatttatcgtatttgcacacgacaacacgttaagatggtgcaaatggttggagtgatattaggacgagggagaaggtgaagcaattgaagatggcatttatcttgttttgcttggattgtcacattaattttgcgtagtggttatactaaataaccactacaaaatgaatgtacaaatttacatagagattgtcagtggagagcaataatttgaagcatgccaaccctggggacacactatggccaaagttatgacaaaaataagtttagaatgtatttgaataatccataataatttcagcaagttatctgaactttggaaagccactccaatattacattttttatcaactaaaaatatttgttagggatgacatgttcatcacgagctaataaaaatttatttccctagcaattttttttaaattttagtcaactgactatttgggagtactatagaagtacttggttaattgccctcctacaaatttacctgttcaaaacaagaactaggttggtcatattgatttgacacctaatcatctagatctacctaacaaactttcaaggactaatagtaaaaaaaaaggagagagactgacacatcacaaatcaatgctcactaaacaccataagatactagaatgaattatgtcatggctagggcacatatagatggcatatacacaacatcgactctttagaacaagcccataaagaatgacactcaaatagtcccaatgttcgtaccaaatgttcttttctcttgttttcctttgcagaagacgacatctcatctgttgatccatgtttggacggtgacagatgcaaaggaccgcagacaatgtgtttgttagctagctgttcaattatcagcatcaacagggtagtaggcgataaccatcagtggtacgatgatgattaattggcaggaaaattaaaaacaacgaaattaaaatggagaggataaggcagggtaaaatccacaggagtggaggcggattaatggagctgctaatctttcggccatgggttcatgtattaataatgtctgttgttgctatctactgcataatgtattttgtgtttcatgtattaatatttaataataaccgtaatgtatattatattttgctagctgatgcatgccttatccgttcgccgtttgctactggttgctactattttctcaagtacaaaagtagaaaaaaataataagaaagaactataaaatttatactaaatgctattttaattagatggtataagattaaatgtactggttataggacagaaccaaagttaatatccagaataattgacttaacttgttcctattgttctaggcgcacaagaataaagtggcatcaaatttggacttgagttagtgtcagtcaattggtcttaccctagtatatgaaaaataatccctggttttcttgaaaaggttactgacttggtaggttagatttattttttctattctaaaacagcaggtgattaacaggaacctggaggtaatggtcattggtcaacactccgtggagtgactttcactccatcagtatgaaaaaacacacaatttgtcccccaggttattgaatctaatagtgtttaattatttaattaacacaagagcactgcctactggcacactcctacaaaagaacttgaaaggaattgaatacctgttgtgttaatttcagaaacggcatcaatcacttgtttaccatgatgtcacctgcatgcatacatgtcaacctgtttaccaaaaagaagaaaaacaaggttgcctggaaagtacaaacagaccgttccaagacgcccatgctgaggcttatatgcttgatatgaatgaatttttcattggacaaactgatttggagagcttggagaagattttgatttggagagacatcaaatttaactatagagttatatctatagaagttgtagctagacggttaacaagtagtactctgtacagtaaaaaatatatttgtcatttagaataagattgataaaacatttaaaattggatcatcaataataatgttgctagtttaaaaacaaaggaaataatgtacgcagatttgtctcgaaaatactgccgtaatatcacaaatct

SEQ ID NO: 2692 - DNA, 14470 bp, Oryza sativa
gaggtcgcggtgcatcgcctcgatcgccctcacccgcgcgtcgccggggcggtcgccgaagcacatgtgcaacaggaggcagagcatcgcgtaccggaagggctccatcacggtcaccggagcaccgccctcgccgcggacgtgggagacgagggcatcgagcacacagcgtcgcgcgccggagaacgcgcggaggcgggccggccggagggccgtccaggtggggccatacggacgccgggctgacggcgcgggggcgcgacgcgaacgccgccccgcgctgcaccagcgcgcggtacgccgcgccacgcgccgccacgaagatcgtcggccccagcggcgcgaacgtgaacaccgggccgtgctccgccgcgatccgccgcagcgtcggctcgacgtcgatgtccctccgcgcgaggaacagcagcgggcccagcaccggcaccgtcctcggccccggcggcagcggcgccgccgccgccgaggcgcgggcgcgcagcagcagcgagcacgcgaggcagagcagcgaggtgagggagtagaagagccagtcctccatggctaaacctctcggattatttttttccactcccgctgctcacagtggagggatatttatacgggagggggaaaaaagttcggcgggaaatctaaatcgagagagctatctcggttttgtgttattgcacgacgcgtctggtagccgtacgtcttcgtgctatcggagagacagacttgctttcactgcaatggcaacacaccaccgaccacatattatatttcactttcatttatatcatcatgttctactcaaaatatactatagacgagtccaatattgaatatatgcaaacacttaaagagtttacttaatttaaaagtaatttatttaaattgtagaaataatttagctttgcaatagaagtaactacctatagcatcggaaatagttatcctaaccaatcagttaataatgactgagatacgaacacatggatgttgtactgacaaagaaacatggaaacgagaccacttgtcagaaaaagaggacaacatgctaattgttagttgtcgtgtcgattcacgtgtatgctaccaaggctaacaacactaatatattttctttttttatagaacctttgatggtctatatttttttaagaccgtatgttatttttatgatctgtttgaaccatcatactatacttgaaacatgtgataaatgagtccaatattgaatatatttaatttttttttcttaattcctctataagtgtagttacttctaataatatgaaaagttacatccttatagcagtgtagttatttctaacgacgtgaagaactaattctctctagcagtacagttacttctaatatcttaaagagttattttaattttattttttatagttacttctctctagaagtgtgtttacttctaatattatgaagagttacttctattactttaaaagttgcttccctctaatagtgtagttagttttaatatcatgaagagttaccttctatatgacgcaagattttattttttaaataatatagtgattagtttaaataaagaatatatatatttacttgaaaatatcttctctacattgtgcttgtggatttactccacatagtttcttatttcaactcatcatgatgtaattacttctaatgctctaaatagttactcctattgcatagctaagttacttttgcaattttaatgaactacttttagatcaataaaatgtttgaatatattcaacattgaacttgttttatcacatattttaagcagagtacaatggtaaaaaaatatcttaaatataatataaggtttaaaagatacactagtgaccgatctatattagtggcaaagaagtatttatacatcacatgggataaagtggtcgatggtttaaccaaaccagcgaccgtgcactgggtagtcgtatctaaaaaagtctattccttttttataggcccaaaagaatatatttatccatgctgacattaccactaccagaaattggagtgtaaaatacaccaaaattctactactccatgatcaagtttagatacccaataatgtgtcaataattacttttaatgctaccttccatctcaaaatataagtaatttttagctataaatttagacacacttttatttagataaataattaaaaattattttattttatttgtatagctgtttttagttatggtaacaagaattcttcattgtgcatacctaataaagtgcattttctcttcttttattgtgatacaaagatatgttaatgtaaatgcaatttttccatgtctcatcacatatctattttcagtaattatatcggtggcatcagcaaatgtttaacattaactagatgaataccccgcggcgttgctgcgaaaaattaatttgcataatatgtacaaataaaaagtaatttgattattaaaactaaaacaaatttgaaacaattttgggcccaaaaataattgatattgcatgtttttatgagagaagaaagaagagacaattaagaccatagatctatcatctaaaggctagaaataattgaggtgatgtggcttaatgatagaagagaaaaataacattaactatatttagtgaggatgaactatatatacttatatagatacacccattatcttgtacccacgtctgaatatggacagctgtcaggttcaaaaaaaattttagtacacgtgaatcagaaaatacagaaatagaaaaaacatataaatagaatattatgcattgttgaatcctaaaaaaatattaagatgatccaaaatacaacaaaatataaagttatatggccgaaagtaaaaaaaaaataatcgataggtggtcaaagaaaaattttacaacaaaatatggcccaaagtgtaattcactaaaaacaatcatacagtatatacttcttccgttctaaaatataatcatctctaatattcgaaattcatctaagaacttctctactcattcaacttagtcaattataatcatctctcagttgcttctccagttaattgctcatctcagctaatcaaaaccatttttgatttaatttcaactatctccttattctctgtttctatgaaaaatacatatgctttgggaccgattaaaggagtagttagcaggtaaaacatataaatttcttgcatgactcgtgatgttgtttcttgccttgttaaacagtcaaataataagggtggttgccgggcaaaagcccagtcttggctcttttgaaaccctgacggacggcagcggcagttttcctgtcgcttctctccttggagacgttgtttaagcatccccttgccgaaacctctcgaacgattgatgcaagcacgctctaggatagagttgggctttgtgttggttgtaagggtgtttttttggcgatctcgtctatgttcctttgttgccctagcggtggtaggtcacacttagcggcggctggtccggtgctagccttctcccggacctgtgtattggcgctgtttgtgtgtgggtggtggtatttttttcctttttcctggttacgatcttccagggttgtaatcttgtaattttttttagctctatcaatagaacatcgttaaaaagaaagtcaaataatggaaaacagtagtgcaatatctgcaaatatctcttattgggtcggattttccaaagacattgtctattttttgcgaataaagtcaagtatttccccaatgcattcatgcgatagatagataactggtctgtggtcacaccactcaccacatcaaacgtgaccgtgatatacaaccgaagtatataaattacgcaaaattctcaggagggtccaatatttcccaggataatctcactgtcagaaaatcaaaacattggtgaattttatcttaatttttttttgcggggagaattttagcttaattttaaacaacaaatttcaaccatttttttaaaatataaattaatcctttttttgtccgtttccacaatttctcggtgggggcataaaaaaagatggcagatatcctcggaatcctaatgacaaacatatgacatatgacatgagaaaggttgtcgtaggctcgtcctccctccgtcgtgattgtgagtttttcaaagtttgactggccgttttattaaaagaaaaattgtcattagtatttgtattgttactaaatgataaaacataaatagtactttagtactttatatgtgacttatttttaaattgtttcataaacttttcaaataatacggacgatcaaacgttagacacgaaaacttactatcaaacttaaaacgcaacggagggagtagctttcttttctttcttcttttttcttttgacatgaatgttcatttgttgttaatttccctttcaacactgttgattccaacgtcaaatcaccatcatttttggagtcctctactctacccgtcatcaaacatgtcaccacattcattaatcataatcatcagtacaaatgctaattagctatgctcattattcattgagaggtgcagtacagtccatactgacaaacgcgttaactacgtaaggttgtggggtagtcagcctgggtacgaaacattaccctttttatttatttgatattagattattctctaatatttatgtttttttttcagtcagtccataaccataccatgcaagtgcaacaaatatttccccatgtattttttaattcgtgttttttttcagtcagtacataaccattttttagtcagtccataaccatactccttccatcccattttaaatgcagccatgaattttttttatccaacgttgatcatatgtcttatttgaaaactttttgaaaatattaaaaaaacataagtcacacaaaatattatttatcttttatcatctaataacaatataaatactaatcataaaaaaatttcaaataagacggacgatcaaagtttgacatggaaactcatgactgcacttaaaatcggacggagggagtcccatgcaaatgcaacaatattttctgcatgcattttttaatggttttttacggtgatatttacgaagacaacagctattccatccttcacgttcttattatcagcaccatggaattctttttggctcattgttcacaaattttaaaacttaatttagaattgatttaaggtattttgtcgtagtttatttttcagcattcgtagtttttagatagctaaaaaatttaccaataacttatttcgtgagttctataagccgtttttatggcctaccagatttacgtgaaacgatttaactaagaagctatgcactctttctattttcttttacattatatcggttcaatttttaactaaccagcaacagaaaaaaaaacagagaacccctcttctgtttttctccgggcatacttatgtgatgttgcggcattaatcgaatttgatttttcttgttctattttagagcattacttattatttttgaacaaaaatgctcagtacttattattgtgtcatctgatcacttattgcctttttttttctttcaccaatctggtgactttcttggcaggtgactaatacccaggtaattaaagttataataaaagtaaattatccggttaaaaaattaacagccacataatccaaccttacctacgtgttcatgactccaacactcactaccggccactagctacacaccaaaaaaaaaaaaatccccgtgaaattattcacccccaaaaatatcccagccacccacttcctaccagcatccaaacattctagccaggaacaaaatggataaacaaattattttcccaataaaaaaaggaataaaactttttttccctcccgtataaatatccctccactgtgagcagtgggaatgggaaaaaaatccgagaggtttagccatggaggattggctcttctactccctcacctcgctgctctgcctcgcgtgctcgctgctgctgcgcgcccgcgcctcggcggcgagccccaaggcggcggcggcggaggcggcgccgctgccgccggggccgaggacggtgcctgtgctgggcccgctgctgttcctcgcgcggagggacttcgacgtcgagccgacgctgcggcggatcgcggcggagcacgggccggtgttcacgttcgcgccgctggggccgtcgcggccgacgatcttcgtggcggcgcgcggcgcggcgcaccgcgcgctggtgcagcgcggggcggcgttcgcgtcgcgcccccgcggcggcggcggcccggcgtccgcgctgctctccagcggcggccggaacgtgagctcggcgccgtatggccccacgtggagggccctccggcgatgcatctcctccggcgtgctcaacccggcccgcctccgcgcgttctccgacgcgcggcgctgggtgctcgacgtgctcatctcccacgtccgcggcgagggcggtgcgccggtgaccgtgatggagccgttccagtacgcgatgttctgcctcctggtgtacatgtgcttcggcgaccgccccggcgacgcgcgggtgagggagatcgaggcgctgcagcgcgacctcctcggcaacttcctcagcttccaggtcttcgccttcctcccgccgatcaccaagctcgtgttccgggagcggtggaacaagctggtgtcgctgcggcggcggcaggaggagctcttcgtcccgctcatacgcgccaggagggaggccggcgccggcggcgactgctacgtggactccctcgtgaacctcaccatcccggaggacggcgggcgggggctcaccgacggcgagattgtcagcctctgctccgagttcatgagcgccggcaccgacaccacggccaccgcgttgcagtggatactggccaacctcgtcaagaacccggcgatgcaggacaggctcagggaggagatcgccgccgccgtgggcagcgacggcgaggtgcgggaggaggatctccaggcgatgccgtacctcaaggcggtggtgctggaaggtctccggcgacatccacccggccactacgtgctcccgcacgccgtggaagacgagacgacgctggacgggtaccgcgtgccggcgaacacgccgatgaacttcgcggtgggcgagatcgggctcgacggcgaggtgtgggcctcgccggaggtgttccggccggagcggttcctccccggcggcgagggcgaggacgtggacctcaccggcagcaaggagatcaagatgatgccgttcggcgccgggcggagggtgtgccccggcatggcgctggcgctgctccacctcgagtacttcgtcgccaacctcgtctgggagttcgactggcgcgaggtcgccggcgatgaggtcgacctcaccgagaagctcgagttcaccgtcgtcatgaagcggccgctcaaggcgaccgccgtgccgctgcgcggcgaccgatcggccgccgtcgagtgaacaaaggcctcaacgacggcgacggcggccggcgttttctctgaatgttgtagcatggcaattaggaagagaacaagagtaggtcatggcttctctttgctaatcatgctactaattacttcctccgttttacaatgtaagtcattctggcatttctcatattcatattgatgctaacgaatctagacatatatatctatctagattcattaacattaatatgaatatgggaaatgttagaatgacttacattgtgaaactggaggaagtagcaattaaaaatggtgattagatttaagttcctcttgttcttttggggtattagtagactgaactaatgctgtgctagtgcctatatgtacaaattactatggggagaacagtttggtacttctttctcataatcttgtactttgttgagcttaattacttaattgctaatagcaatctggttgtgttgttgagcttagttacttaattggtaatagcaatctggttgtgagatcccattcgccactattaacatgatgccgtcaagaaaatctaaaagaaacatcgtgcctttcatagcacagtctgcaaatgagtgaatagtgattagctattgcaggtttgtaattatcaggtaaataaatctgcaggaaccttcagacatgcagatttgttcatctgcagaaagatataaccaacctgcagtagttaatcacaaaattgatctggagggattggttgtagacgaacaccacatcaatgtgatgtgttctgaagattgctgcaaacaaaggttactgtccctgaacttgacaactattcatactcagatactggtactgcaaaattaaggatattcatttgctgatgccaccgacatgattaccgaaaatagatgtgaagagacatggaaaaaaaatgcatgatcaatagttcaggctattctacagtacattgatgatctctgtgccttggcaataaataaatcaacggcaaacagagtatggcaatttacagcgttccctaataggcagataaattatgtacctcatcatgattacaagctctgcttcataaacagttaccatctgaagttctggaagtgcatcaagtaagcatgtataggatacaacatggcatggtatgtgctctagcaaatgtactaggttgcaccagctagaaccacctcactctttattatcatcagcttcttcagactgtctaagccattcttgtagtttgagttcttgttcttccttgaacttgttataattctccaccgatttggagatatcagtcgaagagctctccttcatagtagctgtattgttatctaaaagctggcttgaaacaggaagatcatccttctctgtatctgagggtgtcgatgcaccatgtccaccagcttgtgatgattcaggagctgcagatgactctgactcctcagtggtgtcatcttttgttccgaaatcaggctgtggccatctgagagtggatgccttctgcttcgcagtgttgaacatggaagagaaataattacggctgcttcctccgtcggttgtgcccaaatcttcttcccatgttcctgagcttttccctgattggaacccccaagtggggttctggattaacctgagtgtagtgattttttctcagaaccaatgacggaagatgaactatatgcatagaaattatactttacgggaagggcctgggatgatcaagccagagctgtagagtggtctgttagttactaagtttagaagctataaaaaaacttgaacgttagtggaaagaacaggcactatcagagaggcttgaacaactttatctttatcttactaattatatataacatgttctgctgtcatgcttcatacttcatgaaaaaaaggaaaaccaaaaggtcattgttctataaaggatggtatgaatgaagctatttgggtatagcactgtattaaacaaacaaaaaagttagaaaacatgtaatgcaaaggaggttgtcaagataggtagaatacgaaccccctctttggttgggtctttgacattatcttgagagatttatttatgtccttgatcatatcatcagcaattggaagtccaaactctgccatggacctcactgcacagatagagtcctctatatcttcagtatgcaatgttacctcatgaatcttttctgcaacctttccctgatgagggaacagggctcatgttagaataccacaaaatcatatcgttaggcagataactttgatatttcctaataagtggtgaccactggcaggaacaaatgaaattgtcaaacagctgagaaattactaattattagtaggtatcagcttattttcaaacttaaaactgcttgaaggaatgcaatattgtacaggaccagaaaaaatctgaatggtaaataacgagcattgtcagttgagaacaaagtttcagcctttcaggtataccgtgttcatctgttcttccatgtttttgtaagagcttccctttaattgttgtacaatgtattggtaaaaaacctgtttcacacaaataatatgacctgcgatcccaacctgacccttgactgaaaacaaataaaaatcaaattttagatgcttaactggtttacaccgcatcagcttctgccaatgctaatcagaatatttattagctctggacttgttatcatgttggaaggtgtaggaggtggtctgtcaaaatctgaaagaagccactataacttgataatacaagatgcacgcacagaagttgataaatgaaattccctgaagttcccttgggtgatggattatatggtgacatgttcaaaaaaaaaaaattctgactctgaagactcaaaattgggtatataacaaatcagctggatccctttaataatgcaactaacacactgtaacaatagttatgccccctaaccaagtgtttaatgtgttgttgctctacttttctcttaatcaagcatctctgaatttcataccaatcacaattctgagataaggccgcgctgatgatagatcagtataacatttcaatcccaacgcgcaacgcagcatgtgcaaaagaatcaaatgccctataccggtagaacattaaggacaaggaggagatagagataggaaggccatggaccttgacgtcgaggaggaggggcatggacgcctgcgcgtgctgctggacgaagtagagcccgacggagggctcgttggccacgtacttgatcatctcgtccaccccgtccttcactgcaaatccccccaagataataaacaccggaatcagatcgctacgcaactgcaggcgaggtgttcgacggaattcctccaaagaatcaggagcaagaacagcaagaaagaaacaagcaggccggcccgcccgggatcgttaccgcagaggaagccgtcggccggtgagagcggcgaaggcgacgcggcggaggaggagatggaggagaggttgcgctgcatgtccgtgtccgccgcagagcgcggcgggcgaccatcacggaatcaccccgccccccacgacaccaccaggagctcggattcgccgccgccgccaccgctcaccggagggagaggaggaggaggaggagaattcaagcaagggaatctctcgcagtagaggggatcgagagagaggaggaggagaaatcgagcgagcgcgatgacgaacaaggacgaggcgagaggcgagagctggagaaggaagaagggtgggtgggttcagaaaattcagatgaagggtggagatttatttatttggtaaaagaaaatagtaggattagagcgagtaaaataatataatatatgatgtaagcggtttatatatattgccacatcatatttatgcttatgtggataagatagaagaggagagagaaaaaagcggactacaagttcgtagccggctacaacacgaaatccaataacctatgtgagagaaatgtgaggaaaacattaatgatgcagtatgtatttataattaaatattatattagtaggctattaagttagctagtatacatgatgtgttaattttaagagctaataattagctatattattaaactcgctcttaggaaacaacaatgtatggattggaagtacttcgtcgtccatgaatactcgttggttttgacaaatggtgtatgaactttgctcgttcaattttaaacgatattagagcaggtcgttttaaataacatatggaacattgtagatataatgtacatatatggcatgaggatatatgtagatgttatttttaaaagttggacaccaagaaaagacttggtatcaatggttttaagaagataagcaaatattcctagtgagcatgttcgaggagaattgaacccggacgaatggggtgcatgacagcaacccctgtcactacgctatgagcgtatctgtagatgttattttttaagtttcaactagcattgtttgcatagttttaatagtcgaagcaagagttctatctagtaataaagttgatggacgaaaattaaaacctcatgaaaagttgagagaagaaatataaactttttcgttagttgaaaatagtgtcttttgcgtttttccccctcagaaacgtataggagagagctgtctattttgcgttcacatagagagaaaatcatgtactatacgtaacagcatgacgtgccaggtaatccatgtaaacttttttatgcctaatcacagaaatttctggactaaaacagatgcccaattttgtctggaccgatcagaagctctcatcatcaggtattcaggtccctgatgtgccgtcagtttacaccatgatcaactttagcattatattgccgccaagtaaacgctagcatgatgtagttttcatcttgtaatcagcatcaagtgcatctctctatacacagccatgcatatacccccatttgattccataaaacattcccattcagtttcatgtaattcagatttatgtacaatttgattgcattcaatgtacaattttctgaatacccccatcttctctgcatttgattccattcagtttacatttttttccagacgagaatgggacacacataacaatttctgcatttgaatgtaatatgtacagggtaatggagtatgcctaatttttacaacagatgtgggggcacacaagaaagccccagtcagggtcatgataacatggagaatagctacctgagcctgatcatcgtttcaacgaattgcaacacaatggtggactaatatattaaccccaactaatgaagatatcctttttggagtttcgacgacagtgcagctgcatcaagttccactggtaggagattcaagaaaatctgcagaggattataatcatatttcattatatccctaagcacgagaaaacgttatctacaacctctctaaaatgtaactctgataatggcaacatatagggatattattgatcattgggtaacctaacatcattagcatagataatggtagtggaataaactgttcataactagtaagtagtcaataaatctccttctgttgtgactgttctgctagcaatcatattgcagttgtttttctatagaaacattgtttatctatgaaagttacgacaaaaagcaatttgcaggacattagctaattgcacaactgaacaccattgtacttaccatttagtgttttcatcagcatctccattgtgcaaactcccgttagagtcctcttctgtatcttctttgtcaaaactcccggtagcactctcgtacccatcttctttgagcaagctcccagcagtattgtcatccacatcttctttgtgcaaactttctctagtattctcatccgcatcttctttgtgtaaactcccattagtgctttgtgaagtagaggatggctccctggaatttccagggttatgtaacatgtttgaaaaaccctgccacaatcttgccggcagaaaaggcgcactttcttgttgctcctcagatggcacttcatacacaccagccgaacccggattcaactcagagaacctcacagctccaagaagtctctcggggagctctgattcggtctgaccctcaataaggaatgctagatctactgttagcgtctgcacgtaaccaaacgccaaatgaacaattgcgtttgcgacaatagaagatccaacatccacatcgatttcaatgaagtttgatccctgagtatacttgcacgtaagagccctacccaatatgcaaatagcttgttctcccacagctgttcgaacaatccaaggccctctaactatgttcgcgattagcttaagcctagatttccggaaagcctcatctcctttcaagaactgatccataagtgagccttccggtaccggctccagcgacacaaagtagaatatagcactgtaattatccttgctgggcagttgcaggttgaaagcccagacgaaaggctgattaccacgcaaaacctcgccgtcgatggctttcctcacacgatgactcttgttattcagaatctcgcatatcttcgcggggcttttcatccaatcaaacccgagaggctttagaagatactccccacctggtatcttcaccttggttgcaagataatcagggcctctgaccatgaatgtgtcccctgggggagtagcccagccattggggcagttgtcagggtcaagaaatgggactgctcctcctgacttgacatcctccatccactgatgctgaacctcaccattggaacaatccatctatacatacaaaaagtgctaactctagttagttattactactcaaagaaaccaaactgacagcaatgtaaatggacagaaaatagatgctcagaagattcagagttgtagattgcagatgtaagcaagagcagaacacacacaaaaaaaaagaaccaattttgccccccaaatcgggtccgcctcttcaa

SEQ ID NO: 2693 - DNA, 6998 bp, Oryza sativa
accaaacaccctgaaaagggattcactttaatccgactcatcccgttgctccaaccagacacatgcttagttgtgtgaacaataacttttgatcttgtagatgtgtcaaattaatggcaaaaccaactggtaacgtcctattctattagctagttccattttatgagaaatgggcaacttagatccttcttgttttcctctacgacaagagaggaaattcaaaggatttcaatccttgcgaaatattttcaatgaggtccttgcaataaaggaataaaatcatatggattggttttctaggccttcattccataggaaacaaatatgagattcgtgctcatgttttcattcccttatatagaaacgcaatgcactttctctctctctctctctatgctcagtgtaaatcctctaagattctttgtgttctattttagtacgaactattcaaattaagacattgcttacaaaaattcatgtgttttagaatccggtaggactctactgtgtatgacatcttatctctacggtttttttcatgtgttccaaaggagcagcatttatctaaagctagcttgcaggtacttcctctatccacattagttttccatatgattccaggtacacgtgcgtaattgaaggtgtgttcaagttaaaatatttgagttcaattgtgagttttgaggttatttttgtctagattaaccccacggcaacaaaagtcgacaactgtggtattttgtcaaagaaatgaacacacatcttaatcttgtgatatactccagttccagctaaaccaatggttttttccttcaaacttagccggagagagagagagagagagaatatttgtaatatttcttcaaacttatgcagaatttcagcggctgccggagctaaaccatggcttttttctgcgaattgatgaaaaattgcgaccaattcacgcgatgacataaaggggaggaaaagattagcgctgaccactgagctattaatgcatgccttgcaaagacgagtaattaattaacacggctaaattatttattaccgcgcgttgtaaatcaattaatatatatacttgcttctcgtacacatctagtagtaccaagccacagaattcgattggtttaactaaattaattaatagtagaaattgaattgtatgtgtcatacatttactatcaagtaactactccctccatactcgtaaaagaagttgtttaggacaatatttaagtcaaaccttagaaatataaatcataaataactctaagttgttgagtttgaaaatataaaaatcatatgaatagatttgtcttgaaaaatactttcacaagaagtatacatatatcacttttcaataaatatttttatagaaacaaaaagtcaaagttatattttggagactgtgtcgctgtccaaaacgacttcctttaccagtacgaagggtgtactacaaattaagtaaaagagcttattttcatatatctgctgagaacatcagctaatccactcattaattctgatcgtacagttttgagagacatgcattgcatgtaatcaagcatgcattaagtcaaatgcccgtgcgctacagtagattcagaagaaatatatatcattggttttaaacttaaaagggcaggaaagtcgcacatagtataaaataaaatactagctccatctattttatattataagtcgttttgatttttttctaattaattttttaagtgatcaaataaataaaaatatatagcaatatatttgacacaaaacaaacatattatcaaaatatgaacagaggaagtaatatattgataggcaagctccttgttgtaaccaaggttaggggatggtcactacatagtacaaaatagattttcgtggacacttcgctctgaactacaccggcggcctaaaagcacaatagcatgtataatacacgggggatgtgcacggttaaaagaagatctattacaggcagttacatataaaaataaacatatttacacatacggctatcatagtgcgcccgtgtatatagtgtaagtaaaatcttggcattaatttcaattggcattttagactttctatagcatttgaaaaacccttggagcgatcaggatcggacaatgtgagtatgacacccccacttcatactacttgtgttaggtacgttcatggttgattgctgatctctcaagtggcatgtatatgtcatctgcatttgacatgccgcagctcagatcaaacttaaaaacagctattgtacccattgtatacatgactggagtagctgttgctttgacagaagagaggtacatggttgacatggctgctagcaatatacattgctcttcttcccctgccacatcatccggtttccgcttttcaaaaatccgtgaaaatatacatgtattatctaaaaaatagataaaatgattacatttaattcgatcggcagcagcagcttcggtggctatcacctccgtcgctgcaaattagtccactggttttaaatcaaatatatacaatttaacgcacatgtgaaaaccgggccgcattggagatgcatgcctatacgccttttttaataataataataataataataataatagaaataggttatatcttcggtcttgccattatagaggtacatggttgacatggctgctagtaaaaatatacattggtcttcttccccagcggcatcatcccgtttccgcttttcaaaaatccataaaaatatacatatattatctaaaaattagataaaataattatgtttaattcgataggtggtagcagcttcagcgccatcaccttcgctgctgcaaattagtccactggtttcaaatcaaatatatacaatttaacacgcatgtgaaaatcaggctgtattggagatgcctgtacgccttttttaataataataaaatgagttatatcttcggtctttacccgttagacacactgtcatccagaggcctatatatacagagcacctatcacactgcatgccatgctcctcatccaaagttcagacaaccagaaaattaaccaagaattgctctgcctatagcaagatctagtagcaaagcttgactctgagctcaggaggaagaagatggaagggcacaagagtggcatggaagctgtagcagttgccatccctcccttgcacactggtgagagcaaccacaggattgacagcaatgtcagctcgcaatgccatgctgatcctgcagagctctctgatgaaactcagcagcaatctctgtggcatctaggcctaagaaagataataccatcatctgttcctctcctcaagaaggtacacactttttttaccccatattttcacctctcatcgtctgttttttgtcttatcagttgtgaccaaaatttgaattttaaaatataattttagagtaaattttgaggtttatttttcagtactgacttttaaactgctaaaaacataggtattataaaagttttgcccataaataatgtttggttaaacgttgttataaaagtttatttttccacactttattggccatagattaaacaataagagcaaaattcttgaacttcctcatcctctttctcttcttcttcagaaaatgtacagatatctgacagacaacaacctttttcccccgtaatctttttcttcagatgaatctctgaaatgtttcaggtcagtgctgagttctttggcacattcatactgatcttcaccgtgctatcaaccatcatcatggatgaacaacacaaaagtatcgagacgctcctcggaatcgcaacatctgcaggcttagcagtcactgttctagttctgtccctcatccacatatcaggatgccatctgaaccctgcaatcagcatcgccatggccgtctttggtcacctcccttctgctcatcttctaccttacatttcttcacaaattctcggggccgtcgccgcctccttcgccgtcaaaggtctgtatcatccggtgaaccccgggattgtcaccgtgccaaatgtcggcacggttgaggcgtttttcgtcgagttcataataacattttttctactgttcatcatcactgctcttgccactgatcctaatgcagtaagtgtggttttctgatgtattttgatcagtttggttttcttttctttgaaatgtttgattcaaattttgtccttttgatcaaaatcttcatcaggtgaaagaactgatagcagtggcagttggggcaacagtcatgatgaacattcttgtggcagggtatgtgcgtatggattgattaggaacaatacatagctttcctgggtattttaaactgtcatgtaatactatttgtgttgtattttacaaaatataatttagatttgaataatttgaacaggccatcaacaggagcatcgatgaatccggcgcgtacaattggcgcggctattgccacagggagatatactcagatttgggtttacttggtggcaactccactgggtgctatagctggaactggggcttatgttgcaattaagctgtagtttacaccaggtaaagtaaaacaatattgtaaaggaaatcaaaacatttatcatattgtgatatatgaccattacattttaaataagtaataactctgtctttttacaggtaacttgtgactctttgagcatgctgatataaccatttcgccagaatgtaaataaacaaaattctactagctccatgatcaagtatagacactgtaattacttctaatagctgtttttttactatctccgtgaccaaaatgtcaataattacttgtaatagctgtttttactagctccaagaccaaaatgtcaataattacttgtaatagctgtttttagctatggtaagaagaacacttcagtgtagatacccaataaagtgtgatttctccaagtccatcaattctacaaactaaatcacttctatgaaaagaacaattgaatcactccgaggtctctgagcaaaacaaccctcattaagatatacatttttttcctgacagcatcaagttacagcggcaaattggatctcacaactacttttctatatgaacaattatgaaattaagcagaacaaggtacaagattacttttattaataaagacagagttcaaggggaatgaatcccagtacatcgccgaacagatgttatgtggcactaaaccatccttagataggaaactgaggataggaaccagacttcctaaggaaaccaagcagcaagggagaagcagatccacagggagcccgcgacgactacatccttgagcctcttttaacgtgcacaccgcttgacaaaccggtaatacccttcggctgcctctacgggaacggaattgctaattagtagcatgatcagcaagagaagccaatgaccgttcgggtgccatcgccatcgttgaggtcctagctcgttcaagctgaacccgtgacggcggcggcggctgatcgcagcgatcgccttggacggccgcttcatggcaacggtgagacggccgtctcgcagaaggagcgcaaccttgtctcgctctccttggtttgctcggtgggagacgggaactcggtgttgttctgggaagattgttggctgcagggcgcttcaattcggtcgctggcactggctgtttgggcggctgtcccagggcggttgcggggcaaacgcacggtgtctgaggcgctacacgacaggagatagattcgtgatatctcctcggcgttagggatgcaagcgatccttgaatacttcaagctctgggagctcctccgatcggtgcagctgtctaacgagccggacaagctttcttggtgttgggagaactcggggtagtactcctcccgctcggcttatcgggttctcttcttggggagaactcaattccaacacaagccaatctggaagtctttcgcccctcctcgatgccgttacttcctctggctggtcgctctcaaccgatgctggacggcggaccgccttcgaagccgaggtctgtcgcacccggatcgttgcccccactgcgatcaatgcgacgaaacgattgatcatctcctggtcgcatgcccggactctcggcagctttggtggattgctcttactgctatcggtcattctgaatgtctacctctcaatgagcagttctttcatgcctgttgtgtgacagtcgcaaaaggatgattaaagaccatcgccgagggttcgacacaattgcggcactggtagcatggacaatctggaaggaaaggaacaaccgggtcttcaaccagaagatcagaccttggatggagatagctagggctatgagggggaagcggacctctggcggatggctagatcagccataccgaccatgacagtcccttcgcttgttctttggtcgccaaatcattcgagagattaggcttctacttttctcttcccctctcctgtaccctgtccctttctttttatttttcagtcccgttctgtaaatacatttattcctcttaatacaaaaatacgcgtctcgcgacggtgaactcgagcatcttctcggtgaggtcgacctcgtcgccggcgacctcgcgccagtcgaactcccagacgaggttggcgacgaagtactcgaggtggagcagcgccagcgccatgccggggcacaccctccgcccggcgccgaacggcatcatctttatctccttgctgccggtgaggtccacgtcctcgccctcgccgccggcgaggaaccgctccggccggaacacctccggcgaggtccacacctcgctgtcgagcccgatctccctcaccgcgaagttcaccggcgtgttcgccggcacgcggtacccgtccagcgtcgtctcgtcttccacggcgcgcgggagcgcgtagaggccgggcgaatgtcgccggagaccttccagcaccaccgccttgaggtacggcatcgcctggagatcctcctctcgc

SEQ ID NO: 2694 - DNA, 3077 bp, Oryza sativa
aaaaaatatacctgttttccgtaatgaaatcaatacacttcccttttatacttacatgtgctgaaagtgggcctttggggtctgaaagaacagaatgcagacaacgaagaaatgaggtataaaatctgaaagatagtgaatttagcttgagattagcattcattcatttcactatattcaatgacaaaaccagagtactaaccttgacatagtgctactctctatgataaagttccttgctgtcaaaaaatccatcaccttcctcaaaacctacaaagtgcaagagaggagatttgacaaagagaaaatgaatactaacaccgtaaacttctagcaacaaaacaaatgcataaaatgcatcagccagtggttgtgtagtaagtattggtaaagtgtatcatcaaatgacaacagtacagcacaaatcttggaccaatggtggaagaaccaataatgctgtttgcatcccagatactaaacagctacaaatttccttgctacggtacttgctatggttacatcgctcaatgatatgtgacaaccaaccagagcgaaggaaacacaaaatactgacctcaacaatggactgccacaaatcttctgataaacttgaggctatcttagatagtgcatcttcaatcatggaaaatgcagagatttccatatcccagatatttggattcttattatttattggtccaaatgtgtgggaagaaaaaccagcaccattaggtttatctgtgaggttcagctcagattgcaagcatgatacaattgatatgagcactcgaagcaaatgtgcattctcaggtaaagaagtacttccgccaaaatctttgctcaaaaacctggccattgagaagaagactacaatgagaagcacaaaaaagattgtacatgcctgatgaaatttcattaatagtggtgaattcctaaagggtactagaatagaggtgtcacatcaaattattaaattaccaattcattcggtaaagctaaaagcagtatcttttcatgaaataatacaaaataatatataaatttgggaagatcgtacttctactatggcaattcaacacctgtacccttgaaatgatgggtttatagatattaccatatttactttggttatggcaatttgcctacgtaatttagtgtagtttaccgcatgtgcaggtagcaattctcttattcgcaccagtataggtgaggaattgccaatttcaaaagtactggagggattctgaaaacttggaaaagaacatttggtgctgtgaattaacaaaagactccaattaaaggattgagctagtatatatgtacagaaaaaagatgataatttatcgagtcctttcaataaatgtcggttaagcctaaaagactgaagtaaataaatgtagaagccattctcttgaggcgagcaaataagaactaaaaagattattattacaaaagtttagctaaaaccatgggaacacactctacattgttgatgtactaggtcattagtacttagcacaacaaaaacaagcagagaaagaagatttttaagcattttacactaatcttaagctcacctgaggatctgtaaacattcagatacagtgtccaatgcggttttcctaacagagaggcccttaccacatgaaccctccaatgaacattgcataagaacatcaagaaacttcagcattgccagtaaacaagacgagtcgatctccatatttgttttgtacatgatatcatgaatctgcatgagtagattttcagaaaaatcagagcataagtattcagcaaacaaattgacacggaggaacaaaaaccaaatccgacggttttaattcgtcagtcacattgatcaacaaatattagaattccatatcgcagcacgatatctcaccaaccattagagcttagagtaatgagaactaaaaatgccatacattttgtgctaatggtctcccatctgaattctttttttagataacatcaaagtgatacaaccgtactgagaacactcccagcctctgcacagcaaagatgaacacagccaaaacacccacccacgtactagtttgaaacgaaggaaaaattaaacagggacaattaagggacatcaatccgtagacaatctgaatgttctacactatcattgtcagtccacattaaagcaagatctcgagcgagtggaatcagaatcatcaccagatggcaaacgccacgcagcacatcatcggcgccgtcgcagggggacaccgccgcggccgtctccgcgaggaacgccacatccgagcccacctgcacacggtcacagcagcagacgagagtgtgagagagaccgaaaccagagcacacgcagagcagagaccaagctgcgcgggagcgggggggggggacctcgtgggcggagaccgcggcggcggacgcggcgagggagtgcggcggggcggcggcggcggcggagaggaggaggacgcggcggaggagcgcgaggagcgccggtggggagggcgagaccaccgactcgtcgcggagggtgaggagcgccgtgcgccactcccgcgcgccgccgcgggatggggcggcggatgtggcggcggaggtggaggccatcgccggcgaccaccgtggcgggcggttgctggtgaaactccttcgccgatctactccagtgaagagaagagaaaaatccttcagacccaaaggagggactaagggaggcctgcttagttcgcgaaaacaaaatttctaggtgtcatgtcggacgtttgaccggatattagaaggagttttggatacgaataaaaaaactaattttataactcgcctggaaaccgcgagacgaatcttttgagcctaattaattcgtcattagtatatgtgggttattgtagcacgtatggctaatcatggactaattagactcaaaagattcgtctcgcaattttccccctaactgtggaattagttttttaatttatctatatttaatactatatgtatgtgtccaaagattcaatgtgatgtttttgggaaaaagtttttggaactaaacagggcctaatttgcataaaact

SEQ ID NO: 2695 - DNA, 764 bp, Oryza sativa
ttacggtacctcggtttgagaagaacaaagatcaagcagttgccacaatcagtcgacaagctgttcaatctccaaacacttgatgtttaccttacaaatgtagacaagttgccaactgggatcgccaagctgaagaggttaaggcaccttcttgcaggaaagttgagtgctccactgtattgcggcattgttgagaagtccagaggtgttcaagctccaaaggtggtgtgggagtctatggagctgcaaactcttaagggtgttcttgcaaacctaaatcttgtggaaaatttgggacacatgactcaactgaggacattggcgatcgaagatgtcggagaagaacactatcccaagctctttgcatccatcagcaaaatgcgctctctacgcacactgaaagttctttcagctgaaggtaatcaaggtctgaactttgaagcactgagcttaccaccacagaatttacgcaaactccatcttaccggaaggtttcaccatgctgtgatggaatccaatttctttcagacagttggagctaaactggagaagctgtatctcacaggaagtaagacgaacattgatccattgatctccatctcctgcctctccaacctgaaagtgctccagatcggagatgcatacgacggagcaagcttcgtcttccagagcggatggttccccaagctccacacactcatcatgtgcaacttgttgcacatcaattcgatgatcatggagcagcagacgttgcagaacctcca

SEQ ID NO: 2696 - DNA, 1238 bp, Oryza sativa
gacaacttgaggattggtaaaatggatgcaaatgacgacgagataaccaaagcagcaagaacagctaatgtccattcatttatatccaaacttccaaatgaatacttaacagaggtgtgtatgctttcagtagaaatgcaaaaaacaagggggaattcatatattcgccggaggcttatccagtatctagaaaaaaaacctctacctacgattttaattaggacaggcaagggcagatgaccttttaaagttaaaaacaaaaccataaatgtgggtattgttctgatgatgaaaaactgatttgtttttttcaaaattgatgactgacgacatgcaaattacataacagaaaaataaataaacaattgctaaagagagaataacaagtattttagtatgcaagtgacaatatcatgtaaattctgtgttcctattggaaaatcattcatgtttccatctttcattatatacatgaccatttcttttttggttcaaacatactttcctagtgcctcacaaaaatctttgttgattcaggtaggagaaaggggagtgcagttgtcgggaggtcagaaacaacgaatagctattgcaagggcaatgctcaaggatccaccaatcctgcttctggatgaagcaacaagtgcccttgattcagagtcagaaaagctagttcaggatgcgcttgagaaggccatgagtgggaggactgtcatattgatagcacacagaatgtctacaattgtaaatgccgacacaattgttgtcgtggagaatggaaaggtagctcaaactggaactcatcaagagttgattgagaaaagcacattctactcaaatgtatgcagcatgcaaaatattgagaaggaagctggaacgagggtcgcaaggtaaagtaaaacgtagcaaaatggaaagcttcatttcaccaatagtttatgcttaccattgataaaaatagcgcatgcatgttgggtaccgaaaggatcctttcctgcagattgtgcaagctgaaagtgaatggtttgaaatcatcagctaagtctcactattaaaaagatctagaattacaaaacttaatgaaaacatataaaatcaatggcacaaagtttagtgaatataataatactatatgccagtaggattacttcgctcaaaaaagaattagtactaatttttacatttcggttgattaaacagctcttctgataatgtcatagaagatgaaattgatgaag

SEQ ID NO: 2697 - DNA, 2090 bp, Oryza sativa
aaagaaaatagcgataaaaataaaaaaaagtccgactcctcgttgctattccctctcagaaaaaaaaagtccgactctagatccgagtcccactcctctcggtttgagtccgagatactacgcaccgcttctctcggttttaatctctaccgtgatattccatacatcttggtgaaaaaaattgatgtgtcggattgaagatctgtttgcaaaaacggaacctacatgtcaagagcattccatttttatatgattttaatttttggatttgtacatttgcatttgagtccctataatttttatatttatatttgagtccctgtaatcttgcaataaggtgcttttggtcttttttttaaaaaaacaataaataaaagggatagaacaaaggcagaaagctgcataaaaagaaaaagccacacaaaaaaaaataaacaaaaaacaacaacaacaaaagtctatttcccctaagtggcaaaaaaaaactgtagatgcaaacggaaaaaaaatccgattcctataaaaggcaaaaaaaaaagtggtgaaaaaaaacgctagatccgattccattaaaaatgaaaaaaaagtctaattcctgtaaaggcgaaaaaaatccgaaaaaacatctaaaaaggttcgtccgattcactaagaaagtggcaaaaaaatggttcgtaaaaaataaaaagctggttcgtataaaataaataatgcacgcgagaaaaaaaagaaaatggcaaaacaaagtccaatttctaatcagtataaatctcttctctatctctaatctaatctaactatttaaaaataaaaaatgcacgagaaaataaaaacgataaaaaaaaacgtgtgagaaaaaaagtcagaaaaaagcgtaaaacacgctaaaaaggtttttccatcttcttaaaaaaaataaaaaaacaagtgagaaaaattatttccattgtcggcaaaaactttttaaaaaaacatgcgaggaaaagactgtcagaaaaaatgcaccatttctaaaaaaaatggtatgaaaaaaccacgcaagaaaaaaaacactatctatataaaaaaatcgctctgaaaaaactattagaaaaaagttgatggacgcttgagtcggataggatccatcaattttttaccatgtactacacggcttttatttcgtcatatattctcatgtatgggaaaaaagcaaaaaataacattcagaaaaaacaggcaaaaaaaaccacgtgagaaagtaattgtaaaaaaaaggcaaaacacacgcgagaaaagcaaaacaaaaaaggggagaaaaatatggttttctgcatccactgtggtttgaaagaagagcttgttcatttccttactgttctcaaccattccatacctaaatttgataatgaaccaaactaaacatatcactaccaacacaaccttgtcaaattttgtatttttataactttatactcacaagactactctcaatatttagttaggaatcaaactaaatactacccatcttcatcttatcttaccaaaatttgataatgccaaaatttggcaatgccaaagattgataaggatttttctttttctttttctttttttggtaatgaagtgaacaagcccgaagtttatgtgataaacaagatacagactacatgctagagttatacattcatgatagctgatttcgaattagctctattcattgtagctaaagtcttatcatctacatcacaccatgcctttcatgccattggcttccatttcaattagtctcttgttcatcaatattgaggacttagtgacaattttttttcgtaccaacgatgcagtgacaatgtgatagacatggatatgaggacaaaatgtaagtattttaccaattcagttttcaagtagacaatttgacaaaactaatatagagatgaacatggaacattttacatctaaaatatatatttaacagggctatctaaggatgtaagtgggttgacctagcccaaaaggtggatagcccatgggtcctataagtgtatttgtgggtcgatttacttacccttaatctatgctgtattgctgtctaaccgggtaattcc

SEQ ID NO: 2698 - DNA, 4698 bp, Oryza sativa
  unsure (1)..(4698): unsure at all n locations
cagccggagaatcaagcaatcaagttagtagctttctcgattgaacaccgtgatttcagcaacatatcctctccggattgcacccggaaacgcatctaatcaagaacccggacaccctccaagcagaagcaagtcaagcatcggcaaacaagacagagctcacctcacctgtggatcttggttgggccttcggggtggttgcggatgaggaggacgaacagaggcgagcgttgtggaagggagggagagagagagagagagagagagagagagagagagagagatcttggatgctttcttggtgttgcctttgcttgctcgcctcagctgctctttgttcttcttccggggaaggagagaaggggattgtgttgcgtagggggattagcagagcaggcaggcttagcgtgtgatgtttggcattattggggaaaacaaaacgggtttattactattaccccgttaaaatatagcaacatttaaacggacgccaaatactataaatctgaacgagcagtaatctctctgtcccataaaaaaccaaccagaattcatagtacacatgaactatccagatttattatacaacaaaacgttatctgtgttcatcatatcatattttaagttgtgtttattggatgaagcgaatattttttttccttttagtgttacccattacttataatttactgcttaacgtttttggcacgaagttaaaatgtagggctgtttttttttatttttctttgcatgtccacgttgttttgtgctacatatggctgagtagctgaataatttatgattattgttaacagttataaatgaatgattaaattataaagtgaaatggatttaaacaatattgtaagaaattcacatgtatatatatatttttaaaataattataccatttatgagttcaaaaaacatgtggtttaacatgttattcatactataaaaaacatgttatgtctacttatttatcacgttttgtattatccaacccgtcaaaatcctaaaactcggttttttcttcttctctttccatgtcctctttctctgctttttaaagcttggttttgcgatgactcacctctagttggagaagaaaacgaaatagataacatagaaggaaaaaaaagattgatgagaggagagcatatataccaataaaaaaaatctttgatataaaatttgatatttaatatttaggataatctttaggataaagttctcgtagaaatttaatattcaggacaatatttggtatacaatttaaaactttgaccataatctcacatgcttaagttcatataaaaaatgtgatttgccacaatgtcatacccttcttaaaattttacaaaatatttttacaaatattgatgactatcaaatctttaggaaagccagcaaagtacagcaaactacaggcaaatatagccgttcattttccattttccattggccatcgcatttgtgaagaaaaaaaaataaaaaaaaaataaaaatccccttgccctattccccacccaccaccagctcgccgctcctcgccgccgccgccgcggggcgtcattctctccggtgcgccgccgccgcgtcgggccccgaaatccgcctccccccaccactgttcttcgagagaggcctcccgttaactcgacggctgcgcccgcccagtcggagatgaagcaggtgagtttcaaccaaacctcgagccgttcggagatgggcggattggagatccgttcgggatttgacgatcggtttcattccctccaactaacccgtccaatttcgtcttgattttgctcctcttcgggggaaatttcgtctccccagtttaggtgccccctgcttgtgtagggctacaaatgttcctctcgcaatttcgtagtgcttagagtactttttggtatattatgcaagtgatttcagcatgcagctaactgtatctctttttaaaaggaaacggattatgtttggttaagagtttgagtttgtaaccatgccaaatctccgctgtatcagacatagcatcagaatatggttgaatgtgccttttaggattgtatgcatcaaagttgtctttaatatatatatactgacttaatcatacttattaacaagtctgaagtataatctgttcatcgaagtccctgccttgcgtattcctgagcttcattgttactatactactcaaagaggtggactgcgcgttttttgtttcgtgctcgtgttatgtaaccagctaatcattttttttttgcaggtgtcctgtagtgttgtaaataaatgttggcctacaatccatgcctctcaagaaactactatcaacggtctcataccgtgaagttgcaaagatcacaagctggccagataattttgcctcgcaaattgaggaaatctacgctatggcagaccaacttcactcagaggcagattgcaacgcattgttcctctgacctgagtacctcctgcagagaagaattgcccagctatttaacagttaatgttttgaaagatcagtcatgtgcaagacaaggaatctttcgtaaagtgattgtcatcttgaatcctaattctggatttcgcagctctcgtgaagttttctaccagaaagtacaaccaacattggaggtaaatgttcctgtttttcatttccagaaagttctttcagttgaactcgcaagaaaagggttttatttcaagtgcaacctgaaaattttaatttccttgaaatccagtggaaagcattgaagtttgtaatacgtgtgattttagatggaggggaagacattttagaacctttaatgtgttatttatatatttttgcatntgaattttgatttggtgcagctttcaggctttatgatgcaagttgttgaaacagcgtatgctggtcatgcacatgctcttgcttctactgttgatctcagcacatgtcctgatggtaatatcaattttgtatctgtatttgcagttacgtattgtacccttctatttcactatttgatttattattattttattgtttacaggtatcatatgtgttggaggtgatggaattgtgaatgaggttatcctctttcctatgcttctttctttccacaatctgatctgctgctctggtagcttattttgcgttattgctcctaggtgtaccttgtacttgttatttgcagtcaatacatataaattcatatttgttaaatgggcctgttgccactgctcttacaaaatttagcacttttagctcataattgcatttccatactgctaattagatattctttataattagtacaggttttgaatggtctacttggtagagatgatttggaagaggctattcaactgccaattgggataattccggctggttctgagaactcgttagtgtggactgttcttggtatcagagatcctgtttccgctgcaactactttagccaaggtaatttggtaatgttatattcaaatttgtgcgacatattaatatgtaaggctattattggaataaagtttcacacaggcaccgttcgaatccactgaaaagagtggattaaattttggattaaagtggcatgcttttcaaactgataaacggtgcgtttcgtgcgaaaactttttatatgaaagttgttctaaaatatcagattaatccatttttcaagtttgtaatgattaaaactcaattaatcacacgttattaccaccttcttttgcgtgaaacacttaatcttcatcttcaggagattcaaacaccaccacaatgtgcaaattagagagggtatacttaaattatgtactccaagaaaactcgttttaaggcagagataaatatagtgcatcattaccatatgcttttaatttggatttgttttggacagtccagtttatgtcatcacatattttggcagtagaaggtcctgcatgatacttaccatattttctctttatttctttccgctcccatcggatggcccaataagccaaagaataagccaaattttgaattttcaaacttaattttgagattgattttgagatatttttaacgtagttttttttcagcattggcttttaagttacaaagaacacatatataaaagttttacctacaaatttatttttattccctaataagccgttttggcttattagaaaaaaagccaaccgatgggggccttcatttattatatatctgtattcttctgagcatgtgcaccattgattttcaagctagaaagtttacgacctaaacaatagtataaaaaatattttatatttttaaagttcactactgggataaggattttcgtttggtctcacataggaaatgaatctcattctgtagggtggtatcactccaatagacgtgttctctgtcaaacggacccaagctggaattactcatttcggtttgacagcttcctactatggttttgtggctgatggtaagtcttcattcttctgcacaactgcacatgtaattcttgaagtgatacatttgaatttgataccttcattctattttagataattcaatcattagatgatgttactctatgtaagaaatgagctagacaatcgtatgcaagctagggcctacatgaattcactgtagattatgttagtaagaaaggaagaaaggtgaaaatagcgaatacttataatcatgcaatctatttaggat

SEQ ID NO: 2699 - DNA, 3332 bp, Oryza sativa
  unsure (1)..(3332): unsure at all n locations
gtatttttaggatttaagtgtattccaaaatagttgtcacaatagagtattaattgtctcatcaatcaattctcattcaaatttttttctattctacccttaaccactcttacctatatttcatttaatgagtggcatcgtaatctttttttaaaaccttaatatatgatagtaacctaaaattacaattattttagtatggaggtagtatttatttttttctttgagaaacacagtacaaacgtaaacactcacaacgtgcgtaaatgcacgcatgcacgccgtatccctattagcaccttttcggaaatttcggtctcctgatgggaactaaaaacacaatttttttaattaagaaaaaatattcatatgtttttaccggaaaatatacttttgagtccaaaaatattaatatgtggccaaaatcagttcaattgaaccttttccgtccaaaattccgagttttgtttccattgttgcctggagatatatatatttttagtggagtgccggaaatattttggatttcccacatagagccctcactacatgggtccaataggttgttaaaaattcctaatttgttcgaattcggtaaacataattgttcaaattcagccaaaacatgctcaagttcaaaaactgcagcaaaacatcattcaaaatttccgaaatttaccaaaatttcatctttttttttcttgcaataggctgcggcggagttcatcggcacgttcatcctggtcttcacggtgctgtccaccgtcgtgatggacgcgcggcacggcggcgccgagaccctcgtcggcgtggcggcgtcggcggggctggccgtcgtcgccgtcgtcctctccgtggtgcacatctcgggctcccacctcaacccggcggtgagcctcgccatggccgcgctcggccacctcccgccggcccacctcctcccctacgcggcggtgcagacggcggcctccctcgccgccgcgttcctcgccaagggcgtgtaccggccggcgcggccggccgtcatggcgaccgtgccggccgccggcgtcggcgccggcgaggcgttcgtcgtcgaggtggcgctcaccttcgtgctcgtgttcgtcatcaccgccgtcgccactgacccgagctcggcaagtgctcaatctttaatatttttcatcttttaccgtgcaattgaagagaattttggtcggataatttcaaatttggagatatttggaatttactctatttgagtaaattgcgctttgcaccaggtaaagtgcatctagtttcactgtatgaaacaaatcgaaattttatcaaattttataaaatatggatgaaactgtatgaaacgcggtctaaattaaaaaaaatcacaagtttctctcatggtttataagatttttcaatagttatatgacacaatcttgtgcaaaatggaaattattttgatatacttggtgcaaagtgaaaatctatattactaaagctaaacgggtgattgaatcgtactcacattgggagggagaaccggagatgttctagagaatacgggaaaaaaaaaacttcaggtgggcacacacctagccctgacaccccattcgcgtgcgcctgtccatggcatcgctaaccacaagcgggtccagctgaagcccaggagccccgatagccacctgggccttttgaccatagctaggtttgctagcaacctagcttacgcacacgcatgcatatatgcaatatatgagaaagaaataatgaactgaaaaacagaaatcttaagtgggagttaaaaaattagcacacgccccagttaacacccttccaaattttgtgtttacaaggaatgtcttttattccctttgagagcaatatttgacatctcctattctaatagagaactgctacatataccatgaaacctcttacgatcaacgtatgatgcatgtggcaaatgtggggcccagcatgtttccatagcccaatcatacgcatgcaagacatgatcgtaaaaaaatcgtacctattctatcgtatgcatagcaatttccattctaatattattgtcatccattcattattgttttctccgtatttaaatatatgacattgctaagatatgggcataatattaaacaatccggcactaaagaaaaactataaatactttattcttaaatattctatatgcgaccacacataaaagactattaagtacttcttccgtttcacgatgtaagtcattacattgtgaaacggagggagtagtatatacaggctataaaatagaaagcgtgtcaggcacgctaactttctagtatatattaaacctggtgcaaaatgaaacaagaatacattctacccggtgtaaagtggaatttactcaattttgtttgaatttgtgcagagcaaggagctggtggccattgcgattgctgcagcgatcatgatgaacgctctcgtcggagggtacgtacgtgagaatgacaaattaatcataattttaagctcattacatttgctttatttggatcaagaagaaatgctaataatatttgggaattattcaggccgtcgacggggccgtcgatgaacccggcgaggacgatcggggcggcggtggcgacgggcgagtacaggcaaatgtggatctacctcgtcgcgccgccgctcggcgccatcgccggagcagccacttacactctcatcaagccctaatctcatcttaatttcttctcatttcttcttgtagatggtggtgaatgtgttcttgtgtagtattaatattaaattagttgtattttttcgattgattctagtattatgaatggttggattcttacatttcagcataacattgatgagctagttagtggtgatatgataattacatgcataaccaatctcataatgcatgcatttataatcttgtggttgttatttctggagattgggaactaccagatggtgatttgtcagtgtgagagacagacaaactgatctttcaaaaccaggaaacaaaacattatcgcaacatgagaacatgagagtgttaataacaacactttgaatcgcatagattcagtgagttgcagttgtacgtttaaaagaagcagaaggatagatgtattaaacacatcaagttgctagttgatggacaacgcaaatatttccttaaaaaatagagtaaatttcacaaaactacatgttttatagtccaaattatagaaaactatatacatattgacacgtggcactcaagtacatatattttggtagtgtagttncacaaaaccacactatccatgaacagattcacatgtaagatgacataattg

SEQ ID NO: 2700 - DNA, 5119 bp, Oryza sativa
gtgcgatggctggtaataggatgccacgttcttgttctaagtggaacacccacgtcatatcacggctgaatccattaattgatagtgtggttttgtgaaactatactaccaaaatatacgtacttaagcgccaagtgtcaaagtgtgtgtggttttctacaatttggaccacaaaacatatagttttgtgaaatttactctaaaaaaatgaatgtacaaatatcagaccaacccaaaattaaaattacattggtggcatctgcactacagcatttcctaacatgccacttggtcatgaataaaaagaatttgatgtatttacatttggctgaaattcatcgatcggtaagttccaagaaccatggaactcctgctgcaaaagtactccctccgtcccagaatataagaagttttagggttgggtatgattattaagaaagtaggcttcttatagggttggatacgattattaagaaagtaagtagaaatgagtggtagagggttatgattggatgagtagtggaggtaggtgtaaaaagtgaatgatggaggatggtgatggatggtgattgattagaaagagaatgttgatggacaatttgttatattttgggacaaatcctgagggctaaaagttattatattttgagacagagggagtacatcgtttcggttagtcacaagtatatatatatacagacatatatgtacctagaagaaataaatttagtaatttgcatgaatctctccataatttttgttctacgtgtttgtaactaaagtttattccaacatatgccccagtgccagcaattgatttgatggcaaccctgttgctctcgcttggctccattgtcggcacaccaactgctgcaacactaccattgctttccttctcttccctactcatctcaaaggccatgagcaatgtctgaatttccgaacttggatcagtggtgtggttgatgtttggatgaacagcacggtgcagtgaactgtactatatactgttatatgacactgttgattttcgcacaaacgtttgacccattcgtattattaaaaaatttagtacaaatatgttaaagtataagttaggattatactctatttaatgataaaataagtcactacaaaataaattatatttatataattttattaataagaccaatgattaaacgttatgtaaaaagttaacggcatcatacattttaaaatgcacggagtatatttgtgccttgacttccgcgcactaagagcgagccgtgtgtggcatgcatggtgctaactgttaatagttgataccatcaaagatcagaatttgcagcggcaggcagacaccggctccggatcatcgtctgtctgcaattctgcatccatggtttttggaaaggcaggatttggcaaggtcaacgcatgcatcctcttggccttgagttcttgcatagaagcttcaagctgctgctggaaaattatccctctaacagcaaggtttaactaataattatggttgtatcaactctctaatccagctttggtttgcagggattgatcaattaatataacaagatcaaaagagaaaaattaacacgttttttctgctaaaccaacaggtcaaacaatctcatctacagctaactgcagaatattaattcaaacgttaatcaattaattctgtcttaaccagagatcaattcagagctgacgacaacacacaagaagaaatactataattatttgacagatatactacaacaactggtgcttctcatttggtgctcgaatactcgagaagagggtaagttgacattttaatttgaacaattaattaattaattaattatatacttaactaatcacattgctcttcttccccgcggcatcccaattccatttccgcttttccgaaatccatggatagattgattcagcaggtgcttcggcggccacagcctccccgtgcaaattttcagagttcattggtttcaaagattcaaatcttttttttgcgcatgcgtacaccgagctgtatttcataggcctatatatacagcatccctcatgcagcatgccatgctcatctcatccaagattcagacaaaaacattcttttgtctacaacaagatcaagaaacccaaaagctaagcattagctcatccatcttaatccatcagagttgattagctagtagttgagagttgattagtagcttgcctttgaacatggaagggggcaagatgagcagcatgggcatggatgctgcttcagcttctgttactgtccctcccatgcagatgcaggcaggtgatcagagcaacaggatcgccatcatcatctctccaagagccgggagctccaagatcctgccattcgagcttgtcaatggtgccgccaatgccggctcgcaacggcacgctgatccagcagaatccactcctgaagctcatcatcatctatggcatccagtagacctcccaaagataaaaccaccagttcctcttgtcaagaaggtactgaaactttgacagaaaacatttcttcagttcagagtatttatgttcttcagatgaagaagctctgaatttgtgacaatattgttgcttcaactttcaggtgggtgcagagttctttggcacattcacactgatcttcacagtgctgtccaccatcatcatggatgaacaacacaaaggtgtagagtccctcctcggcatcgcgacatcggcaggattagcagtgacagtactggttctgtcactcatccacatttcaggctgccacctgaacccggctgtcagcattgccatgactgtctttggtcatcttcctcctgctcatcttcttccttacattgctgcacaaatcctcggctcgatcaccgcatcgttcgccgtcaaagggatgtatcatccggtgaaccccgggattgtgacggtgccaaaggttgggacagtggaagcattcttcctggagtttgttacaacgtttgtcctactgttcatcatcactgctcttgccactgaccccaatgcagtaagtaaatttcctagctacttttatcacattttattcctttttcttgtatctctttgtctgaatttatgttgtgctcgtgtgctgatgatgttcaaataatgtttgttcaggttaaagagctgatagcagtggcagtcggagcaacaatcatgatgaacgctcttgtcgcagggtatgtacacatagatcgattattattcagaaatgatccgcatactaaacatgcagttgttttctaaaaaaatattaaacatgcagttgaacacttgttaaactttttttttaaaattaataaaaacacttgttaaagtagccgtgctaattaattaggttggctcatttttctctttttgtatagttaattcctaagcttaattgtttctgttttgaatatttttggaacaggccatcgacaggagcatcaatgaatccagcaagaacacttggcccggccattgcaacagggagatacacacagatttgggtttatttggttgctaccccacttggtgctgtagctggagaagggttttattttgcaatcaagctgtagttaccttcaggcaagaacaatattcaatcgtagaactagtgtaaaatcggtgtgtgtgtatttgtatgtgcagttataacataaaaaaatgttttcctttttgcagggaaaaaaaagtgatcattggagcatgttaaactacctgaacttaaatacagcacattctttacaaattcatgatattgatcaagcagcatgttaggactgcctaagatgtagatgtatacacaaagtagtagtgatgatgaattggtggtctctcttgtactgaaattgtacagttcattttttttcattttaatgtataaataataaaatatatacagttcaatttgaattgctagtattcatattcctccagtggtgggcagtttatgttttgaaatgtactccctttctctaaaaatataatgtgtgtatgcttttattaaaaatcagcatctgcaacttttgattagtgatcgaactaacaaaatgtttggtgccgcgcatactattggatttttgtacgacattaattccgcaattgtcaatgatccaagaattacaatgttacaggccctactaaaagctaatacgtcttatatttggagaaggaggaagcatcgaatggggtgggcccacttcaattcatgggtattcaaatgaatacccaagatttttgcacaaaaaatacatatatgaagtatatattccatatgcatatatgaaaaaaagggaaaaaggcctacctattcaaaagaagcccaactaaaaacgatttctatccctcccaccatctttctccccactatttcaggcccattggccaaataaagaaaagcccaaacatctaaccctatctctccacctcaccaccatccaactctcccctcccccgtgacagccgccaggctgaggcgtcagccgcccgactgcccggaggagacgacgcgccggcgcgccgccactcgctggtccgcgctccgccgccggcccgcccgaggagacgacgtgccggctgcctctgccctccagcctccagcagtccagccgtcggccgccgcgtaggcgcgcacggcgccgtcggcgccttggcggctcgggcgctcggcgcatccggcatccccctgcggcgcccgtctccatgctccagccgccgccgcccgccggtgcggcgccgcggcgacgagttgccgcctggcgcctgcctgcctgcctacgctccaccgaggcaccgaccacggcagcctgccagcccgcaatcgcaggggcgcagggcgccgcgccgcgtcgccgccaccggccaccgacctgccgttgccgtcgacgacgaggtgacgaagtcggtacctcactgagacaatgactcactaactcttccctagttggctaagtaggaactttggattagaaatttatgatttaattcatacttgaatgactgaatgtctgaatctagcatggatattgttcatacatttttgatttaaaatttgaatctaggaatgatttatggttatcaactgaaccgctatattagtgat

SEQ ID NO: 2701 - DNA, 2212 bp, Oryza sativa
aaggaatcggtcaggagggagaaagaatgtgttcagcatctgctcaatgcgaaaacagaggtaaaatcgatcgattcagcacctgatgtttgatggattagtggattgatgaaattgcatttgtacttcatgacaggaattgtcaaggaagtcatcagaatgtggcaggttgcaggagaagggcctctcattggcgaaggaacttgcagcattgaagctgtatgtttgttcatttccacctgaaagatgcaaatgtttgtgtttgataagtggaatgtatttagtttttagagtataatttgttttgtccattaggtcgacagatatgaaccttcaggaggaagagatccttaagttggcatcacttggtaaccatggaaatgctgcgaatgcggttgatgttttgacgagatctcttgctcttcggaacaagtaaaatttcctctttattatacttatcttgaagcggtgtgtttatggttaattgcatgcctttaagcataattaactgatgatagggtttattaaccacttatgtacttgttatgctggtaatagttgaccaataactgaaagcatgctatctgctttagctttctgtgtcgaatagtatatgcaaatggatgcagagctttgtactttatcgaagtgtgaggttatcaaacataaattgtagtgagtgcttgtgttacaagatttatgggggttttatggtcaattttgagaatgaaataaacattctgataagcgaaatagtttggattgtatattgattagtgatggtaataggctaatagcacttacagaatgtactgagggatgcagatgatttttttcctagtacaattagatgcacatactcaacacacaatacaatgcgcacacataggcatgcaggttatatacaggccaaagaacatacttaacttcattgattgttcaaccaagctgttctctatgccaattggatgtgtttaacactagtgaaaattttactgaacatgatgaagcttaataaggctactgctccatgattggaatgcttcagtaacacgttattttccctctaaaaaaagtaacacggtctttttaggagctacaaagaattgatgatccaatgcaatgttctgggaagatcagaatctcgttcccagcagaggtttgagaaggcaaaagaactcattaagaagttaaaggtaagtccatacggggggtatctttttgctggatgtgtattttcagtgcagataaccctttttaactacaggcaagagtacaagaccttgagaaggaacaagaagaaaaagaaaatggtgtgattagggacctgaggtctgcaaagaaatttaaagctgaccagacaaattcaggaaataccacagttaataatggtttctcgggtcttgctgctggatgtggagattatccgatgaagctcgatgaagtggtgcaggatccatgcgacaagcctgggccatcacctgaagctaaaaatgacctgaatataaaagacaaaatggacgacaagcatgcggatgtgattgacttagatgctgatgattctgtcttccaacatgaacacaagaaaggactttctgccaaaccatttgggaacgatggtaacgatttggatttcaaaagtcggtctagtcttcaagaacattataggaaggaatccataacatgcaagacatatgtagcagaggaaaattcctttctaaaaccttccatggtaactgaaagatcagcacttcaggagagctttaccacaaacaaacttcaaagctttcaagaaactcctgttctaagaagtatgaaagctacaacttcgacatgggagaaagaaacactgacgattgatggcatctctaaacaagctactagaatggctcctggcactggaccccagcaggttcacaatttcaattctctttcaggtaagttattgtatggtccatcaagcagagataacttctgaatttaagttgcataataatatgcatattcaagttcacagggctatttttcttttcaacattctaattttcagggggaagaggcatagaacataaatttgaccaatatttctaatgaatgagtacttgattctgaaaaaatgcttaacaaactttctgtttaatgacctccttttcttattaccaattctttgaatatactgatgttcctttttcagcacatgtacttaacaaca

SEQ ID NO: 2702 - DNA, 7270 bp, Oryza sativa
  unsure (1)..(7270): unsure at all n locations
cttttgaagttgcttatagagtaagacgtgcatgtgtacgttcaatagagtgaggatgtgtacgctgtgaacacctgcgatgcattgtactgtgtttcttaaaaaaaatgttattacttggacgacaggtaatgtaaaaacgaagccaggcctactgatactaacgatcacggcccatcaacgcacgtcgatgcccattcgaggccatcaacacggcccacccagaaacggccgcatcaatccgggcacgaatctcgaggcagagccccaccgccttccgcttcgcttcgagagccgcgtagcgagagacaaaaacccctctcgtcctcctcccgccgccgccgtctcgacctcgcagcctagggtttgcccccctctcctccttccagaagcttctagacgctcgtggggggagcatccgccgccgcagcagccatggcgtccaccaaggtccagcgtatcatgacccagcccatcgtacgctcctctctttctcccctcttcctcttcttccccctttggtctcagaagccatggattgtttcagctgtatttttcctaatatgtttgctaatcttttttttggtgtttttctccttgtgattttggcgggcgtcgtcggtggcggcagaacctcatcttccggttcctccagagcgtaagtgaattgggaaatttcggtgttttttttcttcttttttttgactgtcgacgtgtggttggtttgaaattaaccaaatttgatttggtggtgcagaaagcgcgcatccagatctggctgttcgagcagaaggatctccggattgagggccggatcattgtgagttcctaagctgatctcttattcagaattttagattttagtgctattcctctagttgaacacacaataagcaatggaagtgcgtgtagtatgaagattatgaatggggaattcttgtaggggatgagttacatagatatatatatttttgaggttaatgttgcaacttaaatcctaaagagcctaaccagtagagaacaaataagagaaccctatagtaagtgcggagcacatcttttggtctgttttgttgaaaccaaacatgcaaatgcatctccgcaaattgtgattccttgggaatccatatgagcattatcgaatcttctgctgatgttatcagtcggaggctactagtaagctcttaatttgatcgctaactgatggcatgagctcagtacactagaagggtctcaacttaagctagatagatgttattagacaggccaatttcaaaagctgaaacatatcgagattcagattttgaaaattaacaaacaactatgcttatatgagttattgtccttccacttgaaccccggaaaaacacacctttttccatataaaagctaacttttgtctcatcagataatgattgaatttccgcaagatgtcatcagataatgattgaatttccgcaagatgttttctataatgtgtccatgtagggtcataggcattatctgagtttggaagagctaggtttatatttactttgattgccattcagactagaaggaaaggttttacagtgaatgccaatcatattgtttatacttatttggtgtttcagtgtttgcaatagaattagaaatgcagtaatgaccagtagctgtattatgtcattgctgaattttctattgtcctagatgaaatagtcctatgggcaaacggttatcccaaatctggcgccacttgcaggacctactttgtagcttctagtgttggctaaatatttgttcttcagtgcagtactcgctgattaatctatcatttgacgttaagctcatgagtaacttggatcaacctgaaccattgggccactattacataggattatctaacaatactatgtacagctccaggaaccttaaaaagctcatttgttttactacttgttacattcttacccttcacctttttatataaccattttagatgacagtataatgcttatgctatgtgcttggttgccttcctgttgtttcatggtttgctgatgtggcgtatacatattttttcaatttctttcgtggtttgctgatcatttctttccatgtctgaattgcattgaaataccattctgcgaataaatttaaatttagaattcgagctaaagatgtggcttgttctttgtgagtgttactgtacgttcaagagccatattcagtttgaatgctttctcagtatgtctgtgctggtttgcatgcatatatggagtatttacgctagctgtatatgtttggcagggctttgatgagtacatgaatttggtccttgatgatgctgaggaaatcaacgttaagaaggatactaggaaatcattgggtcagttaatttgcaacaatatttgttactatttttaattaattagatggaacattctgactataatattgttggaaatgatttgcaggtaggatactattgaaaggcgataacataactctgatgatgaacacgtaaggattatcattaaactcaatatctgaactcctgtaattgcatgtgacgtgttctctaacatctgcaatttcaacttctgcagtgggaagtgaattttctccccaaggttggcgtttgtgactttgtgtcgattagtcccgtgatactttgtactccatctagataatcagagaatgaaatgcatgtagcatgtcatcgtcatcgtcctcaattgaggatatgtaacggctgttagcaacctatgaactctgtgaactctaggcaaggttgttgagataatgagttgctcacttgtgtgtttaagattcctgatcccgtgaatcaatcctgctcacttataacacggacaattggagcaattcttgttgtacctcgtcttcttcccgtatctatgttatagatagtcttgagcatgaatgcatgatcgtgaattactaaaatgcaggatgaacacatgataaacatatgttatgcacagttctattagggacatggcattactgccatattgcttgaaaaggaaatctcatggagatcttgttgatgtcttctgtttatatactgtgttgctagagatatggtgagttgttaagggaataatccatatcgtttaccccctaaagctcaataaaaaccaataaaaaccttatggtgtgggttgatatttcggatctgtgaaataatcaaagtttttctctcacactctctacatgactacacaaattagtgaattaccgtggatctaccattgtgaacttgaactgtgttagataaacatcacgatcatcatctattattgaatataaatctaaattcgcacgaattttgaaatcagagctcaaaaacgtaccctaaacatgtgtacaaaatcacaattgtatatcacatggtaaaaaacattcagaacgccagagtacaaacaagctaggatcaaaagagggagaaccacttggttttagacttgttcttgctcatcatctccttcctcttcctctccctctccttctcaagtttttcttcttcttcctcctcctcgtcctcgctactgacgctgctgctcgtctgatccttctcttcctcctcctcgtcgtcatccttcttggtggatttcgccttgccggcgccggccgtggcgacgtcgaaccgcgcggcgtccatcgcccaccgcatcaccttgtccacctcgtcgtcctcgtcctcgtccgactccccgcccagatcctccagcctcaccctcgtctccttctccggcnccgccgcccccttcagcgctgcgaaacgcgcctccagctcgtccatcccgccggcggctgcggcggagggagcatcgggttgcttcggcttcggatccggcgggcggtgagacctgagcgcgtcgaagcggcgggcgaggtcggcgtcgaggggatctgcggcggcggcggcggcggggtggtcgagcgagggaggaagattcggagcggtggccgaggacgacgaggagacgaggtgggagttcgcctgcagcttgagcatcaccgcgtcctgcgccgcgcggaggagcgcttccacctccgcctcttcgccgccggtgacggccgccttccggccgccgccgccgccgctcatcgtggtggactcgtgggtgggggacttttttctaatttttctccactttgtttgctgctttaatgacagtatggtgggcccaaaaattgtactaggccaacatgagtagagcccaatttagtgatcaatgggccgggccgattttacggcccacgatgccaagctattattaatcccagcctaattctaatccctaccttaattaaaccatttttccccacagaaaaaaaatattattaactaaacaaaaaccatcctgctccactgtgcctttcaatccacgcgtccgtcgccgtcgccgcctcgcgcgcatggaccaccacccgccgccgccgtcgccgccgcgggactccggcggcagcctcgaggtgcgcctcttctacgtccgcctctcgccgcgggggcccaccccaccgccccgcctcgcgctcgcgctgcgcagcagccgcggcggcgacgaggaggaggccccgacgcccctttccctcccgctccgcctcgatcgccgggacccggcctccggcgaggccacctacgtgtccaccgcgttcgcccgcctccccccaccctcggcggccttcgaggtcgccgaccaccgcggcgccgcgctgctccgcggctctcttcgccggtgccctgatgccaagcccgattcctcccccgcctgggcaatcgactgcatccccgccgcgggggcggaggcggagacctccgcgttcgaggtctacgtcgccggatgctgcgccggcgagcccgccgtcctcacgtgcgctcttcggctagccacccccgaagaacagaaagctgccggcgggttggtccgccgccgatcgccgacttcgaacgtgagtatattttaattaaggttatgatgcttgattttatccattagtatgacttgttaacgaaatatctgtgatggacaaacaattatagcaacagaattgggtttctaatatgtttataattgtgtagacttcagaatgtggctgtgtggcgtgaggtcacaagcaaagcttatcataacacaaattggtggacttttgtcctaattcttggctgtgtgaaaatgtttgtttcaatcctgcttatgtattttgcttgtaggttcaaagttactcttaattagcaggggaaccttgttgttatctatactgttgctgtcagcagaggagttaggaaatttttcaagcccgggcaaactcaaatatacctaatatttgctacaatatttctaactttaatcctttgaaaaaaaaataaaaattcaatggtgtatttgacggcgagcctgggcggctgcctgtgcaggccgggtggtggctccgccactggttgctgtgtatagtatggtggttatggttggtaatagtagagctatctaatgttaacatgcttttccatattattaaaagaattatcttgactatttgtgtactacaactatagctttcttgtgttaaagacttaaaatacataatcgaactgttgaacaagacctgattcatacttctaagtttgacattcatactgtagaatatacaatgcttacaacaagcttcaactcagcctttggttgtctgtgctgatttttaaattgtgttaaaaaggttgtgaaaaaactatcattctatttggtaaatcagcgtaagatagataattgtttttcctagaaaagtataacaagtggcatatattatgtatgaacggtataattgtggttttgaagtgcttgtctggaagttgaaataggtattgttatacgaggtttcgacatttcacatttgctgataacacaccagttacagttagtaccttaggtttgtaaaatcagtctcttagttcaaatgccacaataggtaatgctggttttggttgatccttgttggttcttcatgaattatatgtggattgtggagttttcttttgacaatgcttgccaagttatggtcaagctagacagaggtcattatcatagcctcatatgcatgctaatgtcagggatgtttggttttatcttctatgactggatgctcagtgacatttgaaatgacaagacattggaaagttagggggtaattagactttcttatagcaaatgcgataatgtttgctttgatcctttgcttgttggatgaccgaaacaagatggtttacgaataaacatgtgctgtttaagcttataattcagacgttatgctcaaattcctattaattagtataaactgctttggcaggctgctggtgatgaagatgtcaatggaagtatacagcatccagaaggttggtactccgacgatgatgacgggcaactcacatggttcaatgctggtgttagagttggtgttgggattggcctgggagtttgtgtgggtgttggtataggtgttggcctcctcatgagctcataccaagcaacagccagaagcctgaagaggcgattcttctaacgccgttgcgttgaatacacaaacttttgatggccggtagcagtatagagttggtttggttctgtttcaaagggcagaaatatcattgtatagttggtggatgtgttgtttatgtgtgaggtgttgtgttgcttttgcttgtgcagtttttgagcccctgtgcatccctctcagttctatgtgaactgtgaatgtcctctgacatgtgaaaatgttctcaactttcaacaaggagaaactgatgaatgggaatgatggattgccaattcagtcatctacgtttgcataaggctggaaactactggaggtattatttctctctctctttgtaatataatgatcagatattgtgaacgaaatggaagtactttagtgaacaactttctactagtacttactagtatttgccagcaccatataattattaacacttctttttttttttgcgcatttcttgtgtttttttaatctgtgcagttaaacactgtttagcaatggcagaatgtcaggattatatatatatatatatatatatatatatatatatatatatatatatatatatatatatatatatatatatatatatatatatatatatatatatattatataaactgaaacaaccactcactgaatattttggttttccgtaggaaattttgtggcaatcgtgtatcacgctgaaatataatagaaaatggaa

SEQ ID NO: 2703 - DNA, 7865 bp, Oryza sativa
aaaggaatctgatcgccgtagggccagacggacgtgggggaaaggtcaaaatttgagagatcttggcaaattccaagtcagtttgataagttttcctcatctccttccttgtcagacagtaaagtagttttgtctcataactaaccacctgcatcaatctctgcaatgtttgctgcaggatagcaagactcaagcactatggcctaaggcacagaaggttggaagcagaggtgggcaatctcagatagatcatttctttgggaagagatgatcctgctgcgcaagctatgctaatatataccactttcaaactcttgcctctgttgctgcggtcaaattctgtttggagaactatttgatgtcctgcatctgtacttgtgtaaaatccattgcacttaaggtgaaagctgaatccaaatttcgcagtgtcatcactattgggcctgaggggatagatagagcttgtaaacaatgagctgtgtaggaaacctgaattcctctgttcctcagaggctcaggtggtcatgtgtaccacattgctaaacattgtgtattgatagagctgaggagataacaggtggcttagctcacttgatccacatgcaaatacattgcaagctgccctttggctaagtctgaaacctatttgggtttcattgtactgccaactactccagcaaagcaaagctgggaatcacaagaaagttggacactgggttgaagaaaatgactgcaagttttccatctgccaaatgccaaatgttctttcatggtaggcactagagtagtatatatgttctggtgttatctggagtctggagactgcagaggctacacaacagctgagcaaaatccaatcatggtgagacaccaaacatgatacctcagtccctctatttaatttgtgtttgctactgctagtgttcaacctctagattcattggaaatgatgtttagtggtcagtggatagatggactactagctgctttgtctctctcccccctctcaaaagtacaagccaatttttctttctcaaattcaaaatagcatgaaactgttactcactcaccatacaaatatatatcagcaaacaagtgacgaatcttcgaatgctgatcttaccctcatatgaaacatagaaaacttttccaaatcttaaagaaaagaaatctctcttttcgaatataggcatctcaccaaaaactcctctgttccaaagatcaattttttttaaaaaaaaatcataactacattcaaaccatttacactcttctctgtaagaaaaagttaagagtagcacgcttcctaaacttctaaatagtatgatttattatataagagtttagacataaaagatcaccttagagaggtgccacaggaagaaaaccaaatgaattacagcattttgaggccggcgtacaatcattaaacagtttgggcatcttcatacgctttgcacatgttaataatggaatcgatcacctgcaatgcaacaccgtgccataatcaccattgaagattctagcatttctttgaagcaataccgtatgattttcttttaaaaaatattttttatatatcaattatttatcacaaaatcatccatccattctttagttcggcatgaagcaaaatacaatttcctagtagagcatatatatgcaaaagatccaaagaggagagaaaaaaaaaacaattcaattctcttctcaactcgacggccatcttcttctttctctctccactccgtcgccgccccttggcctccctcaacggccaccgcgcccctcctccgccgccaaatcgcacccaaccccttcccctttaaactattccacctataaggccgcgccgccgccgccgacgagagagacggccatgacctcaggttctccctcctctctccgcccccccgcaacttcctgaaattgcatctaggtccccctgacgcagcgattgttccctcccttggagaggtggccgtagctctccggcggaaggcggcggagatggcttccacggccgcggcggcgtcgtcgcaggggtgcatctcgtgggcgctgcggcagcgtgggcttggtggtggtggtgcgcgggctgtcccggtgcttccccgccggagattctgcgtctccgcggcggcgggtgcggggttcgacaacgagaatcgcgagtgggtgttttgctctctggttctttgatccgagcctgatttagtgtttttttttctctggttctttggagtgggtgggtgggtgggtggtgtgtccaagcccaagaagaaatgggatgctcatcaggtgtttgatgaattgccgaacccgagtcgcaggtatgtgatcgtgggtggaggcaacgcggccggttacgcggcgaggacgttcgtcgagcacggcatggctgatggccgcctttgcatcgtctccaaggaggttagtgcccaatctggttcagagtttcggaacacgaatttttgctactatgttgattagagaaccgggttaaaaggtttctgtgttcatgatatgaaaatgaatgcgttgtttggtcattgttctcatgtaactgcaatgtattgattggctgatttttttttttgagatttatgatggggtttgcttactgtaatgcaggcgtatccgccatatgagcgaccagcactgacaaagggctatcttttccctccagacaagaagcctgctcgtctacctgtaagtaatcaggacaacttaatgatgataagtagcatttgttcatgctatgctagtaggtgatggtgtgggtgtgcgctacctaaggccttgcctactgtaaatttctgtatgatggcttatttggacttcagtgaagtctgctccagtttgttggcattacactttctgtagtgttcttttagctgatatgagagatttgtacgcttcacactgaaccattaagggtacagcccaaagccacccatttaggcatatagactcaaattcttgagattcgtcttgttgcagggctttcatacctgtgttggatcaggtgggcagaggcagactgctgaatggtacaaggagaacggcatagaggtagtcttgacactattgttaaacattattcaatgtgtttgaaaatacagtatgacctctatctgaagccattgaactcttattaaggtattgtatgaggatccagttgtagcgtttgatggcaaaacacataccttaaaaacttcatcagggaaaattctgaagtatgggtcacttattatttctactggctgtgaagcttcaaggtaaccttcaaacagttgaaaatttatcttttgcaaggcccttatatgaattcatgattagaggtttcatgatttttttcactcagaattcttaagataaacttgtatgctatagtaatcaaatgaaaatttcttcactgagattgtatgcatggaatggatacaggctttatattaaacccagaagttgtttgttgccatctgtaatgttgatgcttcctttcaggttacctgctaagattggaggaaatttgcctggagttcactatatacgtgatgttgctgatgcggattctctagtatcttcattggtatgtcctgtcaacaaatagtgctagatgtttcatgtacaccagaactggattctctcatttgactttgaagaaataatctcaattttttccctgcatattctcaccttttaacatttattgctgaaatcatagtttgttttatctttatagggaaaagcaaagaaaattgttgttattggtgggggctatattggcatggaggtagcagcagcagcttgtggctggaatctcgacacaactgtaagccacagtgtttccttgttcagttttttatgaagactcttatttgtacaagcaattttctaattaaagctgcttatagattatattcccagaggaccacattatgccaagactctttacaccttcccttgctaagaagtatgaggaactgtatcagcaaaatggtgtcaaattcattaaggtaatagcttcgtcaagttcatttgtttaatttattttgtcaacatatttgagctcatgtatattttgttccaaccagggagctcttattgataaacttgaagctggctctgatggtagggtgtcatctgcagtacttgaagatggatctgtagttgaagctgatacagttacgaccttcttcttcttcttcttcttcttcttttgtgcaaatatcttgtttcatcatcttaattatttgttgctcaggatgaaagtatgttatcaaaaattgccttgaatatttgcatatgctgtggattatcaaatattgccttaatcatgagtcacatatgttgaggagtggtcaaatacttggcgagctgatgtaaactaagtgaagatcagctcattccaagcagcatcactgagacatttaaactagttttttttttgttatatttgatcatccgtgcagtcactgacacttctaaaattattttaacaagaacatttgtcaattcaggttattgttggtataggagcaagaccagttattggcccatttgaagctgttggggtcaacactaaagttggtggaatagaggtttgttttcaattattgatgataaagttaatgaatcttgttttattctcatattagtctgtagttgttttacttttgtactagtagtctgcattctgcaatgtgatctatggcagttattcctggaacaaaaaataaaaaaccactacattccccatgaaatttccgagcatctgtgcttgttttgatcttcatgtgcgaaacttgagtaggatcgattttacagcgcaccaactgactcatatagatgattttttcagttaaagccttggtattgtattctttttttgctttggacatgttaatatgttatcctacacgtgtttcatagatgtttggcatcctgataatcaattgctatatcttactttctccgtttcatattataagactttctagcattacccacattcatatatatgctaatgaatctagacatatatgtgtgcctagattcattaacatctatatgaatgtgagcaatgctagaaagtcttataacctgaaacggaggtagtatttcttaatagagctaattaagtacttcttttacaggttgattccttgtttagaactagtatacctggtatctttgctattggagatgtagcagcttttcccctcaaggtaggagctcactgcgtttatcttataatcatgaagaattggattccagaatatgatgttctgtcaaattctttggcagatgtatgatagaatgactcgagttgagcatgtggatcatgctcggaagtctgcacaccactgtgttgaagcactcctaacatcacacacaaagccgtaagttaatgggtagaaagtgtactgcattagttcatctgctagtgctgctttaatttgccattacgatgcaggtatgactaccttccatatttctattcaagagtttttgagtacgaaggaagttcaaggaaaatttggtggcaattttacggtgataatggtacagtatataacataagtaattcctactacataacgcatgtcctgttagacttcaaaatcacaaactcaataccctctctgttgtgctgagcagttggcgaaacaattgaagtgggaagctttgaaccaaagattgctaccttctggattgactctggtaatcagttgtctttcactctagagtatctttgtactctcatttgcacatcttattacctttgccttcttgtactgtgcagatagtcgactgaagggtgttttccttgagagtggtagctcagaggtaataaactactggcataacttctgtcataacaaaatactacctccgtgcccaacgtttgaccgtccgtcttatttaaaaattttgaaaatatttagtcacacataaagtattattcatgttttatcatctaatagcaataaaaatactaatcataaaaaaatttctaataagacgaacggtcaaacgttgaacgtgaatagtgcaaaactgcacttattttgggacggagggagtatttgcttatttggatctttcttttctgttcctttgaacttaattctgaactgcaagttatttgactataagcagcatacctagttctgatgaaacctccaccatatttcaggaattttcgcttcttcctcaactcgctaagtctcagcccgttgtagacaaagctaagctcaaaagtgcaacctctgtcgaggatgccttagagatcgcaagaagctctctccactctggttcttctgtttagctctcaagcatctagaaaaattcagtttgtgtcctgttacatcttttaaaacaccgagacttcaacaataattctccacaatcccacggcattcgtttatgcgggattgtaaaattcttagatgtacctacgttcgcatttccaatttgaaataaacttggttgccctttgaggggtttgataaagatatgataatgaaacccatggaatgttactttctctcattctctccaaactgttgttaccggttaaagaaggggtcactgtaagtggggtcagcatcctggtagaagtttaataacgggtctgcataccatggcttgtacgaaaggacgatttcgttttctgagcagtgcttcactgatattcttgtttatgcagtttatatatatatctaacctacacaaaaccaggaattgttgtcctagtagtattctctgtactagtttatgacaaggccaagcccaaatgatcaccatgacaacgtggtggaattattcttgtgtcatttatttaatcatggctcatgtatctgataaatacttgacttctcttattctgaatcatactactgcatttttttttgttctatgaaatggtcatgtactgcatgtgagcagagttgcaaatggaataaatcgtattcatgcgaacagagtttcaaatggaagtcaggcagccaataataaatcgcattcaaatggacttcgttgggttcatacatccaacggcttcatagtttaaagaccacaattaatcagtttgcttgttctgcagcctagctttgttttctgctgattattgtaaattaagaattattaatcacctgattctgttagtacaggcacaaataacgctgtcacccgcaggacttgaactgaaattgggattcaagtttttaagttacaaaacatagtaaactcgtattttcttcctttattataaggttatataatcacacgtgcttgatatatttttattctggtgttttcacaaatattgtttctgctggataggttatgggttggatgctgatatactagtaaaagagttgatttagataagaaagaaattacagtactctacaaacaggcaattcttgcaagttaaaacatgttgatcagttcatatgcatatgatccataattcaatataccattcaatatctatggcttggttcaagagaaagtgttgtgaaatttacactccaatacctccatacatgcaaaaatatgatgtgccatgaatcttccttacattactatcattttttaaaaaaaaaatccttggaatatgcacaagaatataatctatttgaatatatgccttcgtcacatccaatcaaactcttcctggcaggaggccacaagacaatgcaggtaaaacactgactcaccattaatctccttgttgatacactatctgattagcttttcatccagatattcctcatcatattctcctaggctctaggctcagacaaatgcttccaatgcagcactggactttggtgactccttgtttggactat

SEQ ID NO: 2704 - DNA, 1696 bp, Oryza sativa
agtggaattgtatgtgacacctgacatgcatcaactgacaaattctttgaagcatcgattcgatgtgtacataacgtgacccatatttgtatgcacgcgtgctgattcattacagatgtgaagtagtactaattcctggtgtatatgcagctagaaaaattaactgacagtagaagcagatggctgaacaaatgctgatgcttttcacaagaaatggtgatactgatgagatctcaagctgctgaactgcctcagtactcggcagctagtagctagcccaggttaaatgtttttgtgtggatgatggaattgtggtaaaaggaacatccccatcaaaaggaccaagcttttctttcaaacaaatcaacatggaattagatcgaacaaaaagaaaaacaaatgtgtccattggttggttggttaatcctgtgacgactaagccaccagttaattaaccagagcagcatgcagatcagctgggggtcggacgaaataatgaaagaactcgttgattaattacagatcgatggatggacattattattagctaattaatggcaggaactacttgtgctgtaaacgagtgccatgacgtggtcagtagtagccgccgccgccggcgatcgccggtgcagctcaacaagatcatcctcgccgtcgccgtcgtcgtcttccctgcagcttggtcgcagtgatgagcaccagatgctgtctctgacatttttgaccagcaagaagggaggaagaagctgccctctgcatgtcagttccacctggttaagatcaagatcaaccacacgtacatgattttttttttattttctcacacaatatatacatgcatgtacatgtgctacaacaggaacaaactaatatatagagctaattaatgaacatgcgcatgaacacatgtgcaagtactagtaattaattaatctctttaattatattcttccatagttcattggcatgcatgtggcatatgaacgtaaacatgcagatcaacgaagctcacacatatatattattacaagctactccgctatgtttcaggttataaaatgttttaactttggtgtttgactaagtttataaataaatatagtaatatttacattaccaaattagttttattacattagtaattaaatatatttttataataaattcatcttgggtaaaaaaatgttactatttttttctataaatttagtcaaatttgatgcagtttgacttttaccaaaattaaaatatcttataagctgaaacggagggagtactattctatatataccctttggcattaattgcacatcgcatatgcatatatatagtagtatatagcacgcatgtcgccttcacgttgtgatagtttggagaagccaatcagctattgagccactacacttctaggcaaaaatccaagggaacaaacaaataaaccagtagcgaaaacaaattattacatcctctccgtccaaaaaacaacaaaaaattataggcacctctaattcactaatcaaaatttatctaaaaatagtatatttctaataaagcagagcacaaccaattaattagatgaagatatcctatctcatgccctcccacaatattaagtggcataattgcctcaaccttccttttattctatgcatgctattatttaggaataaagtacacatggcatattgatacg

SEQ ID NO: 2705 - DNA, 8623 bp, Oryza sativa
ggatgaacatacagacttctgaaagagtcaaccaggatatatcggttgtcatatatggcatgacccatcaatgcttaactttagcacatggcaaatgctgcatatatagcttaattagtgtgaaacaagtattttaattagcaactagtaaatcagtgtatattactgtatcgatttatcttgtgaagatcgatcgatccggccagagacattggcatggatctgatcgatcgaggtcgaattatatttgcgatctatctatctatcgtcgatggcgccaagaggaagagccaaatgtagccatgtgcgcgtgctgcccgtatatatcaatctatcctcgctagctccttgctatgcatgcgttgccggctatatatatcgaccctgatgatctctcttggcctaatatatatagctatcctagctaatctactctacctaacctagctaattggccggccatgcatgctgcagtagtacgaacgtgccagccttgggaaacaattttagtacctcgtgggatgttccctaacttatattcaaacatgtaaaggcctgcttatttggtgaaataaaaatatttaggtgtcacatcgtacgtttgaccggatatcagaaggggttttcagatacgaatgaaaaaactaatttcataactcgtctggaaaccgcgagacgaatcttttgagcctaattaatccgtcattagcacatccgggttactgtagcacttatggataatcatagactaattaggctcaaaagattcagttacgattttccccctaaatgtgtaattagtttccttaacttatatttattggtccatacatatgtccaaagattcgatgcgatgtttttgggaaaagtttttggggaactaaacagcccctaacaccatcaaatagttatagaaaaaaagaatcctctaatgttaaaatccaactcacacatttataaataatacttcctctgtcataaaatataagtatttttggacttcgatactgtcttcaaaatactatctactttgaccaacaatatctataaaaatagatgtgtcttaaataaaaagagctgcatactatgataatttgtttaacgataaacctagcaacatcaatttacaagattgatttttttattttttctattaatacttaaggttaaaaatatttgatttgtcaatattcaaaaataatgtaaggagtaaataataataataataagacaaatccaacattcacaactgaacttgtcttttgtttttttgtcttctcggtgtgtaaatcgagtttaaataggagtaatagataccatgcacttcaatacttcatattattatattttataaagtttttcactattattttaattaaaataaataaatatgaggagatacccgtcttgagatagcaacatccatgcatgcatgctatagcctgccgatcaagacaggctactagctagaagaagatttttcatctggacatcctttattttgttacatgccatctaagtagtcataaaaaaataaaaattaataacaagaatgattaatatatatacatggtaaaattcaactcctacaagttgtagaaaacaaattaacctgtatccatagtcatatttgttatttttattatattttatataaatcaaaattaaatatgtatatttgtatagtgatatgtgttatattaatctatcttgttaattttataaaaaatattataactattttcaatgatatataagaaatgatgaaatattttcccgtgggttgataacgctttcgcgtgctatagctactacgaaacctttgtcgaaactactggtggcccgtcactcaccgcacatcaatcacacatgaacagcaatctcgatcgctgcctgtctgcctgtctgtctgcatacgactatgccgccatatctgttcatcttcttactgcagcactactgctgcacaggagaaatcaacaacacgattagtgccacagtaccaaatgccgatcgatatctcatagaggttccaaactgcaagatccatcgatcgactaactttcgagcttaactaatgacctgtactcctagatagttagactgacaaaattcagtcgtccacaatggatgatatagccagtcaccgacagaagctgcagtcaatatgtacagaggaacacaacagccacacctggactgtcagcccggcctgaagttccttctgtagccttttttcgcccagcatcagtactgccctgcaaatgggacgcatgtcttcacagcttaatcatcggttaacttgttattaattaatgttaatacttctgcatgtgttgatcaaagcagactgaactaaagcagacacgacatgcatgccactaaccaaatgtatgcaggagtatagtataatgcacacacgacagactgtttatgagtgcaaatgattgcgtgcactgcaaattatttagttttgtcccattggtttatcttgcttgtcagaaaattgccaatcaatctgtgatttgatgtcacacaatcagcagtactactccctctgtcctataatataagggattttaagtttttatttgcaatgtttgaccactcgtcttatttaaatttttttgaaattattaattattttatttgtgatttaatttattatctacagtattttaagcataacttttcggtttttatatttgtaaaaaaaattgaataagacgagtggtcaaacgttgtaagtaaaaactgaaaatctcttatatcgtgggacggagggattagtaaccttcatccttctcctttttgtttaaaggcagtactaatcttcagaggaaaaaggaacagagaagaacagacgaacgtgccatgggctatgcagctatagcctactaataagtctatgactgggccatgtctctcatggaaaggaaaggtggtgccacagggaaaaggggtgatccatttgtgcccatttaaaaggaactcaagatgagtgtcaagattactactcaagctctagtctgtaatgtgagtgagactcctattaggttcaggatatgaagctcttgttccagtgtccctgctgctcatgcttctgcgtcatgaaggcaaagaagaacagcagccaaggcaaggaaggaggaggaggaggaggaagcaaattgcaagggggatcagtcatggtgaaaaactgaaaaccacagaccattagtagcttctgttgatccctgtcttaatttggaccatgtgcatgtccagttagtttcttcggttcatctctgttgctgcagcagtttggtagttagttttcatgtgctgttgattgctgctgccactcatctggccggccactgtcgatctccgatcttgatttttaagtctttatctagattttgttgatgtatctactatagtcaaataaaaaggcatcattatttaccttaattagagttttgtctggatttcatcccttgatttgtttcaagttactaccttgttatcccccctcccccagcgcattggtaaagctgtggttagctctgtatatttcttgtgctaattaaccagttcatggatgaacacttgcagaaaaattactgagcagctaggaggcgtaattaaagtagtgatgttttgtggatcagtttaaagtgttgtcatgctcaattagcagagcaaataggtgaagaaaagtgtgtatgctaattactgaaaggatgcatatgcatgggggacattggagcacgcctgcttaatttctgaaacattgatctgaacaattaaatttctgaaaaaatgatctgaacaacatgaccagatttcacataagtgctttctgtccgtgcatcatggatgccatgactgctattttcttgcccatgatgatctattaatgctgattctaggattcaaaaaaaaaaggattgctcacatacaatatttgcaacaaagaaagtggcacactagcacatataatggcatttggtttgtgcctaatcaagctagcctagtataatcacttcacaattccctatagtacgtagtttttggttacttgtcacaattgtttcttagcttcatggcttacatatggcgcgccaattattttactacacctacgtattttgtcttgatcttaatatactagtataaaacaaacgagtataaccatcacaagtttttccatagcaaacatcttagaaaatatataaacccaacgttaattaatactacattcatattttaatgtacgacgccgttgatttttttatccaacgtttaaccattcgtcttattcaaaaaatttatgtaattatcatttaatttattgtgccttgattcatcatcaaatgttctttaagcatgatataaatattttcatattttcacacaaattttaaataaaacgaatggtaaaacattggtcaaaaactcaataacctcatatattaaaatacggagggagtaattagaaaaaccaagtcctctactaggaatgggctgaggtgacggtccaagcactagacggcccacaggtcggcgcgccttagcccggcccattgatccacgccgcggacctaggtgagacggcccaaacgcggcccgtttaggtttggggtttttggcgtggggagttggggggcaaagcaagcgaagcaaagcagcggcgacacggcggcgatggctgcggcggcgaggaaggggacggcgacgccgctgggcgcggtgttctcgccggaggagacgaggagggccgtggcgcgggttgccgaggccgtcgccgaccgccgcgccgagctcggccgcctccagggcttctccgccgacaacgccgccctcgtctccctcgtccagaggctccccgacgaggtctcccacgacatcatggtaccccgcttccccttctcccttgctcctctctccgatgagcaccatggttgcgtgtaacgatgcatccgcgagccagtttggtgatgatgtttttttttgggtgttcccgtttgcaggttcccttcggtggcgcggcatttttccccggccgtttaatccacacgaatgaactactggtaagggttcccaccgttgggaatcggagcggctatggatttcgattgtgatggttgatttgtctaaatctcagcatgtaatggttgattgtgtctaggtgcttctaggggaggggtactatgtggagagatccgccaagcagaccaccgagatattgcacaggagggggatggagctggaagctcaagtggaagcgatgaaggcaactatctctgaccttgaagctgaggcgaagttcttcgaatcaactgccgccgaggcttctgtaaggctttcttttcttgtgttgtatgtttcgggcaggcagtggtatgttagtgtttaaataagttaaggtggctataaatctgcaatttcattcaatttgcttgaggtcacttgtaagagaaaaaaatgaatagtgttttgcaacaggccatcattgatatctatgaattcctcatttgcagcaccaatattgtactttgccagctaagctgtcacctcaggcttatcttaggtctttggtatcatgtttggatggtcaaactaaaacgcactaggcaagcagtcaagtggtgcttagcgcctgtatactgcataggcagcccaattgcaatcaggaagaatttggcatgtattcagacataccgtgacagatattaaaatagatgctcaatacacactttaattaatccccatttagttcaacagggaacatgaactattactaacccaaaatcaagcaaggtacttatcctgtaagctgtctagtgccctgtgcagcctgcctaggatcacctagcactgccaagggccacctagttcagccattttggcaaaaaaaaaaaaaaaaaggttctgcaggagggggcccttgctcacagagaacttaacatagtattttctggtgttatgtcttatggaattgtgaattgttcacaaattggcgttctctcttcattcttccgttttgagctttgtttctataaagatacttaatctcttttgcttatactggcaggaaggtcttattgaaataagggaagaatatgatgaagatacagaaataaattcatcaacattgggtaaccatttggaactttcttttcattagctactggtgttctgccttttctatcatatttcagattttcagtatctgtttgatctttcgtgaacccatagtatgttgagttgtaatgttaattcctaatatactattgttgtgagtccttatttggtctaatctcctaaattttatcaagttccaagtaatcttgtgcaagttgatcttctggtatttctccctcgttctacatgcaaatgctggctgttgacagcatcatatctattaagtttaacatatataattaaacattacatgaggacatcttgttgtgttgagatatcattatgatactccctacaagtttctcagtaaacattttgaacttgcatctagttggcaagttgcaacgtcttcttaggcatgactagtttctttactctcactcacagatgcttcaagttctgcttcaggcatgccagacaaagacagggaatatactcaaatcatggcaaggttagatgaacttgaaatggaagaaaatgatgctggtagtacttctgaagaagatggagaagatgatgaggatgacgaagatgatgaggaagatgctggaccaagtgaggatgataaggaagatgaggaagaagagaatattctaattgatgacaatgatcatcataatgctagtttgggtgcctcattttctggaagtggtggtaatgatcagagtcatgaaagtgcgcaggtacttgtttctcaaactgatgtgacatgatattgatgttatcttgatttagttagtgcgcttcattgcaattatcgcgttttaatgcttgcactaaatgactaatagctgaagagtgctctgaagaagccaggaggaagggaaatactgaaaagcgcttcttttgcaccctcagccagcacacctcactcggtttttccaggacagacttctgtaagctcttttttttttctctgtaccttctttattcctgagtgcatggcaatatggcatgcaattacagtgatatatcttccttagctattgtatcaatcactatgctttttgcatttggtgcagacaataaaccctggaattcagcttcctcttaaaaaaggttagttccgatactttcatatgacttactttgggtcacatgcttatttagattatcattgtcaaaagtatatgtttcctgtagttttttttttccatcttgtttctgtaatgttattggaggcagatgatacacattatcccagtctagaagcacctcattcccttgatgcttcatatgttacttttaagtaatataattaccctggtcatgtatgtgtaacccaaatttcctatttgcagctgtttcttttcaagatgataacaggcatacagttggtccatccaagtctcttccattgccacagggtccaaaacactcgagtccaatacttcaggtaccatttgcatgattttgacttcctagtgatgcccatgccttagattttgacatcatagtgatgcccatgctttggaatttttgtcccatagtaacaattatgataatttgatgggattactggttctcagacaatttttggttatatgcccatgccttagatcttcatatacaactgattttttaggaggaaaaagcctgctccatttgtcattaaaaaaggaaccagtttgtcaatctcagagaggttgatacaacgatccttacagttgcagaccctcaataaagtaccagttgcaagtgagaatatatctcagctagcacgtcacatgagtaaaattaaaataagacatgctagcattctaaaaacatactgctaaaattcaaaatgagatagacataaagtctaaaagccaactcccatggactcgtgtgattaggccattctactctggaggcaccagctgttgccctgttggtatgcatggttcatcttaatatcctatcatcagctggcgtgttttatacacaatcaaattgcttatttcatttggtagcattgtgtatttatgatgtgtgttaaatgtgttagctaaagtgacatggcacttgctttacatatttcttatgtcaactgaaatcaagcaccactctggatgcttgagtatgcattttgtccctaattacatgtggggtttatattattctttcagcaccactctggatgcttgagtatgcattttgtccctaattacatgtggggtttatattattctttcattgtgttggtaacgctgattcctgatctttcactcgacaggtttcttcagataaccctacatctcatgatcggaagataatgtcaagtggacaaaaggtcttttgcttttacagggatatatatgctgctatgtcgtttgaaattacgtttgaccttatcttatggctgctgcaggccttcacagggtctattattgaacatgatgataatatttcaacccttcaaccttcaaagagtgctgctttgcagaatgta

SEQ ID NO: 2706 - DNA, 1570 bp, Oryza sativa
ctgcgccccaatgctaggttattttttcaacaaggaaagttgcttattaccatctatagcatcatgagaagttgggctactgcattgcgaccaatccagaactgaagccgttcttcagcaatgtcttcctcaatgccatgagttttagctcttctccagaagtatataagccatgcctgcattcaatatatattccataaatcacacgtaataaatggatgaatttgatagttcacatcgctgaaaggtttacctgcttaaagctaacatcttctgcctcttcatggctaagatctgcaataggtcaaaaagttcaaatttaatttaaactcatagaaacaggatgaaatgtttacatacaacacaagctcaagctgttagtggaagttttgcataaatctattagacaaagggaagaaccattaccaaacgcctccaagaatttaggttcaccaggtgatttaaaatctgcataagagaagaatttatacctttcttagtttttttttatgagtgaaggcagcaccaatgaagaaatcatattacgcatgtaagttaaacaagaatgatatgaaatgataaaagaagtgcaaacctgatgtgaattgccgaactatactaggtctccggtgttgaccaagtgcaaccacaacagcatcttccacctacagaacaataactagtgaggagagaagtgataaggaagcctagaaaaaaaaacctgtatttataaagcacatatggtttgtcacttgtccaaacatgcaaatatactcagtacaaaaagaatgattacttagtgctctattacagtggaagtaaggtaaagcctggcaaatactgttcacacttccgtatttcagagaacactccataaaaaaaaactctagaggatattagaagaattactgttgtgccatttttgctgtaaatgttcgtctctgcattagaatgagtacaagtactgtgtctggaatttcatctctgagaatctatagaacagaaagttaataaaccactgccaataaaagggcagtggaataccttcaatgatgaaagctctctaagccccatttcaactgagagcatgctctctatattgccttctcccattacatcactcatatctcgcacaagtttatttctcctttgggcgtcatcctcacctgcttgaaaagatccaagaataattaactggagtacatggaacaaactacgatctacaacttgtatattataaagatgcagacatgccttgtttgagaggttcctccttagccttttgaccagcagagagaacaacctcaaggggaagaggagctaatgatgaccaatgttcatgctttgataccgcaatctcgggataaactccttcaagttattaatgggccatcacataaatcacggacagggaaaaagttaacagtacatttcaacatcatgtgcaaactacaattaagcattttcgagaccagaccagggtcacaactagttactttcaggccccctaagccctaatctaagtgacacctagccatatacatagtcaggatggagtatggactgtttg

SEQ ID NO: 2707 - DNA, 5767 bp, Oryza sativa
actagtggatcccccaaaaaatttaagtaattattaattttttccctatcatttgattcattgttaaatatattttcatgtaggcatataattttacatattttataaaagtttttgaataagacgaacggtcaaacatgtgctaaaaagtcaacggtgtcaaacatttcgaaacggagggagtatatatcaatagaaaaaaagaacaaatattctgcatgcatgccgggaaatgtatatagtggaagtggagagagaaaacaatactatacccagctcatgcatatataacataaacaccatatatatgttgctattgtatacttacttattactcaatgatcagttatttaatctcaatgtaatgcagtggaaatatattttgtgaattcgtgaaatggttcaaaaaaatattggaagccgtctaagttattttttttttgcaactaaatgttatatactaaagggtggtgctgttgtacaaaacatgtccaaaattaatttcatgatctagctcttttatgtttggatgatacaaagtttacaaacagcagaataaacgtatttagcattggtttcatactttcatttgtgggatgctactagctacatgtattttttccatggtaaatattaattaatttgtaccgctaaaaattgacctacacataaatgttgtcgtcacaaacgagttgaagccagaaacacctaaaattaagttttttttttcctttggagggagcaaatattttttttcttcaaaatttgccaaagctatatgaaaattcagccataaggcctcttcagggaactgatctaattatggtccaaattacctaccgaatctaagagatcgaattaatgaacttgcatgatgcatatggatacaaatatacagaacagcatgatggtattttggtaactatatactacatgcatgctgatatgggcctgtgacctattgcttttgtctagtaccaaatcaaagagatcccaaccttagctcaatgtggtactttcgattaggtataatgttcctttcatgatcccccctaattgccaacctatatatgcggcaactcagcacaagagaatactagctaccttgcagtgcaaattcaacaactgctcactattcactattgatcactcgatcgctgcttcttccaatcattttatgcgacaatcaacaagcaaattaaatatcatcatcattaatattttatttagagaaaattatataatcaaggtgtagtaattaattaattaatagtgaaagaaaaggaaagtatatatgcatgcttaatttgtagctgaagaaaggtgttgactaattccggattattgtacctgaagatgagattgtgtgagtcctagcttgccggccaagtacttcatcaccacttccaccttcatgttgctatccctgtgaaaaatgtgcaagtatatatattcattcattatcttaatgtgtgttttatgtaactaggacctttgaaaattccatataagacattataaatcaagagaaaaactttatttgattggtacctagctagactgacctatatagaaacttaaagactactagttagctagatatatatgccttgcagaaacaagctacacagtgatgatagctacacatgaatgagcaattttatggtccttgaggaggtatcatgaggtaccactttttttattgtaaatttggtatctattggtacctaaataccatgaggtaccaaattttacactaaatttttggtacctcatggtacctcctcaagaaccgtaaaattactcacacatgaatatatatgcaaactaaatggacatggattgttatgcatttaatttaagtttgtactttgaaattaaaggagagaattaagcatgattttttttgaagatatacataattaacttacttgattctaaggtagctctttggtatctggggcaaaatgggctctcgaaatctgcaaacatgaaaacaagattagacattattaagagctaaatggttacaaacacaagataaatttagatatataaaagctagcttgtgcagataaacaatatctacacatatatctgtattgggcttatttgcattgttgtcatgaggtgcatatactagctactttaatttgcatgtatgcatataaccaatcttatatggaatggatcaacatgttaatgatcacaagtttacatgcaatttttttttgaggaagtttacatgtaattttttttaaaataatggaaatggattacatctcttacatgtaaataaataaataaataaataaataaataaatatatatatatatatatatatgtatgtatgtatgtatatacacttactgatcaggggatgcctgaagtgtcagccacaagccggcagcatcagcagccgccgctcttcgcggcgggctgatgaccctcatcacgccggggagatcgccggagctcctcaacggccgcgcgaacgggaagaacgacggcggcggacaccggccgccgccgtggccgtactggtggtggtggtggtggtggtagctcctcaagatcggcagcgggaacagcggcggcctcccgttgtactgcttggcggcgaacacgtccagctccggcgccgtgggcgtagacgacgacggcgccgccgccgccgccggagcggtggcggtcggcgccgcggcggcgaggccgagctggagccagtccttgtcgccgtcgtcgtcgtctcctgcaccgccgccacgagagctcgtgccggcggccgcgtcgtcttcgggcggcgccatggctagctggtggtggtggtggtgacgtctacgcgccggcgcggcggcggcggcggcgtcgagctgggtggcgatgcagtattggggagtacaggacgacgacgagttgccgccgcccctcttgctgctgctgctgctgtcatggtggaacaggcggctcctagctggcaccatggcggcggcggcggcggcggcgacgacgacgacaacgacaacctgctgctgctgctgacctcgatcctgcagctagatgcacgtctcatgtctctcacgcactcatccgattacaccacgacgagctccaccatctccatccatggccgcaatcctttagtaattaacaagaactcaagaagtgcaaagaaagaaactagctagctacacgccatggatgagacagacatcctccatggctgtagctatagcttcaaaggcaggaaattaaagattggagcaaattggagagagagataatctaggagagatcgatgaaaggggttgtgagatgagatgtgatgaatccttttctctcctgtaggggagcaaactcgaaggagaagagacaaggagaagaggaggagagctagctagctgatggaggcctcactttccctttgctctcaaatgaacttggagcctagcttctcacccttatgccaagggatgcaatacaaattaatactagctagctagctactttctagttgtagagagagatgcaccagcttgaggagagataaactaattatgtgattaaattagagataagcaaagattgtgaatagctgtcatcagtgatgaattatatatatatatatatttggtttttaattaattaattaattatgtataatgtgtgattttgtgagatggaaggattaagggtggtgcagtgcatgcaggccataatattgcattaatttggttgccatttgctgtcgatcttgtggtagaatctatgtgcagtacagacgctggacaggagaactacctacgcaaacaaacgcacgtagccaatattattataggctacacgagcaggcaacattgagagagaaaacgacttgagaaagaattaaggagagagagagagagagaggagcaaggtgaagtatgttctaagttgaggtgacagaatggcaactggtgatcagctgaggctgaggtctccctgtgttgttatactgatctttctgagaagaagtaatatataattagttagtaattcttagatacatgtccaaggattctatatttagtccaaaggaaagctttttaaccaccaaaaaggttagctattttgtgctgactattccgtaagcatgttttcttcgtacatattcggttaagcttaattaattatttttttaaggtcaagagagaactttattaatgattaaatagagggttacattcttgatttaacaagtctaggcttaattaattattagttaattaatcagctcaacagtgactcaggagcaaaggctacctaactttgtatggagatgtcctagcctgtttcttttcatgttccaaattatgcgaggtttttttaagataatggaaaatgatgcgaggttttaattatattgatatagtaattgggaaagaaataaaactatagttgtataaaaggctataatcagaaggataaaaaaaaagaaacacaacaccacatatcgataacgcaagcaaacacaccatcaaaaaagcaatataatgaagacacaaacatacaacccaatgtcatctctaagacagtcggcacacccacgggctcctagacatcactaggatgaaagaaaggttgtagatgaaaagggcgatataggatccactctccctcacatagatccgtcatcatctaggaacgctgcccaactgttttaagggtggaatggtggattacacaatcgagtgatctcctaggcgatgtttcaaggaacaggaaggatgtgctgccactactatacccatttaacgattaacaatgtattttttttgcaaaaacttttaataacaaagttgttttaaaagttcatataacttatttttcaatttttaactaatacttaattaactattccctccggttctataataattgacgttttggacaagattgagatcaaacttttataactttgatcatcaataactaagaatatttagttcaaagaaactagaacaatatatatatatttgtctttcaaaattaaacactataataaaagtaaacacgtatttatttattatatatattataatagaaaaataaggtcaaaggtatgttttgtagaccgtgtcattattcaaaacgttaattaaaatgaaaccggagggagtatgtactaattcattgctctgtttttttaatactaagaggtaatggttcccaacccttactcttccatatgttttataatacacagccttagagctgttttgtgcttactcttccatatgttttattggaaaacattcagttaagcttacttaatcaattaattactagttaattaatcagctcaacagtgacacaggagcgaggcatcaggtatacctacctttctgtggaagatatatgtgttgttatgctcctattaagttaagacgctatcatgtccctgtttctgatacattgtcatttatcagagattccttaatcgcccaaaccttaaattcctgatgctaggtcagatcaacttatgatctttattactacatccgtcctacaaaaaatttacttttgtgtttctgtgtccaacgtttgatggtccgtcttatttaatttttttttaaaaaaaattagtcacacataaagtattattcatattttatcatctaataataataatagtaatagtaatcatagaaaatttttaaataagacgaagagccaaacattgtattgaaaaactgagaatgaagtctctgtgaaacggagggagta

SEQ ID NO: 2708 - DNA, 1855 bp, Oryza sativa
tgcacccctgagtgagaagcagaaatgcatatcctaattctgccaagaagtagtggtgtagcaggaaatccaaccggaacaacagcaacctaaaagtatggaacatgccacattagttaaaactgcaaaacttttttttaataacacaaaaaagagttacagggtgtaactcaaatagtacaaaactttggactattttgagacaaatttgcattagagatttactaaacggacaagattgttttatcaggtttttaatagatttgtggtgcacttgaaaaaaactcacattttgcttcaggcactctcttgagaatgcaggcattttagcaggattgtagaccatgaaaggcatgacaggtgagtcattatctccaagaacctcaaagcccattttctgaagctctgaacggaagaaattgctgttatctctaatctgagcaatcttcttggcccctgtttacaacaacattgcatcatgaatttcctcaaaacaggagaaattatgagtcaatttgttcaaattttggaagcagatatatacctctgtcagttccatcctccccaagaataaccttcattgcagagatgacctgctggactgcaggaggtgacatggatgtgccatagatatgtgaaggacatgtaagcttgagatgctgaataatctcctggtaaacatgaaaaaataatccaaggatcagttttattatcaactcttttgtcttctcagacaagaactggtaagtgaatctgcttaattaattcatacttttgatgctgcaatgtaacctccactcgatccaaatgactttgagagtgtgcccatcatgatgtcaacatcagccggatccactcctagtagctcacacacacctcttcctgttttcccaacagctccaatactgtgtgcctcgtccatgtatgtgtaaacctattcatatgttttactagtcaataccatatagtacatccctaccagtttgaacaactcttaaaagtttcagaaaaaaaaatccagtaataacatacccagaagaagagttctttttttcttttgttgatatctatcggtagtactataatggcagtaaaatactaccagttgagaccaccgtaaaagttttgggtaccttcacgatgctctttagtatttatcgtcgatagaaatgatcttagattttgatttatgagctctactaccggtacaaaaaaaaaatctactaccagtagttgacgttgtagtataaataaatatgattcattggattagaaaaaaatggtctagattgttcttctacccgcaaagagcattataatgcctcaaaagtttccccttttctctttttctgaaagatggtactactgttcttttcttactagtatggttcagaatgaaactaagaaacataagaagaattcagaaatttagtagtaagtggaattaatttctccaattaaccttgtacttcttgcagacagatatgatctcagggagtttgcatagctccccttccatgctatatatcccctcaacaatcaccaggatcttcttccatgccctgtgtgttctaggctgtccacctgaaatctgctctctcagtagtttttccaggtgagcaggatctgcaaaagaaattaatgaaatttggtgagatgaattgttcagctaataactaattacttgcaaatgcaattgacagttgtttgtgagcttactgttgtgttcgaacacccgaatcgtagctcctgaagctctagctccactgactatagagttatggttcagtgaatcactgattatcagtccaccctgaaataattacagtacattaatcagctccaggatgcacga

SEQ ID NO: 2709 - DNA, 25767 bp, Oryza sativa
cgagcgagaccattcagtatctgatggaatgcatctcctgcctgagcaggctgggggaacagcatggcctgcttcatcgacgggttcgcgagaagcctctgcttcctcaggataacatctgttggtatggatgtcaggatactgtccagcttcggaacatcctcctcggcgacaaacacgccaatctcctcccaggggatagcatcagcaaaggggaggacaatgtcatctgcaatgatcaccggaatacaaccgaaaaccacagcttccaccagtctggggctccatggagcccagcccaatgggcacaagcagaacacagatctctgcatatcttcgtagtacgtgggtgggtgatcggttgagatgtcaaacagcgggttgttcttgaaattctcccaaaccgacgcgcgggcacctctgataggacatacagaaacatcagactccacatgctacgagccaatgagcagatgataggatgtattggagataagcggaaaatttaccttgcatagtatccaccctcaggatcattgctggtatcgtagaacagaccacggaaatatacaaagatagaccgaggggtgtctgggggaataagatgagcctgcattttctgtgggggtgcatatggcggaatggtgatcgagccgtccttcaagcagacatggttcttttgtccaaaggtctgaaccagggtggcacgctgaagcaatgggaggattccacgtccaattgccttttcttcctgaaacaataacagaagcaaaagatcaatacgctgaaataaccaaagagaatgtgggcacaaagtatgatagaaggtgccaatcagggtagatgattaatcatgaatatgaatctgaccttagtgtgacatttaaataggttgagagaaaatatttttttctgaaaaatatttatattctacaaagggacaaagaacatgtgcaaactgaagtgttccaattaaatcagagttgccaactaataatattaatacagtgaatctagcatcttgatgccccccattgctccccatgttctctgctgcaattagaaatgtcccagctgttgcaaacttaagtgttcagtactaaactaatgctcaaagtccagaatttgctcactaaaggaggaataaatgtgtccaacagcaaggttttgtacttgtgcatgtacctgatagtggaagcaagcgccaaagtcatgtggtgtaacaaagaaatgatcagccccctctgatctattccagtaaggccaatttgttgcaatcagctcaattgcgctgcgcatcattcttggggatttgaagggcaagggaagaccggagggagtcaggtcgcatgtagtgtacaccggtgtgtagaaccaatcagcttcctcgggattaaaagttcggacagcgcttgacaacaggaaccgatgcatgaaaatctcagcggcaaacatgtggttcaggcacctaggatccttcttcagcagcttcttgttgtacttgcttgggagatcatagacatagaccttaagcctcccaacagggtcatcttccaacacatcaccagcacttcctgcatttgtttcgccacaatattaagcaaaagctatggagtatctatagaccttgcacagaattagggaaaagaatattctaaattttagaagcatagcttgggatcaaggtatgatacctaagcaacctacagggataaagtaagtgtgttcctatgctagattaaatgaaacataattaggctaatggctatgttcttatcatattggtgcctaggaacatgatactgcatatcataaagaagatgaagaggaggaaaaatatttgaaggttcagaggacagaatggcattcaagttttttggcagcagatgtctcgaggaccacaaaatccaataagaaagaatgcctaccatcaacaggtgtatcaataccagtagatgttcaataaaacaaggtttaaactgaatccaagcattgaaccataactcaaccaaatcatttagaataatacaccaacataaacaacctccatttgcgtctgatctgaaatagatcctatatatttagggtggagaggtctgaccacaaacaaatcaaattgacaggctaaatgatttcaaaatgctttgctttaacagtttcttagatgcacaaataagcagcttgggttgagttctactaactgacaagaatgtatccatcaagatcaaaaccaagaagagaataacacaagaaaaacaaaggccccccacctgagatcctctctgtctggtggccctgccgcacctcctgggcctgagctccaaggaagaagcatacagcagcagcaagaatggcaatggccaagacccacctcctcatcttcttgatccccacaggcctcttcccagcacctgtgtctcctctcctctccaaccctctccctgtccggccttatgagctagcaggcaattgccaggaggtaattaaaggatccaaggagaagggggaaacttttctggcaattctcctaccaagaagcgtttggtgagttgagaaggtgaggggaggctttcctaggcttccttccttcttcctccaactccacatataagcaggcttcaagaacaattaggggggccatgctcttacttaaaaggaagaaagaaataaaggaaagagattaatatttgctcagagagggtaggagggctgtctactgctgattcttttgcttctttttctatgcacccccccttttcctccagctttccttgctttttcctcttacaccaatgatgagctgtagttctgtggagctcctaatagtctattgcaaatgtgttccaaaaaagaggttcggtgagaggtttacctcctcttcagatgtcaagtttctttcctttcaccaaacatggactagacctctcacttgtcttaccttaacatgtcaaactcttcacttctctctctctctctctctccttgattttttttttaacccaagaattactaccctccatctatgatctgccaaatagttaatttttttcagtttcatgtttctccggtccttttcttttggtttacttattccgcgtgacagtcaagccgtttcctccaggatatcgtggtgatttggattgttgcctcctttgcacatggtgattcattcatttcattgtcatggctcatgagacacccatgagaggggggccataatcattggcaacaaggcccccatttgcagttaataccttccatttgtttatacaatattaaaaatcttgggagggacaattcacagtactctcttacctatactttattggtggtgattgttgattgcagaggaagagattagtgccaatgctcatctcccaaaaaaaaagattagtgctaatgctgcaattacctgcttgtagggtttggtgaaggttagtactacaagtagtagagctgtttgtttgtttgttatgcttcttcttctataatttgggattaagcaaaatggggaccccaactcccaagaaagtctatgaactgaacatccccaaagacttctttaacatggtagaccccccatgtgagcatctcaaatttagaggattttttttaatttgagaaaaagaaaagggatctgaaattggatggctttgattgctgttgagcggaaagatatcaaaaacagcacaaaagcagcggatcatcggtgtgttcttgcgttactagtgcctatagctcttggttgaactgttggggagcaagtggggcgtaccgatggatggatgctcggcgagcgccgccgccgctgcgacgaagcggcgcgcgcaccctcgccggagcagggcatcgtcgccgccgcaggggaggcacgcctcggagtcggtcgccgccgccgacgaggaaaaggcggtgaaaatgtgaaatcctctgccgttggggcgtaccacgtacagtagaattacgcttcgacacggcgaaagcgtattcggtgcaggcgtattccgtattcgttttgtccgcataattatccacgttacagtagaattaaattgagcggtttttgtcgtcgaatcgaatgtgttacagcataattaaactatttttacagatattttatacatactactatacatgatacacccaacccttctcttaaaaaaaaattgatacacccgttgactttcaacgacaacaaggagcactagtatttttttacacccattgacctggagtaactgatgcggacagctgggaaaaaaaataaagacgacaacaagctactcgcaatatacaatgtagtaatataaatataaatttcagtttgagatttatcacatgtttgttgaggaaaataaaaaaggcaaagtcgtcgcatgttttgacatatatgctgagttgacacatcttgttcgtcggcgctcgcaatatacaagagcacgtagcaggggagcatgcagcagcagtttatacaagcctcaaacatgaagtttgggtgtgttatataccacatgtttacaacttctagtcttctactcctttatctttatctctcatgtgtgcgtttttttattattaaacggtatatttttttaagaaatttttttataaaaaatcgctttaaaaccacactaatctattatttatagctaatattctctctatttttaatatatgacgccgttgactttttaagatgcgtttgattattcgtcttattaaaaaaattatgtaattgtgttgacagaaaacacgaggactggaagatctgcttaactctagtggaggtccaaagctcgccttcgaatgtatgagtgtgccagttgatttgattctgtaatcaacaataaatagagacaaagaattcgtggttaaatctataaatgatagccgatcggctaggtgccgatgacatatcatttatctttaagccgatgtcatatatgaatcgatcggcggttataaatagacagtaagggactaaatctattcgatcggctgtagatattaacgatatatagtttttatattaatatatacttaaatcaagtgattgggaaatatcggtcaccatgccgagaaaatataaataacttagatcgaaatatatattaataacaggattatatatgtttatagcatagccgatcagatagatctagcatgtatcggctaatactccgatactactctatataaagatatcaaaacaagtataatataccaaacaaaagcttaatatatttaaatgcaataagatattgatataaagggcggatttaacatgtcactgaagcatatagatcgaatatggttaaatcagataagatcggctgaaacttcgatactaccctaatcggcaaccagaggacaggctagagattgatattctaagcacgacttaatagatcaaacttaactgatgcagcaataagtatgaaaagaaaaataatatctagacaatcaagccgctggatgttttataaagtgatagatatcttatataatctaggacaatgtcgctatttaacctaatcggctgtcttctattaacagatgttagccgattgtaggttagataacaatattgccaaggattatataagatatatgataactcgacgaattatatagacaagattagagtgtcataaagatggaagcactgatctcgagaacacaagtcgtcataacaagttttacctcttattgaagatcgaaaccgatgcagctcaacccgaaagcaagaactcgtcgaaacaaaactaaagcaaaaatgtggcaatgtgccaaaattgtattgaacgtgtgtgttaaaaattacatagggctcggggtctatttatacccgagaattacaagatatgtccataccggacacgaccactatctctaacaaactctaagataccataaatctttacggcagacttttgcccaaacatatttgtaaggaagttacataaaacatcttaattaatagatacaattgccttctaaggactctatccatgtgcggcaatcatcttgaagcacctcaattcaacccgatgtcatacaccaaattatactgtcggaatcggctgcatcggcttacctagtccgactcagactcagccgatactaatcgtagccgatctagacttcagccgattcttgttcttttctcggatcaatctccgccttcgactccacctcgatctaatctccttttccgatgctgatattaccaaatttggttgttaacaaattgtcatttattttattgtggcttgatttatcatcaaatattttttaagcatgatataaataattttatatttgtacaaaagttttaaataacatgaatagtcaaatgttgataaaaaaattaaatggtgttatatatattaaaaaacagaaacagtaattaattagacatatttagtgagtaagcccacagaaaagaagttctaaacttctgtccctaacacacttgagtcttgaaatgttgcgagaaatagtagagatggtaaaattattttcctgtctacaactaggtagtatccacaagaatcatatttattgtcttatgtaaaatttcttatttttttcaaatataattgattttaggctttcttccgccactgacccggcgaaaaagaaaccgtgtgttggctggttggttgattgttccgctggctgtggagcaggaacgcggagtcgccggcgtacggaatggagtagccgagtagggacgcacgcggtggatcgacctcaatcattcacattttccgccccaaacctaaacaaaaccaccgacactatgcaaaactcactaatcaatccattcagggcatgtttagttggtgaaatgaaaatttttttgatgtcacttcgaacgtttggccggatgtcggaaggggttttcgaacacgaatgaaaaaactaatttcataactcgcctgaaaaccgcgagacgtatcttttgagcctaattaatccgtcattagcacaggtgggttcctgtagcacttatggctaatcatggactaagctcaaaagattcacctcgcaatttacatgcaaactgtgcaattagtttttctttttatctatatttaatgctctatagatgtgtcaaatatttgatgtgaattttttgggaaaagttttctgggaattaaacagggcctcaatcaagcaggcaagcaaaagcagtttgaacctgcaacccactctttgggtacactatgctggcagtgttttgctacggatgtcaacacggcttctgctcctttttgcattcgcgtcacctttcattttatttccaagcagtctctggcatggcaataggatttgtttccaataatactttctccgtccacaaatataataactttataacaattaggtttatctcaaaatataacaacttatttacctatattccatttccgaacgatcacaactttccaccactaaaaatctccatctacttttttcttatcaaccaatcaaatattctttcatttaatttcacttaatttcttaatatctgtatatattaagaaggatgcaaaatattattgtctgaactatgttgacattatttggtacttactgctttactgatgcaattggatgtgctgtgcctatgaaccactaactcagtttcaaaatataactacttttgactatgatttatgtgactaacctaaaagtaattatatttagaatggaggtaggatgtaatatttccgtttctaactgctcctattttttcttttttctttttctttcaaggtatgtccggtaaaaggctcgtttcgaggccctaactgcttgcggtctggttgagaaaggcccaaattacggtccatctaggatgcctacgaggcctttgattcgatgggtggtgggccgggccactattcatacgagagacagcgagggccttggccttggccttggccttggcatgcgcatgctcctccaagtcagcccaataaagcccacagcgatgggccgttggcgacgcctagatgccatcatactgatgttggtagatcgatgacgaattgattgagagacaccaaaataaacatcacggtcacccacgcagatgccggcaccgccatgataaataggcttgttcgtttgtgctatattgcagttagctgcggcatataagaatttcggttggataggatactgctataatataaagaattgtccagagtattagaatatgtctcattcactttttcaactctcttcgtttgttagacgcacactttcaaactactaaatggtacgtttttttaaaaaaattatatacaaaagttgctttaaaaattatattaatattttttacaaagaagttaatacttaattaatcatgcactattgagttgctctattagttcccaacccaaggagccgatcacagcctaacatatgttccgaacacattcagtgattgttcgagctgttgggatacgcgtaggctacgatagcataaatcaaaattttttatcgcgtaaaccatgaaccatgcaagtattagatcatagatcgttaccactcgacgcgctgcgcagcggaagaagacgctgagaagtcgaaggaactctcgcgaagtagcgcgcgtcgatgcagaggaagtagtcgatcgcaccggctcgaccttctccccgtgcgttctcctcgccgtactcccacgctgatcaacaccgcaaaccagcagtgcctctaccggtatccacacgtacagggacggaatgccacgcgcagatgtgctagcacccgcgtgcggctagggttttgctcggggagggaagtgacggctagggtttctcacgtgatgcaatgcctccgccggtcacacccctcacgaatatataggatccatcactcgggcctccaaggcccgtaggactcctattcggatccctatccgaattaagctcatattggatctccatccaatctccttattccggcccattaagcgtgtgaccctgtagtttcatatatactcggctgtaacccgaaaactccttttcggtccacgcgtcaacaacggcccctagcagaatatattgacccaccagacatacataaatatcatatcggctgaacctctagtgtatacttgtacgaacccctttgcctcacgatatcgattaagcttaaggctagatatgtacctagaggcaatcactaacacgagctacgattgaaaagtcataaacataataaagaagcaaaagataatttatatataaaactttaatatacgtgttattagcgctttaaaagtccacactaattaaaagtagactataatgtaaaaagcaacatcaactctcaataaaatttaaaatttattcattgttgatttgttaataagtagtggacgagaagaacctaaagactctctgagttactaacgagtttgcaattagaatcgtaaagagggtcgagcttgaattgaaatgctagcgatggcgacgcttatgaaagatggtccatgtagaaaacgcagccaatcgtgcctatttttacaattaattgttgtctctatttcttctctctgtttctgtttcaaattgatgattgttcaacggtaaacatgcatgggaggactttgcatatcgtgtgaaaaaaaaaaaaaaccatcaccagcagcagcagcagaccggagcctggagagtcaaaccggcgtgagcgaatcagtgttcgacacgtcacgtgggctcacctgcaccatatcttaatcccacgatcttcggagagaaaaaagtaaataaaaaacatattatagtccacgcggcctgcaagttccggactcgcagtgggtggatggatgcattcagaggaagggaacaagacgagacagagacagcgagagcagtagtgaatagtgatgggccatggaaaaaatatcgcaaaagaacaaacgagatgaaaagtagatgagaatattgccctattcgataaaagtggtactccctccgtcgattttgagtttttgtttacattgtttgattactcgtcttattcagaattttttgaaattattattatttttttggcttactttattatccaaagtattttaagcacatttttcgttttttatatttgtacaaattttttttgaataagacgagtggtcaaacagtgaaagtaaaaactcaaaatcccttatattatgggacggagggagtatgtttttaaaccgctaaacgatgcatttcgtgcgaaaactttctatatgagattaatccatttcttaagtttgtaataattaaaattcaatttatcatatgttattactatctcgttttacgtaaaatacttaatattttatctttatctttgttacattcaaacactactatgtgtaacagatctgataacgatcgttattacaacaaagtatagattttcaagtcctaaattcaattctaaaagttggattaaaagtagagttgtgaagctgtctaaacttttttttaaaaaagttggaactatttggttagatttcagctttagaaatttaagttgtgcaaaataggttctatatttcactgtaaatatgttttccagaaaatgtcttctactatattgcgtaaaccactagttacctaacatatttttttagataatagttacctaacatatgtataagaacattcgttcaaaaaaaatgtataagaacataggatgatgagacacatcataatgctactaatctgaacaacctgtttaaattcataatattaggatacgtgtcttatccgattttaagtttttatactttataatagagggagtacaaattatttcttctaacctaaaatatagctacaaagtatagacatggcaaaaaacaaggagtttccgctgtcgttgaggcctcgtcaagtgctttcgctccgtctaaattataacactaagtatgtccagattcttactatagctaggtatattttgaacaataaaagtactattattgtttgtcaagttcgtttattaatccgatgtcaaactcaaaccacgaccgtatatgcatgctgcgaatggatccaatagtctccccacgccgcttactttctggggagcttccctgacttcctacacctctgtattggaactattacgaccacatgctctcttcctactctcctccttagaccatacggacttaatctctctcgccctaatcatcatcgtcttcctcctcttggatcttctcctctgccatggcgggcaacagaggaggcgatgccggggaaggggagtggctcaaggtcgccgagctcagggccacggtggaagcccaggacccccatgccaaggtacgcgacgagatgcatctcatccaattccaaccaaaacttactccatccgcaactgcatgaacgaattgaatttactcattctttcgttctttcttcctgcttcgtcattctccgttttgttctgcttactgttcttcctgttctctgttccagtcaattattgtttagacgaactcagtgtgttttgattacgcagcagagctgaataaaccaagctgttttgactgtccagccatataattgtgttggattgacgaaacgaacagtcatgcttaatttgtgcgaaaccaaagagaatttttgcgtaagaatctttgctatggacgagcatttagttctctcgaatcacacgcttttttctagcttccactcctcagcaacagaaagaatgagtgtcggattagcaaagccatgacgggaaagcagggcaaccaatcaggctgtcgctatttgtagagaaatatcgaattaattagagtattactacatcagatttggctggcagttgatccaacagatcgtaccagtagtaattaagcgatgtgatgagtaattagtgccttagtggatcattggccaactgtacagatcaccggatcgagtctggaagtacagggtgtatggggtcgccagctgaatgaaccacgtgaagaagaatgatgcttaaggagtaattttgaaggctaatggaatatgctcccgtggacgcacacgccagccattacatggagctggacctacgtttcaggggcaattatattctctccatcatcgtctggccagaatagcggaatagattacaaacattattataaagataaaaatatactttatttgtcttataaaaaccaatttagtactagatcctatattagttttttataagacggatggagtattcaaaacattcttttaagaatattatatacagaaagttttttttccttgaaaattcaccactgaaaatgcgtcgaattcattcattatttcatttctcaaaacagaaaaaagagcatgccaaataataaacgtgctactaatactatgaaagtatgcactccttcgtccaaaaaaaaaaaatcaacttgtagtgtttaaattttgtcccatagaaactaaattctaccatcctacgtaccatagcaagtaaaatgagaaattttatctctttaatatcatttagctacataccattcttattgccttttccaataattaagggtattttagtcattcttcatctccactaaatctagtttgggatgatatgaatgaattttctatgggaggggggaagtagtaactaacaacattgttcgacgatcgatcggacaggatttgtgaatacacgatgctgcagaactgaagcgttcctgattctttgcgcatgcaggaagtggacaacctgacgctgaggaggttcctgcgggcgcgagaccacaacgtggagaaggcgtcggcgatgctgctcaaggcgctccggtggaggagggaggcggtgcccggcggctcggtgccagaggagaaggtgcaaagcgacctcgacgacgacaaggtctacatgggcggcgccgatcggaccggccgccccatcctcctcgccttccccgccaagcacttctccgccaaacgcgacatgcctaagttcaagagtacgtctccgttggattcatattctcctaccataatgacactaccattacaatcactgacgtgtgggggaatagaaggttggaacccatataccggtaactgtaatgatagtgattgatattatggtagagaatcctcgcccatctctactagctatagagtttatatactaattcctcatttctaaaatatactaccttcatctcataataagttaatttagtatgtgatgtgatataaccaaatactacagatttgaataaaattaagatatatcatattctatactaaattaacttattctgaaatgaagataataagtgacagaaccagtagttatacgtgggaggtcataagagtcttggaggaggcctaatacacattacttagattaattatttaattaattaggtggttatgtgtgaaaaaagttattggagggggcatgccactggccacctccttgtctccgtcattggaaaacatgaaaaaaaatacttatattttagaaatatagtactccttccgtttcgaaatgtttgacaccgttgactttttagcacatgtttgaccgttcgtcttatttaaaaacttttgtgaaatatgtaaaattatatacctacataaaaatatatttaacaatgaatcaaatgataggaaaagaattaataattactcattttttttaataaaacaaacggtcaaacggcgtcaaacattttgaaacggaggaagtattaatcttatgtacacatagcctgacttatcgagtatgcatccatcttaactatttcgtcttctgcaccgcaggttattgtgtctacttacttgacagcatctgtgcaaggtaatcacaatggaaaatgctctgatcgatcgagttttgttgatttactgcttgaattaattactgatgaagaacagctaatgcacaagactgacattaagagtagttactgaacgctgatgatgcatatgggtaaattcaatttgcaggatccccagaggccaggagaagttcgtctgcatcgtggatctcaagggctggggttactccaactgcgacatcagagcttacatcgcggccatagagatcatgcaggtaatatgaaagatcattcttcagttaattcagctaattaaacattactgaacaattaacaagcattcttacagattgatgatgattagttacatatttttcgttgcgtttgattaattccccctcgcagaattactacccggagaggctcggcaaggccctgatgatccatgtaccctacatgttcatgaaggcctggaagatgatctaccctttcatcgacaatgtcaccagggacaaggtaatgaaatcgatcaaagaacttgaaatcaagtgccaaacaagctctcgcacattagcactacgttttaatttcgttcttacaattctctccttgattaattttggttcaattttctgtctgaaaaaaaaatgcagttcgtgttcgtggacgacaagagcttgcaagaggtgctgcaccaggagatcgacgatagccagatcccggatacgttgggcgggaagctggcaccggtttccctcaagaacaacgcgcgaattaaccttgattagtagcgaggctcaattagcacgcagttataccgataatcaagcacaagattatacacacacgtatactatacatggatcgatgggatgaacaaaagatatgtgtaattgtgaaaaatgcagctctcatatcacagctggtctcactgtttgtagcattgccatcgtcatttatctcagtaacaaaagcttctgatcagtaattacatgtactactgtcactatgacaagtaaagactccaatactccatatcgaaaaaatatgaaaaagggagccacgtggctaagaagtataaatttataataaagtatgcaccattccttctaatgctatttgtttaatctaacatctctcgatcgctaacaagtactccttcgcaaataacaactgaacttgcaatgaattgttgtaagctcgcattttaaatttttgaaatattaaaaactaatcaacgtcgatggccgtcctagctcagtggtagagcgcgtggcttttaaccacgtggtcgtgggttcgatccccacggacggcgttttttttttctctcatgtgctccctcccctcccttttagttctcacgtactcccaccccacgtaaaaaaaaaaactcaaatctaaatattcaaaacaggatttcccttttagttctcacatactccctccccacgtaaaaaaaaacttaaatctaaatattcaaaactggatttgaatctaaaattccaaaaattcttccattgcaacaaatcacttatattatagatcaaatgttgcagtgaattgaaacatcatgtcgctatttgctgaaacattgtattaatatatggtgaaacagtttgaaaaatcgttgttttataagttgtagcaaaatattttatgagatgatttggttgtgtttcagctttttaaatgattgaaacattttctatctacttagtgaaacaattctgatctacttggtgaaacaaggcccgatttttgcaaaaaaaaaggcaaaaatgggcgcccgatttgtaggcgcctcgctaaaattcagaacacaacaatttagatcatctctagaatttgaatcttccaaatctaaaagtttaaaaaaggatttgaatctaaaatttagaacacatgtgtttagattcatctctagaatttgaatctgttgatgtaaaaacacgaggcataagagatctgcttaactccagtgcaggtccaaaaagcttaccttccggttcgtgagcgtacaagttgatttgatcctgcaatcaacgagaaataaagataaaaaaccgcggttaaatccataaacgatagccgatcggctagttgccgatgacatatcatttatctttgagccgatatcatatgtagatcaatcagcgatcatgaataaataagaaagaactaaatctactcgatcggctatagatattaacaatatataatccttatgtcgatatatacttaaatcaagcgattgggatacatcggtcaccatgccgagacaatataaatcacttggatcgaaatatatataaacaacaaaactatatatattaatagcatagccgatcagatagatctagtatgtatcggctaatactccgataccactatatattaagatatcaaagcaagtaaaatatacaaaacaaaagcctaatatacttaaatgcagcaagattttaacataaagggcagatttaacatgccaatcagacatatagggtatgaagtagttaaatcaggtaagatcggctgaaaccccgatgctaccctaattggcaactaaaagcaggctatagatagagattctaatcacgactcataagatcaaactcaactaatgcaactataagtatgaaaagaaggacaatatctagacaatcaagccgttggatgtttcatagagtggtagatatcatatataatctaagtcaacgtcagtatttaacctaatcggctgccttctagcaacagacgttagccgattgaaggttagatagcgatattgtcaaagattatataagatatgtgatatctcgacgaattacatgaacaagactagagtatcataaagatggaagcactaatacagagaatgcaagccgccataacaagttttacctctagttgaagatcaaaaccgatgcagctcaactcgaaagcaagaactcatcgaaacaaaacgaaagtaaagggtggcgatgcaccgagattgtattgaacgtgtgttctattaattacatggggctcagggtctatttatacccgagtttaaaaaatatgtccatgtcggacacgactcttatctctaacaaactctaagatgctacaagtctttgcggcagactcttgcccaaacatatctataaggaaattacataaaatatactaattaatagatacaattgccttctcaggactctatccatacgtggcaatcctcatgaagcacatcaacccaatccgacaacgtatgtcgtgtcatattgtcggattcggctcaatcggctgaccttgtccaactcggactctgccgatcctggtcgcagccgattcggactttagttgatccttgctctgtttccggaacgattccatcttgaattccactccgatcctatcttcatctccgatactcagattatcaaatttggttgttaacagaatctttcaaatctaaaaattcagaacatgatttgaatctaaatttcagaacgcatgtggttaggctcatccctatgattcaaatctatttaggacagaggtttaacttttgcttgcctttaatgaaacccatttctcctgaagaaaaaaacaaattccattttacgcccccgactttttgaaaggaacggttatcacatatttacgttttgcttcctttaataaaacctatgttcctaaacaaatgaaaaatatcattttacgccccaactttttcaatggaatgcttagtgtaatttctcggtttattttacaccgtaaactattaaaaacgattcaccttactattatcacttatgtcttaatgtttcttgaaattatggttgtttatataggttggaaacactcagatgaatttaaacatagatgttttaaattttaagtaaatagttatgattcttttaaatatgttagaacttttatagtggtgccatctataactctataaaattttagtttgaaatacgactagtatatagacaaacaaagaatagaaatgctaatgctagtaaagtgaattatttttaatagttcaaggtaaaatgagaaaaaaaaagtttaggggttaagtgatacatacgagcattcaggtgcacatactaactaactaataccttcaaaatatattttaaccatatttttctataattttcgctgatatttgttagttggtgtgtacacagtaaggcatggtctaattctaaaagaaaatcatcgtaatattatactacaacctttctaattgctgggaggtatcaacaattgtctagttctaggtcaaggacatgcaaaaagccaaatatatgtacgtagttgatggtagtttggtggaaatataacattctgtaactgtatatactacatagttaatcggaatttggtggaaatttaacattttgtaaatatatgtgcatagtagtttttttaggtaaatgtatacagctacatatattgaatacgtttctactatgcttaaataagaacaaccacaccatcatataatgcgtagtttgcatgaaaatagtgataggttctgttcacagtggattgggtcttttgtggctgggcctttgtcatcacaccgattatacggcaaggtagatggaaacatccatttttttcgaacacacataaatcttgcatgccaatatattagaagaaaagtagcatatatcagtaacacacctagacggttagaggggataggagggtacaatatgacattgaagagcatgctaaacttaatgtgactcgtgtgaggaaggtgagagaaacaaaactaagggtctgtttggttcacagcccaaaccagtcatcaagttgtggcgtcgccagagattgtggcgagagaaataatcgccacagctgtggcggaaataagcatgcaaatgaactagcaaaaagtgtggctgccacaactcacgtattaaccaaacatcagccaaactgttgtggcagccgcatgtttggcgaggcaatgtgtggcggggatccaaacaccccctaagtaaactaagctatgtgactaacagccttgtctcaacccattgccgcccttcttgcacaatctgctccaccaccgtcggcacccgtgacagaacacgggccaaagataggttattcttttctttccacaagtgctaggcgaccatgcttcaaatgactaataaactgctaatgataggattcatgtgttcgtgactaagtaatgaagaccatattggcgtaatgcgacatatgcttgccgtataggatttaacttattttgagatggaggatgaccattttctacaatactggtgttaggtacacttgtcttctcaccctcagcattcaagtctgctaatgagcaaggctagagacactcgcattcaagtttgcttaagagcaaggctagagacaacaacagtggtgtttgtttatgaggtcagcacgtaaagcgagaaaaatattagcgtatgattaattaagttgtagttattataaacatgaaaaatgatttttttttgatattttaaagtaatttctacatagaaaaatttcgtacggaacacacaggaattaaaatcgaggaaaaatctatatcttaatagaaaaagaatgggccaaagtgtgttcactggggattcaaaaggaaggataaggctgagttcgctaggaagttaggattatgattttccacatcaagcaaaacgatacaggtaattaatatatgattaattgaatagtaattattataaacttataaattaggtttatttgtttttatataaataaacatctatatttttttttaaaaaaacgcgtctgttaacagttttaaaaaacgtgcccagagtaaacgggagagctgcaaaagccaaactctctactgaacccaacctaaagcattaatgtttctctccttttgcacctcctgacctagggtgtgttcggaacttctagttcccaacccctttccctcattttccacgcacacgcttttcaaactgctaaacggtgtatttttgcaaaaagtttatatacaaaagttgctttaaaaaatcaaattaatccatttattaaaaaattagctaatacttaatcaatcatgtgctaatggacagctctatttttcgtgcgggaagatgggtttccaacccccaagtaccgaacacagccctagtgacctagagtagctatgaggaatgggtatgcgtttttcctattatacccttaccagtcaaaccacgtaaatctaaatcatgctttacctataaatgcgagttttgttgcaatgcctattactgtcgtattttttagacattgatttagtaataacagatgcaaagttaaatatgagtagtttagatgatactagcatgattcaagtttctattaaagatgcacatcttcagtccctgacccagcggtgcagctgaacactttaggttgaattttcccctctaggtaaaacatctggttcaaaattcaaattcaaaacaaccaacaacaagcagctctatctttccaagaatcaaacactatgcaaaaaggaaaggtgagtcctgtctacctatggaatagccccatgattcatgaacaacgaagggaaacaaaaaatctcaaatcgaagattgccctccgtcctgaccactgcgaactggcgcgctgatttgacttccggtttgaaataccaccacaccaatcggacggcgcagccgacgcctgcaattcgaatgacgagctcccagccgtccgatctcctgacggcgtgaatcccacccaaaattcaaactggtggcagtgcccgtaaattgatgcgaacttccgggggtagcgtggtaattaacctcagctcgcaaaaggcgaggaggcgcagcgcagccatctcgcgtgctattttgctctgctcgctcgctcgctcgtctccacaccttctcctcctcctcccacactgctgcgcggccgccgccgccgccgccgccttccgcatcgtcgccgtcggtgaggttctggatcctgcgccgttcgtactccctgccatgttttggttgtcgcttttgttggggttgatttggtgtgaagactgcagagttgggggtagagtggggttttgttcatctggcgcgcgagtttttgggaaggtttttggtgggttttttttttgttgtttttgttgcttttggtgttggcgtcgattgggtgaagagttggtgtcccccaaaaaaaggggcgaaaaattggtggtggaatggggttttgttcatctggcgtgcgagcctttgttttggggtttttggtggggttttgtgttgattgttcccccatttctcgcggattgttgcgtgtgattttgtttagagcaatttgttagcgatggcgtgtggaatccgaacgagcgaggtgagagcagagtggctgatgcagcttggtttgtcgtgtttgggtagattttgcggagctccagtggatggaggtgatggattcggtggccgtgatggaggtctcgccggtgccgaagccgccactggaggcggcgcttgcgctgcgccgcagcgttcggtgcttgaacaggacgcgccgtcccacttacgtggagcaggaggagcccaaggagagtgctggccggcggcgcggcggcaagaggaagcgggaagaggagaagaaggagccggtggcgcagcacgccatgaagccggtcaggatgggcgatgcagcctcggagaggaagccctcctcggaggggaagccgatgcccgcaattgcggcggagccggtttcttgtgccgggttcgcacgacctgctgccgaggatgatgtccttggcaacgggaagagtgcgaaactgcgggtgaaggaaaccttgagggcattcaccagccattaccttcaccttgtccaggttatcttttgcacctgaatgttcagctccattttaatcgttttaattttagaaccagtttggaaagcacagaagaatcacattatttttcagtaggctagcagaatactcatgcgttgcaactggaattaaacaagaaacccaccgaacaatataaagcctagtaaaataaaattatttctattgtaaaatcttcaggtcgtatctgtaaccattttgtaccccactttgaaataaatttaccttgttagatggtttagggtgcccatctacctcatggcattggtgattggtgtggcggattcaccactccctaccactattgagatcctttaaaagagtagtatatttgccatcattttctgccttacgttaaaataaattttccttgttcgatggtttgggatatctatctacctcagcattttggagaaccacatggtagctgtggttggtggtggcatattcaccacctccaccaccattgagatcctttaaagagtactacacagatataggaactattcagatatcattgcatctggtgaaaaaaattattgcaggaacgtatgttatctgacaatgcacttgtggaatttcaggaggagcagaaaagagcacaagcggtgttacaggaaggccagaagcgtccatcaaagcggcctgacttgaaagccattacaaaggtgctgtgttgctctttgcgttttgaattttgggtgatatttgccatacacagatatccccaaaaatgcctctcttccatacggtgttttagagaaaacacatacctgttttgcttgggttacacttacaactattgttataattctagatgcaagaaagcaatgccgtgctttatccagagaagataataggggaactacctggttagtatattctcttttcctaacaagggaaccttgtggtgtagtgattcgaactagagatacctggtctattctcattttatgtttgccccatatgtatgtatcctaaagcaaggattttcaatataatgtcgttcttcttccttgccaggtgttgatgttggggatcaattttattctcgtgccgagatggttgttttgggcattcatagtcattggctgaatggcattgattatatgggaatgaaatatcagggaaaggtaaatactgtacatttccatatcaactaaaataaatcatgttgtacaatattttgttcatctgataatggaactacaacttacactagtatacttagttgtatcgttgtagcttgttattcagacatggcatcattggttcaagaaggccctaaacactggatggttagcagttctagagcctagcgcctaggagtgcctagacaccgcatagaaccaacttgactaggggcttcctagcaatcagcaagcatatgacagaaaaagaagacaattgaacataaatataatagcactagagttcccacggtagggcaagcccctaatgccaaattgcggtggttatccagcaccaagcgctgacttttagaacacacatagcattctcttttagctttctctcaggtttatagttctttgttgctgcatttggttttaattactttcttagacctcctttggaacatagtacttagatttctgcagaaattagttcaattcctataaaaacaaaatgatagcaaattcaaagttccaaaataaaaataaaaactgcttacagataaatgttactgtttctttgggtttttctgctgaactaattaatttagcaattctcctttaaacaggaggagtatgcaaacctaactttcccactggcaacttgtattgtcatgtcgggaatatatgaagatgatcttgataaggcagatgaaattatttatactggtcaaggaggaaatgatttactcggtaatcatcgccaaattggctctcaacaactgcaacgtggaaatttggcattgaaggttagttatggtggttttcttttactactgtatgataattatttatgttgtttgaagggtatccatttatttcagtgatgatatatccttttttaaaaattatagccaattaattgtccactatacgaataccaactatttaagatgtaaatttcagatttgcatagtttccatgagctgtcattgtggataatctattccttttcagaagatataggatttatatgcatagacggtgcttgttttcagaatgctttttttttgtgctggattataatacattccgattgtggcttgtttgacgtatttttgcttgcatctttgagtaaaggcattctattaaatatgtttcaatttgttcgtatctttcagtttgcaaaatgttgttccttagtatttatgccaatggcattatttttcttctgaactttgtttcattttgaccctttctctgttttggtaatattgcagaacagtaaggataatggcaatcccataagagttatccgaggacatatatcaaagaatagctacactgggaaggtctacacctatgatgggctgtacaaggtagtatcttttcttaatctcttcagatatcatgttacttttttcgataatggaagctttattaaaactcagttaaatacaccaagatgatacatttcaactgagcccactaccagcctctgcataggatgcacacagccagacacaaagaaagacctatctagacccccttcatgaaacaaagatattagtggctatcaatccgtagactagatcgtgcctcggtaaaaacctcccgtgccacctggtccaaatgtcgcgataccaccgcaatagtatcccgaagactggtttgtggatgatagcctagtcgaagccccgggtgactaaagtaatatcatgttactagctaaaggcctgtgcattgcaatggatattataagagataaaagcaaaagcaaaaaaaaacatgtttatagcattgttagttgattaggcatataatgtcatctctaaaggcagccatactgaaatatactgctagatcacctcttttcatcctcttcatctatttctacaagccatatggttggataatacaagataggacgcttatagttcatcagtgagtggcaagtaatttgaaggttttgtttgtaaccccttacaatttctagattagcaattccagggccattcatgtgttgtgaggaccttatgcttatagccccacatgtcagtttgtggtgttggaggcagacttggacaccaccagtagcatcatttaaaggagtatagatgttctagataagttcatacaaatgtgttgctgactgttgcatgcttggatatctgccaaactacctgtctaaacagttgcttgccttttattatgcctgacggtgtcccatttgttaatacagagatagaaatgaatttcctgaaacacactatttacactgcctccggtgattatttcttcaaccctgtattgcaaatatgctaaagaatacattcaattaactaaatccttatccaaagatagtctattggggacacaataaaaatagttttgccaatacctcttcttttccatttcttcatccctgacgttcatattttccaatgttccataggttgtagatgactgggtgcagaatggagtacaagggcacgttgttttcaaatataaattaaagcggcttgagggacagccatcactgacaacttctgaggtatgcttgagcttggttaaagctatttttttttgagtaaatttcacaaaactacatatattttgatcaaattatcacaaaactacagatttaaagtgatgtatcacaaaactacagatttagcactaaatttatcgcaaaactacagatttaaggtggagtatcgcaaaactacaaatttaataacaaaattatcacaaaactacaaatccttagcactagtgttatgtttgagttataaacgtgtaggttttgtgattaaattatcactaaacctgtagttttgtgataattttattactaaatctgtagttttacgatattctaccttaaatttgta

SEQ ID NO: 2710 - DNA, 712 bp, Oryza sativa
tggatcccctttgtcgcttccggcagtacggtgcaccacagaagcaaggcagctgacaatatttccatcaggcccaacaacactgtccaagacatagccataatcatatgaaagctcctgcaatgcaatggtggtcactggtcaggacaaaacatataaatagctgtaactgcagaaaccataaggagctgaaataagctgacctgaagaggaagtatagtgtcagcagcaaagagcgtcacctttgccagcttaacatcattatgggagctcaagacacactggacaaaaaggttaggctcgcagctgtggtttataaaccttgcaaagttgccaatagagccagcatcaatgcaatactctggtgcaggtggatctgaatcattctccgcatgaagagacggcagatgcatgtcagagccagcccttttctgcagaaataaaggtagctggtagtcaggaaattgtgcaaagcagcatttattgatatctcaacatgaatgaaaacataagtatttacagtacttcactttgcgaaggagcaaaagttgagcaccgaacagtgacattaaggatgtcacacaatggcagcaagggatgatagattgcaattgaacgattgattcaacattgagtactgaggaaagagaaaataagtacctctcttccatccagacccttcatagtttgaagacaatcaatatcaaatatg

SEQ ID NO: 2711 - DNA, 4174 bp, Oryza sativa
tcttttggcatcttatctcttgttcttgtccgtctttgagcctggatctcacttttgctcctgcatgctgttgcttttctcaaaaggcagaagcaccaatctttggcacctcctatgattagcatcagtgctgtactgaactttctgatgaaatgctttactcaatttatctacccaggcccggatttatcatatgtactctttctttttcttttttgttttttaaacaaagccagaatcactgtcttgtttcattgataaagaagagatacacatcgatctccaaatgcaccatcttacaagcacctcaagaacattttccaaagctacactaaaacacctgaaaacaccaaaatttatcatatgtactattctagttgtcttctattcttgaaaccagtataatcaattacagcatggaaggcatcaatctgaatgtgaactttcactcgtagctgagttcactcattgcacctccaatacatgtacaagccttccatcacatcacatgtgttctttgatgtgaaacctgcactttcaagggagcatagctctgaacattttgccctgtttgtgatcagagtgagtgtactataaacccaggtaaaaacataaagtgtctatcatcaagcacagcatgtgaaggcgaatattcagtcgccactaatccctgtcccccaagcgtattgcacggatgcagttcgttaacgcttctgttgttccattacatttggcgtcattgcgacgctgaaaacattctctgaattttctgaaacattttgcgaatgttgcatatgcctgaccaacctctttgtgtacttcagtactagcttgtaccattaactatatatctggttgtattaggtccaaattaacattttttaggtgaacatgtaattaactttgttatccttgcaataccacctctaggctacaactttggatgcatctgatggcagcgagaaaagtgtctcctggctggcgtagtaccctacatggatccgattctctaggcgtgttgggcgttggttatactgatcgaataagtactttgcatcatcgttagcttggctgaaaacgacatccatccactggctttggtttgggtagtgttgggttgggttggggtcgttcagagtttcagatggtcctagcaaagaataaagtaagcaatgaaccctcaatattgtacactctagcatgttctttttcgattaagatacaattttatcttgatttccgttaaaacgtcttttaaactgtaaaacgatgtattttgtgcaaaaactttctatatagagattgctttaaaaaatagataaactcaattaataacgtgctaatagctttcttgttttgtatgttaccttgcaaatagaggattttataatgcacagttatgggcagaatatacacatttcctaccatcatacgttattttcaatcaaaaagaaaaataataaaacatgagaaagaaagaaattgcaagaagaaactaaagagaaaaataaacaattaatcgagcagctatatagcttctagatatatctatatatattagtagtatataagtaacactatatgtagactatagtatgcactagatagtagtagttgctatgaactgtagcatcgtagaaaccaggccagcgtcctggcgctgtcattgctctgagaagacgatttcttctcccagtttgcagcgattcccttcttgttttcctcatgcttcttcttgtgttgcttcctcttcttcttggtgtgcaccatcgtccctctcactgtcacctccttcttcccaaaatccaccatgtaatctagcaaccctgctaattaatcaaacagatggaaaatatcaacaacagatgcagtaattaactgacagtaacactagcagtgatcagcatgctattcacaaacagttcaaacatgatatctctgtatctccatgcatgtttctgtcggtgcaatttaaccttaaacttaacgagttctcaggactgaagctatgtatgtgatgtatttatcgggtcttcagatttgatgtgacccatcgatgctctcttgtcgatctcatagaactttcacaagggttattagattctcaccgttcatcttggagacaacctttgtgacccgctgtcggcagtgcgaacagcccatgttggcgctcatcaccaccacctgcacctgcagttttcagttccatttcacacaattaatcccactagcagcctccataaataccatcaattcttcattatcatcttctgtatttgcattgcttctaagtaatcaggaagttaattaagggaccactctgcaataatcagctatgtataaccacttattgatctactaattaattaaattataccactactttattagtgggttaggctggtcttacactatcactgttgatgagactcactaattaaaagactagttagagcgactacgtgttgccaatggatacatgtgtggtctcactctcacttaaccattaatctccatctttcgctaattggcaccttgacaatatgaaggtggtcctctcctgtcctctaaaaaccacatgagagccactattgacctgcattgttaaattcctcatctgttcttgttcagtttgctatgggcatacatacagttttaaatttctgtccctgcttctatgggatgcatgcataaatactacatgcctacatgatatgctaatataattaatccgagcacattgcacatagattattatgtagtacttgtgcatcacgtgtagtccctactctaccgttgtgatcatcagtctgcaggcttaattacctgcatggtgggcaacagcatgtggcctctcataccctatggtcgggtggccaaaatcattgacatccatagatagctagtcgaggcagcaagtaattaatttatttactaatccgatgggaatcttactaatatatttcttcttagctgtaatctaagggtgtacgacatccatgccaagcaattccagtattctacctatataagtagtaaaatacatgaggttggaaatgtgaacttctctactgtaaaaagaaatagtaaaaatgcaggaactaatacacgtatagataaagattggtcagagctgtacactctggcttagctatgaaacggtcactaatttgcacggaccagtataaaatccgtgcacgtcagcacgtgcatgtggtcaaaatatacgtagctgttactggcatttagcatgttaattattacgataacgatggatgaatggatgaaatggatgtattgcctataattattagttaattccgtatacatgtactctaggtcaaataaaacgtattgtgccacatgtgccgaatttgactagagatacagagtacgtatgtgagaatagatcttttcttaatgtaaatataagtacagctgtacgcacgcatgaagaaagacagactaagtatttttgctatgccaatggatgctacaatcgatggattctgatcggacggtcgaaagagaaggtgaaaaacaacaggtagaagttattctttgttctaaatatttctttatgattctttttctagagtaaacggctccatcccttgtgaggataggagaccacgtgactgccaggtacttggtcaaaaaaactcagaaaaattcaggctttgttttgcactgcatcccattaccaagagacagccatttagatgtagatagttaattagaaaatggatttaattaatgagatcattcttttttttttgaggggttaatgagatcattctgatctcagcagttttgttcctgctcctagctagaagaaaactctgtagctactgcagtgcaattgtttggttgattgatagtccctttttaacctttaggctaaaagcctgaaagttgagaggtactaaaaagtgactgagaaataggggcccagtatccgaggagataaactatggtcgtcactcatcacacacatctcaatgtgcaggggacacaggatgtaatggcaagacaaaaggcagtaaacaacagctgacattggaggtgctgatgcattgagaaagggaaagagattctggtaggaattctgtcattgcctattgctatgcatgcatgcaccagggagggagaagaacatggggttctggaaaag

SEQ ID NO: 2712 - DNA, 2030 bp, Oryza sativa
gaaatgctcaagaagaaaatggtaagaagtaaagattcaagaacattgctggttgctgctatacattgtcagcctgtcatgtgcaatgctatttatgtcctattgattgacatggttagtggtatgacatgattatttggcctaatgaacatgcttgttatgagacgacattagctgtactagattaacttcttgctaattttctttgccgtagttatgattcgccagtagaatgacactgattttctatggcctcttagttggatgagataaaaagagatgagtatgatgagattaatttcttgcctgtttctgctggatgccaaaattgcaagctttgattcccgatttaatggcggcgatggccgcagataaatcccagcttggtggatccctctcgatcgatcgagttccgggaggcagcagcagcagcagcaatgtcgggcgccgccaacgcgacctcgccggcggcgggcgccggcacgccgcggtcgcggctgccgcggtggacgcggcacgagacgctggtgctgctccaggcgaggcgcgccatggagcaccgcgggcggcggtcgccgcagccggtgaggctcaagtgggcggcggtgtcgacctactgccgccgccacggcgtcgagcgcgggcccatgcagtgccgcaagcgctggggcaacctctcctgggacctcaagaagatcgtcgcctgggagaagaacctcgccgccgtcgtctccggcgccggtgacaacgctgtcgccgccggcgaaggcgaaggggaggcgccgccgccgccgcggctcgagtcgttctgggacatgcgcggcgagcagcggcgcgcgaggcagctgccgtcgtcgttcgaccgggaggtctacgacgcgctcgtcggcggccacggcgccgcgccgccgtcagacttcggcgaggacctcgccgacggcgacggcgtggacgccgacgagctgccgccgccgccgctcatggtcatgcccatatcaggtcagaacaccacccccacttgtccatttgtatttttctacaaaaagaatgcgtacatttgtacacttcacactacgtattgtacgtattatctgcgtgtatatacggtagttgatacgtttggcttgcactgtcttgtacgcagcgaggaagtacgtgccacctactgcttcatctcaacaggaatgctctgatccaggtgtcattttgcacgcatttttgtccatcaaattttatcatgttcatagaccaatcatgtactacctccgtttctaaaatataaacatttttcaactctgacatgatttccaaaatactactttaaccataatacatataaaagtaagatattttaaataaaaagtgttgcatattataatagttttttttacacgacagaattttttttattattaattgttaaagttaaaaatatttgacacgttactatattaaaataatgattatattttaggaattttcaaactaaaatccaattcaaatggctcctttttaaactaatcctattcataattattggtgtctatgtttctagctacggtgagcgccaagagaggcggcgcggcgtcagacaagaactcgacgtcgcagcatgacggcggcggcggcggcggcctgaaggacagcgaggcgacgtacggcgccggcgtcggaggggaggagggcacgacaacggcgacggcgacggcgacgacgacgagcatcgggaggcaggtgatcgaggccctggagagagggaaccggatgctgggcgaccagctggaggcgcagcgcgcggcgtgggacgccgagagggagcagagggtggcgctcctcgccgccgtcgacaagctcgccggcgccgtctgccggatcgccgataagctctgactgagcaaccgcaaatccatacgctactactatactagcatgtaaaatactctcattaaaggttcagatcaggttacagattatactgtttcagttaaccatgatgaactgcgtttcaatgaaattgtgtggtttctagg

SEQ ID NO: 2713 - DNA, 1514 bp, Oryza sativa
cttgcgcgattttctcaaaccattcagaaatgacgcatttctttctaaaagatttttctaacatgatctttttgcttttttatttacaatgaaaaccatatttttctctattttttgcttttcttttctcgtgtgttttttgcctttttttgccaattattttctcgcgtgtttttttgcttgttttttttcaaatgttatttttgttgctttttttaaaaacaagagaatatagacgaaataaaagccgtgtagtaggtggcaaaaaatcgatggatcctatccgactcagagcgatttttttaatagacggtgtttttttcttgcgcggttttttaaaaccatttgttaaaatggcgcgttttttctgacagttttttccttgcatgttttattttttaaaaaagttaccgatgatggaaataattttcctcgcgcgtttttttatttatttatggaagatggaaaacctttttagcgtgtttttttgcgctttttctgacttttttctcacgcgtttgtttgaaccgtttctattctctcgtgcatttttttttaaaaaatagttagattatattagagatagagaagagatatatattgattagaaatttcgccctttccatttttttcctgtgtgcattttttattttatacgaacaagcgttttattttttacgaaccatttttttcgccactttcttatggaatcggacaaacttttttagattttttttctgttttttttcacctttataggaatccgactttttttcctgtttttaacggaatcgaatctagtattttttttcacttttttttgccttttataggaatcagattttttttcgttcggatctacggtttttttttgccacataggggaaacagaacttttgttgttgttgtttttcttttttttttgcagctttcctttttctttttatgcacctttctgcttttgttctctcttttattattatttttaacaaaaacggccccaagtaccttattgcaagattataggaactcaaatataaatataaaaattatagggactcaaaagcaaaagtacaaacccaaaaattaaaatcatataaaaatggaatgctctcgacctgtaggttctgttttattaaacagatctctaatccggcacatcattttgtttcaccaagatatgtgagatatcacggtatagattaagaatcggatctatagtcggactttttttttgtttctgagagggaatcggataggagtcggacctttttttttagcttttttttttacagacgaaggaaacatcttttattattttttaagtagtagagacagagatagagatagagattttttttcgcttttttaacatggaatcggattattttttcgccctttttttgggatcggacatttacggttttttttctcgctcgtccgtttttttggggcggtttttttgtcgccctttttcacagaatcggacttttttttgcccttttttattggac

SEQ ID NO: 2714 - DNA, 664 bp, Oryza sativa
actgcatgacacctccatcagcaattctaacagttaggggttgttgcaaccttctagctcccatcaacttaagtgcaatttgttcatccacaaacgaatgtgtgctgcctgagtcaataagcatgatcagttccattccctgcacccaaccattcaccttgatagactgatttgattcagttccccacagagcttgttgagatatggtcaataaagtgccatgttgttctggtgatgttcccaattcaatgttatcagaatcactgtcaatttcaggttgtaacactgccaacagttgttccactacatgaagctgaactgtagttgcacacttatgttctttaccccatcgttctccacagacaaagcatagtcccttggacctcctataagccctcagagcagccaccttatcatctttagctctagcagattcagtgccccttctgtcttcagattgattcaaattgttcttagtatgctgagtaactcccacaataggtccagttctatttgttttgagcataacccctgggtctgacctcctgtaatgactggccttaacaccttctaaagcttcctcctgcagcagggctatggcacaagcagaatctaaatcctggggcctctgaaccataaccactactcttatctcatctttcaa

SEQ ID NO: 2715 - DNA, 582 bp, Oryza sativa
gtcctgtttgggcgggttgatgacgaaggagaagccggtggtgaagctggcaacctcgccggtggcggcgtcccagagagggaccggaagggcgtacgacaccctgccacggctgtcttcgatgctgccgtgcctgttggcgctgatgtcgacccacccgccgccgtcgccgctgaaggagaagtcggcgctgaaggcggcgtcgccttccagcctgatgttcgtctgctcgtccgggccgaagttggtgtggttgaaggtcaaggccaaggcgactggagccggcgagtagagatcgtcgcagaagacggagaagaagaagatgaggccgacaatattgtacctcgtggtggtcgtcgacgatgtgatctgcaaaacgccggccatcgatggccgccgtgttgtgttccctccccgttgattgatcgagtcaatgcgtacactgtttgcagtggcagtagtgtggagacatgatgatgaattttagaagaaaggtaagggtggcccatcaggaaagcacatggatacttccttttccttcttcgttccacacgtgcgacagcctgtgaataactaacaact

SEQ ID NO: 2716 - DNA, 1836 bp, Oryza sativa
tagtggtcgttaataccagtctcccgtcacaggtaagtcaccaccgtcgcatagaacccacctgaccgccgcagatgactcatctctgacgggttgtaacttacgacccgtcactgatgacaaagcaagaaatacaatttttgaattttaaacgcaacaaaaaacctcaaaaaaatattttgaattttactagccatcctatacatggttacacatcactacctacaaattcacaatttttcacgcaatataacttggatgctacaagtgagattcgaactcaagacctcaacctccatatagagctcccttaccaactcacctacttaacacatattgactactaacccaatgttattattttgtctatgcttgtctgaatcatttaacatatatttaacaccctaaatgacttcaaatgaaaatattatcaactaaatagttatagatctcatcgtgttttataacttttacatagaaaatatcttcatccgatgttgtttgaagaattcaaaatttcatttttcaaaatatatctcactttataacatgtaaattttgtgaaatgaaaatattttcaattataatgttgtagatctgattgagttctatgactttgatacggggcatgtatccatccatgtcatttgaaaaaaaactcaaaattttgtttttaaaagtagatctgatcacttgtaatgcatgttcggggatgtaaatgatctctaatagaaatgttgttagttataaagttgtggatatcattaagagctacaacttttatataggacatgtttcaatccgaggtttttttgcaaaatttaaaaatttgaattttcactcatcactgacgggtcataactaccacccgtcagagataacgttatctgtgacgtgtgttagttaaaagacccgtcagagatgagtggtctcttttgtgatggttcataatactacacccgtcacagatgacatgtcatgtgtgacgagccatggttgtgacccgtcacagacgatctgtgacgggttacaagtgcaagccgtcacagatgacttcacatctgtgacgggtcctccctggtagccatatattgaagaggatattttttcggcccgtcagagatgactcatctttgacgagttgcgttggcccgtcacagatgacccgtcactgaagcccggatctgtagtagtgtgaaccgcccgcggtgttcgtccagttgccggtgtggaacaccgcgccgaggtaggggatgtccggcgagatggggacctggcaacaacccgtcccggtgcacggcgcgccgtcggcgtgagctcggcgcagtaggtgaagcagcccgtggcgtacaggtcgtcggcggcggcgccgcgcgggagaagacgaacgtggccgttggtggacggggaggtggccgatgacgcgtagcaggcgtagctgaggccggcgtagagccgcgagctgccgtgctcgccgagagaaggggggagagagagagagagagaggggaagaggagaaggaggaggtgagatgacaggtgggccccaccatttttttaaaaaaaaaggaaatgctgactggattgccacgtgtacgtcacgtaggataaaaccgctttggattgtgccagtgggggtaattcgtccggtattgaaagttcgaggtgagtgatgtctggttttcagatttagggggtaattcggtcgaccgcgatagtttaggggggtaattcatactttttccttagatattctattataaaatttaaagttatgtttcctcaaaattgttgcgatttcattaaccaaaaagttatagactaaagtgcatattt

SEQ ID NO: 2717 - DNA, 2674 bp, Oryza sativa
acagcttattaattattatggctgagagcctgtcagcctgagactgatggagagtggccggtggtcgccttagtggcagctgtccatctcttccatcacgcatgcaggggtcagattattccacccgcatttctttgcaatgtcctcgatgcagattggcggaaccaccaatccaggatagtggaatgcaatcagagatgtccagattttgtcgtcactaaggtcgtcatcccggcctgttaacacaatacaaacagaattaattagcgcatgcatgcacaagtaattaattaggaatagaagcgctaacacaatacaaacatgcacaagtaattactactaattaggaagagagaatcaagctcagctagattgtgagaaaacatgagatggatggatggatttacctccccgggtttcggtagcggaagtaatagttggacagataacaagaactaaaataagaacacctgctatcttcgtcatcttggtcgatttcatccgatcctttgctcctcctccgtataaataggctccagcccatgtgacgtgagtataataattaatataatgtatgcgaattttgctcaatatcctcttcaacgtcttactatgtttttggaatttggacgtgactacacggtaattaagtgtgcacatgacccgttcgcggcagcctccgacaacaagattttctccttccactagtaacgtgtactcctactccggccactaatcatgcatgagcggcatgacagaaatgtcacattcagagcagtgtgattaaagcgaatgcatgtctttctgtccacctgcttgtgcaagcaactgttagctaatcccctcctccactttactgtctgtgtgctcatgcagattggtttaaccctatagctaatataattaattaactaggcatgaaagtaaaaccaattaggaaacagcagagaaaatgtgacctggtgtaaacgtacatctatatctatctatcatatactaaaagttcattaaattaacttcctacaaaaactcccaagccgccatgtggtctcctacaaacgctcgtaaaccgccacatggtgttctaataaattaggaaaaaaaaatcggtggacctactaattttacccattagatctccatctcaaagaaaaaaaatcaggtatacccaccacgatactcccctccacatgtggaatcgtatgtcctcactaatccccacgtatacgagttctacatacaaaccactatccaccgatcgctaataagtcatattgcttacaagacatttcatgcacaatgtacctaatataagaatcagctgatatccaatgagcatgcatgcatgtcatctagcaccaaagataaagaacgatactccgcgagtaacatcaacaactgataggtaggtagagtatgccaccaagctacaaccaacagtagttgactacaagtaaactgagactattagtagtagtgttccgacaaaatacacctaagttgtcacgtgactctaataaattactccctccgttccaaaatataaggcacaaccaacattaacccaaagataaagaaatagttattatcatcttgtagtttggatcatcctaataaatataatgcatgcatccaatagaattagagaatgtgagagtgaattgtttaaaaaattaataatttaatgaagaagatgtcataattaattgaatgcatgccttatattatggaacatataaagaaagtggttgtacattatattatagaaccgagggagtaattgttctataaatataataaataaaataaaacaactgatcattggtttccacttaaatcgatggaccaagatatggttcgatcatcggaggcgttttagtttatatggttagggaattcatgttcatatatacatgttttagtttatctgcagctgggtagtaaaaggctagtggtagctaagcagcctagcagaagtgcagagaacaaatgtaatttgatcagtttcactctcatccagctgagaaccgaacgtctccgataaattaagaagacagttcaagtcaaaaggagcgaggaaattagggcaaaagttgatgctagtgaatctgaaatctgtttacacccaaatttgacacctatagacgaaataggggaaaattgccaaagtttggaaagtgacgggtttccttcacagggccggtcagaccacaggtgtgtgggcggtctgaccggctagtagggccggtctgaccgcaggtatgtgggcggtcagaccggcagggtccgagtccgagtctgttttcgtcgggtctcgggtttccttgctcgggaaggcatgtttcgtgtttcctttggtttctatcccgagttggacatggagaagggcctgtagagggcaagaccaacccctatttaagcgacaaggccggttcattgtaaaaccccccaaatacaatctacttgaatcgttcttttactatgtttttctattttactctagtttagtctatctttgtcggtttgcgccgtaaaccgtccgccgccgctgcgagagtgcgacacctctttttaggtttgtcctgaaaaccttccattttgcccacgagacgggtagtatcctatatcgatctaaatcggcctagaggctgattttgatctctaaatcggctct

SEQ ID NO: 2718 - DNA, 1586 bp, Oryza sativa
ttggtttctcaacataggtcagatcctcttggacttctatctgttcaagattaccttcttccgtacgtacccttaaacacttcttcaattgcaaaacatggaacacattatggactcctgccaaatattgaggtaacttcaactgataagcaacctctcctcttctactgacaatcttataaggtcccacaaaacgcggagccaattttcctttggtgtgaaaacgatgaactcctcgaaaaggcgtgacacgaatatacacatactctccttcttcaaaactcatatctctacggcgattgtcggtataactcttatgacgagactgacccactcgcaatctttcctgaatgattgtcaccttttcttctgcttcccttaggatatccgtctcgaaaacctgacgttctcccgtttgctcccacagaagcggagtgcgacacttccgaccatacagtgcttcgtaaggagccatctgaagactagcttgataactgttgttgtacgaaaaattctacatagggtagattcttatcccaacttccaccgaagtctaaagcacaagctctcaacatgtcttccaaaatctgattcaccctttcggtttgtccgtctgtctgcggatgataagcagtactaaaattcagcttagaacccatctcttcctgaagtttcttccaaaaatttgaagtaaactgactgcctcgatcagacactatcttcttagggacgccatgcaaacacacaatccttgccatatacaattccgccaatcgacttccagaataagttgtctttaccggaatgaaatgagccactttggtaagtctgtcgactattacccaaatagagtaatggcctgatgacgttctgggtaaaccagtgataaaatccataccgatttcttcccacttccattcaggaatcttcaaaggctgtagcaaaccggcaggtttctgatgttctgccttgactcgctgacaaacatcacatactgctacatattctgcgatttcacgcttcatacttgcccaccaaaatctttccttgagatcctggtacattttagtactaccagggtgaatggagtataaagtatcatgagcttctttcagaattgcatcttttaagtctttgttgtcgggaacacaaattctttcacccaaccatacagttccttgctcatcctccaagaaaccgatagcttttcctcttctcatattcttcttgatttcttgaatatccggatcattaatttgggcttctctgacttgatcaattagagtgggcttcgcttctaaagctgcaacgaaacctctactgacaattcccaaatttaatctttcaaattccttgcataattccaatggcaactgtcgtccttcggtagcattgcaatagcctttcctgctaagagcgtctgctacaacattagcctttcccgggtgataatgaattcccatgtcataatccttaattaattccaaccatctccgttgtctcatgttcagatccggctgagtaaaaatatactttaaactcttgtgatcggtgtacatctccgtacgagtaccgaaaagataatg

SEQ ID NO: 2719 - DNA, 1738 bp, Oryza sativa
tgggcttgacagtccttgaagtgcgccgcaacacgggttgatggtccataactcctccctgctctgcatcttcagcttcagcttgcatcttctcatcatcgtcctgctctgcttccaagctcagttcttcttcagtatcttcctcagcactgtcagatgacgatctgacaatcccttccccttgagttttggcttgtccccaagccaaagcattaggaaatctggccttcaagtcatgcagatcctcccaggtagcttgtgctggaatagtgtcagaccaatgagttagaacctggtgaacagtatggttaccttttttggtaagacgatgatccagtaatgctataggatactggacagcagagtaagttggagataatggtgtatgcactgatggctggaacccctttgcttcctttaaaagtgatacatgaaagactggatgaatggaacttgtggctggcaactgaagtttgtaagcaacagtacccaacttctccaggatttgaaatggtccaaaatatttgaaagccagcttgtgattcgctctgggggccactgaactttgcacatagggctgtaacttgagatagacccactcacccacctggaactgtcgaaaacttcttttcttatcagcaaaaagtttcatttgttgctgtgcacgatgcagatgttgttgaactaactgttgcatcaattttctatcctgcatccaagttatcaactcactgttgtcacagtccctgatgctgatcccaaaatggcgaggtggatatccatacagggcttcaaatggagttctgtcaatagttgaatggtatgagttgttataccagtactcagctaaatgcaaccaagaaggccatttggaaggtgctgactggacaaagcatttcaaatatatttccaggcattgatttcctcgttctgtttgtccatctgattgagggtgataagcagaactgtaatgtaatttagtgccagatctcagaaataactgctcccacaattggcttgtaaaaattttatctctgtcagagatgataatttgtggaagtccatggagtttgtacacattactcatgaaggcctttgctacatcaattgcagtgaaaggatgtctcaagggtatgaagtgggagtatttagaaaatttgtccactactactaagatgcaattgtagtgactggacctgggaagcccttcaatgaaatccaatgatatagtctgccaagcacctttagggactggtaaaggctgcaatagtcttggataccttgatctatccggttttgcttgagcacaaatttgacaattggcaagtgtttccttaatttgggatttcattccattccaggcaaataattgtttgattcttctgtaagtcactggaaatccagagtgccctcctactggactggcatgcatctcattaatgattttaagttgcaagtcaggactgttgcctatccaaatatttcccttatatctcaagactccatgctgaagtgaaaaatgaggcttagaattagggttaagtgtcagggcagcaactaactgagtagcatgtggatcagtatcatagctctgcaaaacttccatcagccattgaggaacacactgagaaatagcattgaactcttcctcagattgctgtggttttctagaaagagcatctgcagcagcattagtactcccctttctgtaacaaatcttgtattgtaaacccagtaa

SEQ ID NO: 2720 - DNA, 557 bp, Oryza sativa
tgctgtataaagtacatacctgagatcacaaaattaagggggatattttggagacaatgtctctgaatattgcaaaaattaagaaagcaacaactttggtaattcaactgaacataaatagagtccacttcttttactaggtcttactaacatgggggtttccacagtaacgtttagataattttctacataaaaacagttttttttttcaaagtgtgaaaacttcaatgcaaaagggctcttaccagaaaagaaccaagacaaatgtcgcattcttgtaaaagttgtagaggatcatatatgacattctttgataattccaatggccatgaactaatagaagagggaccaagaatctgaattggcccatcgcaaaatctgatgccattacagcccaatgccctgcttcttttgaccactgatgccaacaccaacatcagccatttgaatcattgaaacatcatttgcacctgaacaacaaaaagataattagcatatatcacatgtacatagaatggttctcacagaatattatatgccataatagcagaaccagg

SEQ ID NO: 2721 - DNA, 3758 bp, Oryza sativa
tattgtaggacggagggagtaactattaggggccaccgccacattatgggcctattcactttaatgtcattttcaaccttaccaaattttggtaaagttaccaaaaaaaatagttacatttagtttgttaccaaattttgataactatataagaaagactgctaaaattttagcatagttaccaagcaacttgccaaaattttagcaatgacaaaatttgataaggtttttttttatcaaagtgaacaggccctatattctcgtggtagaagggttgccactatacgagtcgctagagctggatcgaggagcctgacgcacaaatcttcaagccaatcaaacggtccgaaattctccttcgttgaaaccatgccacgctctactctcgactgctttccgtgtggaactcctaggttgtcagtcataactccagtactgcaaattttggctgtttgaagggtcatatcaaaggaacaatccatccattcagtcaatcgatccatggcctgtgtgtaccagtaggcgtgaagcagctggatagctaggtggccatgtgtgtgagtatcagacaacccagcaacgtgactccacacttgccgatcctgcaccgtccttttctccatctccaacgccttcccccttctgtccatgtcgctgcctctctctagatctctgaccgaggctagagtagctactatctccgtcccaaaataagtatagctgtggatatctgtacctaacgtttgaccgtccgtcttatttgaaaaatttgtgaaaaaattaaaaatatttagtcacacataaagtactattcatattttatcatctaatagcaatgaaaatactaatcataaaaaaattttaaataagacgacgggtcaatcgttgaacacgtgaatagtcaaaactgcacttatttgggacagagggagtacctagctagccacctgcacacatatttcatgcaggtcggccatagatcgaacaggagagagagagagatcgggcggggaagttgtgatccggttatgacatgtctaatcgccagcttccaggtcttgttgtgaaatgttcggcgaggaaagctacgtgtatttataaaagatcaattttagtcagggtgtgtttagttcacgttaaaataaaagtttagttaaaattgaaacgatgacggaaaagttgaaagtttgtgtgtagaaaagttttaatgtgatggaaaagttgaaagtttgaagaaaaaatctacaactaaacacggccaaaggtgtaaagcataaaaagatttcttgtacagtatatatgtcctaaaattttagccgatcacttctatatggccctactattttctcacttcctttatattactactgaatttcggtttaatcccttacatgccaattccgttacttgacagttgatcatttaatgcttatgatttatgaaaatgtctattttacccttagacatagaagaaacataaaatttgtgtataacattattggaagtgtagaaaacttactacatgaaactattatattgatgagtttgtgtgaggtacgagtattattcatgccaatttatttttagataatgataaaatttagtaatatttatttttattaattaaaagagtatattagcgtatttcggtgatggtagtataacaaatttgccacctgttgtatgtattatctaaaaaaagttaaactaaactaattattatgtttactgtctaaagatacactacacttactatttttaatatatattaaattttgtatgtataatacttcctcaaacaactactttttggtagactcacaaatttctatgttccttccatatccgagggtaaaactaaattttttacggtcaactaaatggtcaattaacaaaaaaaagtatgtgtgtgtgtgtgtctctctctctctctctctctctctatatatatatatatatatatatatatatatatatatatatgcttcggacaaaaaacactgttcaaaaacactatttagtttactgtttaaattactgttcaatactgttcacttcgagagatattttaactttaggatctttgcagggtggcgaatcctatttagacagcctcagaagcttgtttcagatgatgtaaagtcctactcggtactcaccgtatgcctcacctatctatctttttagaagcaacttaaaaagatattccaagtcacacttgttctagctaagagtttatcgtctccccaggcagttccacccgaagggaacacttctctacggataccgattctccagacgcctatgcaagatgcaggctaaaaacgagaacaaaccgaagaggtttctcctatagggtccttagcataaacacttgtctagaacaaacgtgtaggaatacttaaggaaaattacttcatattaaacagataagcttacatacggttttccctttcgggaaacccgaaggtaggtacaagcaagctgttcttaccttacacagcgttataacacaactcattgcttcaatatactatgcaaggtaggctaaagtcactactactaagaatggtggaatggagggtgagagcgcgcttggaagctttgctctgaatggtgtcttcgttgttcttctcagctgagcaaacccctccttttataggagctcgggaggctcgactgtgcttcaagcttatcttctagatactgtattttcacgagctggctcgcaccatggagatgcttatcttctttttggctttactttgtccttgaattggccaaggtggagacacctctgtacctgcgcctttcttttccgccgaaagcaatattctccacagtatttttaacagtcaaatgtcattcactgtccttgcattttggattgattcaaattcaattcatactttggtcattcgcccaaagaatggatatttattatcaatttatattatattgctttattggtcaggctgcccatgaccacctaaatccatagtatctacatcagaaaaggagacttcaaatttttcatcatatgcttttttcatttcttcaaatttgtcattcatttctttctttaattctttaagtatttcttctttcaattcttttttaatttggggggatgcttcttcaaatttttcaattattttccaatcgatatattcgccatccaaaggatctactcccttagtcaagcattccttatacgtaggtttttgggatgatccttcattcttaatatttgaacaatatgggttctctggagctttcttatttttggcttttttgcatttttgtatatattcttttgctgctggttccaagtagtagtttattcctaatatttttctggcctgagttaaagcttcatcaaaatctatatattttttccatgacaatccacccattaattttgcatctattttttgggctactatctcttcaaaagatatgtacactccaggaagctttccgtcaaaaacaacatatatgggtttttgtggtattacttcattattttctgatgttggcattatatcattcattagatggaaatattcagcaagactgtttaatattgatagcatatagcctttttcttccctcttattattgtattgataccagaaattatctaaaatgcattcttggacttcatctaatattatgtgggtttttggcttaaacttataggtattcggtgggaatactttgagcttattgtcttctccaaacgtgaagaactcaac

SEQ ID NO: 2722 - DNA, 3492 bp, Oryza sativa
cacaagcttgttttagacatatactacaagtcactctattttcttgactagggtaatatatgcaaaaagcacatttgatattatagtcaccctttcctctaatccaatcatgttcacaatttaattgatccatcatttcaacctttagacctgctaattcgtcaattaaatctaactcttcatcggatgattcatattcttcgttgatagtttcaacttcgtctgtttctatgatagaatatattgattcgtcatcttttatttcatcatcacaaactaatatgttttcgtttacgctatctataattagaaccctctcttgttcttcatatttactagaatatctcttttgatctttatttgggcatgttctacttaaatgatctggcgagttgcatataaaacacctgcatgttttgtcataggttttctttggattatatcttcttacatttcttttatgtaagaagggtgctctattatctgatcttcttaagaaataccttttctttgttctaatattattatggtttctattttgatgtttataaatccttttacttctaggcttgtcttctccatatgacaagggtatttgaactattttattgcagaaattgtaatccgagtgtttcatagatctttgggcttggatacccgtgcatatttttattagttgcttaaacacaaaagttatagcttgagagatattgatttcaactccttcagtttcctttttatattcttcaaatatcatacttcctagtgggtcaggtaatttattgaagtaacgttcaactattcccctgttatatccttgtttagcagttgtagcattatataaataatgttgggagaattcttttatgcctttccaacttgttaacgttaatttttctatttcttttaacctttcattttgcaaagttgtataacctaattccggatcttcagctataataatgttagatataacatttgcaaaattatgcggattgctaccagctcttttcaattcttcataattattaggattcttttcaacccattgttcccatagaaccttagcagattcacctaaaaatgtttctaagtaggttatcatatcttcaactttacttcctatattgtgttggttttgtatatatttttgaactattaaacctttccaaatactaataatattaggccaatcaatagggtcatgtgcggctaaatttaatatagcaccatcactcctctggttttgaaatttaacaggcttctcaaagtctcttctctttgtacccatatgcctatattgacctggtatatagttatatgaaaattcttctctatcagggggccattttcctgctgccctagctggtctttctctttctccttcgtttttcacagtaccttctccatatctttttctctttcctgttcctaagtccacttccatagcttccattgcattatcaagattatgtaaccctacttcatctaatgtgtttataaaatcattatattgttctgcattgtctatttcattttttatgttctccatctcatttattagattaatttcttcttcataactttcaagaaataatctttcattctctgcccattgctcttcttcacttaaaattttaccaagattttgctcttctttaccatgcttatcttgctctttcctctttatctgttctatcttggtttcttggtttttaaaaatttctactgccatatcttcgttcttctttactttctttactctagctaattctctatagaaataaagttctttatctcttattttaggccactcacacttcatagagttattatattcttcatttatttcctttaatttattttcgtaatattttatctcactttcttgatctaatttttccataaactctgaaacactatgtcttctattatctattatatttctatcatatgcttatgtttctaagtcatctgtggttctgggtttgtaatttataaatctaatgctggtatttcctttactattttgataacttatataattttcaggctgactcaaagttttgctttcaattaaatcactaattttccattcttctcctgccctttcttcagaacttatttttaaagggctcatgacagttattcccttagagtgcatattttcaatcacgtcatttacatttattttgtatttggaggcacttctattagttaatcttcctataaattctatgcttactagcaaatttgttcctttaaattcctcgtatccctttgtttgaaaaccaaaactcattttatctataaattcttttataggcatcattagatctggggctatatatgttatcaacatattctcattcatgtcaccttctaaaaatcctaatgctgctttatctattgtgtcccaccttttatctaacagagttattagaactttagctcctaatttctttcttgtcatacctttgattcctattatatacataccttggtgaatatatttataccctgaatactttaatccattttcaaattccttggctacaatttttagctcaactggctttgttaaaacgcttaactctacttctctagatattctgtataacccatttttattctcaaaaaatcccatgcaatatatttgttgaggtcttattgccctcagagtatctctttgatatctttcgagctgtttgtctacttctgcaatatcttcaagctcatctatgtcttcatttttacctttttgtttatcaatacaacttaaagatttatcgtctctgcttgctattcttctaaacaaactcctagataggtccatttttctgaattaatagcttgagatgaggtaattatgcctgttgaagccaaaactatctcttttcctttactagaatttattatttctaataattctttgatatagtcactgttttgtaatatcttattctgccttgtcttatattcctctagctcttttagcactgaatttaatttattactgacaagcaaatattgttcttcagattgctttcgttctttaaacaaatcttcaatccttcgctctaaatcttcctgctttttatcccaatttatataaaaattatatatcagatcaacaattaaatttaattgactattgttagagtgccaactatggtcttcaatgtgatttagcctacaccttatattcagattatctttggtagtaattacctttccaatattagcttctgaatttgatttctctatgatgactggctctgataccacacttatgcttcggacaaaaaacactgttcaaaaacactatttattcggctgaatactattcagtttactgtttattcggctgattactattcaaaaacactattcagtttactgtttaaattactgttcaatactgttcacttcgagagatattttaactttaggatctttgcagggtggcgaatcctatttagacagcctcag

SEQ ID NO: 2723 - DNA, 2213 bp, Oryza sativa
ccttcttgaattttgttcaaattgattcaaatccagtcaaacattgtttgcaatttaaatctctagctagatttcaccgagagcggcatccctgagaaaaggatccctgctcaaggtatccgccggctgacccatgctaattcatttggtttacagtttatcaatctgaaatgagaataagtagaaggcaagtgcatttataatctaatggcatggattatttttgtaccacaagtgggcaaacttatgcccctaacgaggtgtgattgctgtttgtgtcaaacttgatgatgacatacccgtcgatgacgagagctgcccctccgatgaggccaccggcggtgcatatgttgccacgggcatcttggctggtagcatcggcattggtccactggactggaggaccatcatagcagctctgattgatggccgctggcatcggtctggatgcgcacaccagagcccgacagcaatgacacgctccatctcaaccacatcatagtcattgttgagccgcttgtcagctgcgttgtgaatggctccctggccgtatagatcccagacccactcgactagtcggaagagaccattattttgatcatccagtagactcattggtctccttgcacataccacttctaataaaacaaccccaaaactgtagacatcagattcggcacttgctttaccagtgatcacacattcggggtcaatatagccgggcgtcccagaggggtgcgtcattgtctgtaccccatcagcatggtcaatgagccttgcgaggccgaagtcacctagcttcgtattgaaggattcatccagcatgacattgcttggcttgatgtcacggtgcacaacacattgctcccactcctcatggaggtagagcagggcggatccgagcccaataacaatgttgatcctgcaacatccaaacccaataactgatcagttcatggccatttgtcaattgcacattagcaaaaattctaatgaattagggaaatcaattacctcattggccatgtgaggaaggtaccattgccgtagagatggacgtcaaggctgcggttggggacgagctcgtagacgaggaggagctcgttgcggccatggaaccagccgatgagctgaaccagattgcggtggcgcagccggcttatgaccttgatctctgacttgtactccctcctcccttggttggaggaatctttgatgaacctctttatggcgacgtcgaggccctgctctcttagatagccccggtacactgcgccgaatccgccctggccaagcttctcctccgccgcgaagctcttggttgcgttgacgagcacatggtacgcgaaccgcctcggccccatcccgttctcgatctccatgatgggatcgccttccgtgtcatcgtcgtcgtcgttcgcctcctccgcctccctcatcttcttcctctgatgtcgtcgtcgtacgagtacgacgactgctaccatggccaagaggagcacgacgaacagtgctgcgccgacgatggctcccgctacaaccccgccacttcctgaaccggaggtaggcggtggtgacggtgacggcggcgccactggtggcggtgtggccttgggttccagcgacgagctgaagtaccatgaacgtagctgatgcagctcgacggatgtggacgtcgcggcggagaagccgacggcgacctgctccggcaacacgctcttgaggtcaaccttgtagctaaggttgtaatccggccggtgacgggggccactaagcccatagccgaggtgcagcctcatggccaggatgctggagacgttgtcgtactcgacgacggcggtcatgttcccgacgagggtgaagctgggcaaggtcaaggtcgtcttggacacgacggagttgacgtcgacgccgaggtggtcgtaggtggcgtcggggtcgtgcacgatggtgtcgttgaaggtgtcgaactccacggcgacgaaccggtcgtcgccggcggccacctagtcggcagtctggttggtgaggccgaggttgtaggcgtaggagccggcggacgggagcctcgacgggaagccggcgaggaagaaggccatgccggcgcccttgttgttgatgccgccgtcctcttttggcgggttgatgacgaaggagaagccggtggtgaagctggcaacctcgccggtggcggcgtcccagagaggtaccgg

SEQ ID NO: 2724 - DNA, 519 bp, Oryza sativa
aatgaagatgaattgataactattttaaagattttagtgtctacttattgaatgtgtgtcactaccttgttttgccagatgaactttgatatcagttttatgctctgggttgacgtttagtcaggaacctattggagtgtgttcttcatcagttgtacggtgtgcccactcagtcagtcagattagtttccattttgttattgcctagctgatatactgtaatgtaccactgttgatttttttcacgaatagccactgcatgttttatggtgtttgtagatttacttatatcctcttctacaagactggctcgcctactgcggagatttgttttggttacttgcaataggtctcaatattcggatcaatctatccttatttcttatgtgaaatagggaactcagggtagacttcattatacttgctggttacgtgaaacttataccggttgagctagttcaggaatatccaaaatccattttgaatattcacccttcactactcccagcatttggaggc

SEQ ID NO: 2725 - DNA, 606 bp, Oryza sativa
gtgtcacatcagatatacgaacacatatttaaagtattaaatgcagtctaataataaaataaattacagaatccgcctgtaaaccgtgagacgaatttattaagcctaattaatccgtcattagcaaatgtttattgtagcaccacattatcaaatcatggcgtaattaggattaaaagattcgtctcataatttacacgcaatctatgtaattagttatttatttaatactctatatatgtatcaaatatttaatgtgatagggtgtaaaattttatgagggatctaaacatggccctatatggtttttactgtatatttcttccgaaagtgcagtgcccagagcgggtggggggctcagcctcgggttagcttggctacacgcctacgccaccacccctcggaactcggagcccattgcttcctcggccccctccctcggaaggaaggcaggacaccgaggcctctgcaaaagccaacgtgccgagtgccgacgagcccgacacgttcaaacgacaggaggcggcgtgccgcaacacaatgccaccaccgtgccccggctacttaaccaactgggggcaacggcgcacatgcccaactgttact

SEQ ID NO: 2726 - DNA, 516 bp, Oryza sativa
aaccagtccatccctaggatgacatcaaggtctttggattctaacaagataagattggccagaaatggtactcctttaatttctattctgaccgaggggctacgttgcaaagagagtgcttgattacttggggtactaaccatcaaaggatgtctaagatcttctacttccatcccatgatttcccgcaaaactcatagataagaatgaatgtgtagcacctgaatcgaaaagtactgttgcaggaactgagttaacagggaacgtacccaaaatcacatctggagaatcttgagcttctgcagcagcaacatgattgacacgggcctttgatgctggtacagcagagttactctgggcagggacaacctacacgcgacggggcttcggacacttgtcagcataatgtcctgggtctccacagttgaaacacaccacgggcttgctgccttgctccctcttggcaggctgttgctgtgttggagctgcaacaggacgtggagtttgattgcggatg

SEQ ID NO: 2727 - DNA, 688 bp, Oryza sativa
cttgtgtgagctgtgggcttgtggacatgtatgcaaagtcaaatatagaacaggcaatggactatgctaacaaggtattcgaaaggatgcggaagaatgatgtcatatcatggactgcactaatatcaggatatgtgcaatctggggttcaggaaaacaaggttatggtgctgtttggagagatgttgaatgaaagtatcaaaccaaaccatataacatattccagtattcttaaggcctgtgccaatatttctgaccacgattcaggcagacaggttcatgctcatgttatcaaatccaaccaagctgctgcacatactgttgggaatgctctagtcagcatgtacgctgaatcaggctgcatggaggaggctagaagggtattcaatcaactctatgaaaggagcatgatttcctgcataactgagggaagagatgctcctctagatcatcggattggaaggatggacatgggcatcagcagttccacatttgctagtctaatcagtgctgctgccagtgtaggtatgctaaccaaaggtcagcaattgcatgccatgacactgaaggcaggatttggatctgatagattcgtaagcaactcccttgtttccatgtattctaggtgtggttacttggaggatgcttgccgatccttcaatgaactgaaggatcggaatgtgatctc

SEQ ID NO: 2728 - DNA, 751 bp, Oryza sativa
ccagtggtggacaatatattcccacagaacccaagatgtatcaaatttgaggcagaagacagtgcatgcaaggcaggatcagacaagaaatcactttttaggaacaaatatttcagtgctctaagggatgctaagggaggtataacatcatccatcagctgtgtattattcaaatttaggctttccaggtatttgagttcttcaagcgcagagagagacagtactttcacagagttttccatcatgaaacctgcaacatgattaaaatgagttactcgaagatgaggtacactgatattatcatataaaatgctgggcaagagaatcacaacctttgatacatgtgcgactcaggtttaaaattctcagtgaaggcatcatgcttatgtataataaagcagaatcatcaatttttgtatgagctaaagacagtgttgtcagacttggaactgttcctgccagaacacacagtgcttgagaagttacttcagaattactcaggctcaaaaacttaaggttcattccaatatttgcaatatattcaattgcatcgctaattattctgctgtagctaaggtccaagtgctctagattcctcatatttcccaagaaatacaagttgcttgaagagcaacttgacatatccaagtatgtcagtgaacttggtaggatgcttgaaaaaacttcatcaatgttgccaaatgatgctgcggagataatcaacttttccagatgaataagaacttggaat

SEQ ID NO: 2729 - DNA, 561 bp, Oryza sativa
acaacttcggtcagaccgcgatccgtcaaattcgaaggtaacttttatttccgctaaaagttttcagtttttgggtataccaaccattcacccccctctggttggcttagttattgtgattcgatcctacaagtggtatcagagccttgttttcttctttggacttttatcgatctagagtttttgccatggctactcctgctaggttttcaactaagcctcatgttttcgatggaacggatttttctcattggtgtagtaggatgcaatcttacattatggctgaagattatgatatttggagaaaagtttatcatccttatgtgattcctgaagttattaatactgttgctgcaaaaactgagtttgaacaaaattgcaaagctcgtaatattcttttgagtgagatttctcgttcggattatgatcgtgttgctcatcttcaaactgcgcatgagatttggaattctttgagtaattttcatcaaggtacaaataacattaaataactacgtcgagatcttttcaaaaaggagtacattaaatttgagatgaaacctg

SEQ ID NO: 2730 - DNA, 696 bp, Oryza sativa
tgttattacatttcaggatgttgtgcccttgacgtagctgtgtgagaacgtcaaaccagatttgcttcgagatcgggcattcgaacaatggttgacagtttcaagattccggaagcataactgacagaaataattatttggtcatctcctgatctgcaactggttagctgtccacacccggttttgaagcactagccagctgaaaatcttgcaatttgctgaagcccattcctcccaggacaactttgttgatggcgatagtaccattccgttgaattggaattgatatgcagattttgcactatattccccatcggttgtccatcgcaagacaatcaaatcttgtacctcctctgttagttgtggggtgtcacgggctagaacttcccataagaattcatcaaggagggggatagtgaggttgtggcggatgtcattgatccatcttctttgttgcagagcttcctggatggtgctgtttttcctcttcgaatgcctatagaggttcggcacttgacattttacactttaggtaccaaatcaattagattcttagaagctcgccttttgcccatcaccaatttggactttcatcgatgcatcaaacgtatccttatccaattcatcgcaaggagttttagttccaatccaaggcttttctgacgtgctccattcaaaccatagccaccttagctg

SEQ ID NO: 2731 - DNA, 1987 bp, Oryza sativa
tggaaaaaaatattttcgcttttattttcgaaagtatacttatctaagcacgtaaccatgaaagattataatttagatttttttatatgaatattttagctttttaatattacggtcaagattattcttctacttctttaaatatgaattcaatctaacttttgaattaaaaattaatacttttgcgtcgaagctaaagcagaaattttagcaccgaatggatggtacacctcacatccactgaccacacagattattgtttaattgttaacgccattattcggtcctatccttttccgtttacgcttttgcaaattgcactagaatacgacatgctctgtactttgtgcttctggtggtactacagtatatatactggtactccgaagcctctgagagtcaacttgcccaagatattacttatttaatgcgctaattgtacaattttctcacgcaatcatgtatttctctgcgcattatacgcaccgttcggctatcaacgtcgcgttttcctacttcatttcgtaggccactaatacactaccaccccaaaggttagtagctcatgcgcaaggcccaatgcgtagataaggaagtttgatagcaatgtgtcaccaacattttatcaccctgtggctaatacgccaacgaatcgtgtgcagctttgcgcctgacgcctgacaaggtgcatggcttagatcgctcgatcaaaagcagtagtattactattgcacaatacagagagacactcgtacggggtgaagcaagtatatgcgtatttttctttttctttttttttaaaaaaaagaagtagagattgcttcgcaaattgcatggtgtatgggtcaacggaaatcacttcagattgaagacaaatggaatgccgcagtaaaaaaggcttacttcgaatgttggatagactttgctggaacgttggcgacgcgatcgagtcgtctacgtcgtcgtactcgctgttgccgttgccgtcttcgacctcaccgtcgtcgtcttcttcatcctggctgaggaagtccatgacagaaactgggctccgccgctgcccctgttcgagctcttcgtccaagtggcacgtcgcctcgcaatccattttactcgcaacctgtttctatcaatcacaaaaatggagtttgcgatcaatcaagaagtagctaaaagcctaaaaccgagtaagatcaagagcacaaaaagaaaaggcgcaatcctttatgaagcaatcgattgccaagagagcagagagcgcacctgagtttcatggctctgacggccggcgacgccacctgcgtggcgaccctcccagctcctcctcctaggcgacattgccggcgacgagccatcatcccttccgctaacggcagccgcagagcagctatccaccctactgttcacctcatccccctcccctctccgcttcctccagaacccgcgccccagcctcctcgagaagctcttggacagcgcggcctctcctccctcccgcgctgacgacgacggccggatcaacagagcggccctcaccgcggccgacaccctctcgatcacggcgccgttcctccgcctgccgctccctcctcctcctccccggagctccgcggcgagctgccgccgcgggtagcacccgaagccgtcgcgggagagctccgcgctggactccagctccagccactccttgagcatcagcagcggccttgccctcccctccagctccatggacgcagctgcggtcttgcactctcttgtgcgccggggaagcagaggaggagacgcgagccgcgcgtgcacagctagtgtaagggattggcttggggtggtacgtgcgtttttagtctggaagctgcaactctgagtcgagtcagaggcgcagagggtgagagggatgtctggacattgcaggccgcggttaattaagcatgggaaagggcgaggatttgggagggtttgcagatcaaacagcgcccacatcggatgc

SEQ ID NO: 2732 - DNA, 20244 bp, Oryza sativa
aatgaccgtccaaattaagcaggctagtatacctgaatgcatctgactgtcggtcatggtataatactgccatttcttattgtcggtagtagtctaagtttgttttgaacattctcaaattttagaaaccaaatttgagtactggagcatataaatgcataacaagagaaaacatgtagtaatagcttgcgtgaaacgatgggaacaaaaggcaactggccaaggcctacttctttttttcccaaatgcaattttcgaagttttgtatggagagattaagggtttgttcattaaaaaaacttaccgtaataccaaattttagtgaggtaatgtaaaagttgggtggtatatggtttaatatatttccaatattaatagaaatttcgtgagtggaaagtttcactaaatttttactcacaaaattttggtacgattgttttggtaatagtatgtttagcttgttacgttgccaaatgtcggtgatatcaaatttaagaagggttgaaaataacaagagtaagcccttaaaaagataggttggttgaacaagaaatgattgtaattggctgagacgagaaaataggtaacgaaattaaatggatgatgagtaggaaaagaagttatttttcttgacaaattttaaatactaatttggatagtgaggaggggagggagtagcaaacaaaggacctgctatactaatatgagatgtccaagaaaacataagaagttttacatggcataactataaaaaaacataagaaaataaatggaagattattgtaattcgttgagatgagaaagcatgtggagaaattaaattattgttattatcattaattgaaaagtgggaggatatccatatattttaggacaaaattaaatggttaaagtgctatattttagaacaaatagtagaaattaccatgttgataaaaaaatagatagttaaaaaatataactgtataaaaaacataagtaaaaaagttgtatatgtttttcccatcatgctttttgaagtccattgtacactgtcgtgtatttggggacaaaacacaaaatgcaagtaaagaacataaaatagtatttacatatcaaattcaattatactttagaatctattttatatgaaatgcaattacatctatgaaacacatgagctaagaactgtatgtcaaattcaattattcttaaatctaattttgtgcaaaattgcgcgaaaaatccaatagttagtttatgtcgtacaacgaatcatcagtttgctcggagtaatcatccccttggaagccggatttgaattcgcggtggcaaagctcaaccatctccttatcggacgcaaaggcgccgtgcgcgcgagtggagctgcatgccgggggcagagccgattcatgtgccggccaaatagttttagcgcgcgtcgcggcgatcggggggcaccgccttgttcaaaaccggtggactcgccctgcgccgtggccggccacgcttgggcgcgccgcgcgcggggtggtcgcgtcgcgtcgcgtgcgagtgaagccgcgcgcggccgcgcgggcatggagatccgcgatctcgccaaggaggggaccgaagcgaaacgtacgaagcggtggtgcgtgcgtgcgcggagtcctccagcctgcaggccggggtttgcgggcgtgcggatgcatcaccgcgcacgctgtgggggtgtagggtgttggccacacgcacacggcgacgaggcgccgttttggctcggttcggtgcgctgctggatcgcgagaattacataattgggcaggcggccgtagtgctttattggattcccgggggcaatcagggtttaggcgtttagtatgggttgcttgctgtggttagcgtgcttgggcttttgtacagcttgtatcattattctacgtaccgaatacgggacggcgacaaggtccgttgcaaagatttggtagcaggtggtgtacaatagcatgttacattatcttgcgaatttgcgatcgattggttgccctttcgaacgtatttgttgataacagaatacaggcggcgtagccttagttttcaattgtttgtttgttggcttacaacccacagttaaagttcaaatatttaaacttaaattttaagttgaattatgagatttttttatcgtaatttatattctagtcatgcattaacttatatactattaatgatatttttttcttcgacttatgaatattagcccaccaatcttttatctttatatttaatgaatatcggcacttaggcgcgcccattttattgaatggagcataagaaaaaaaaactatatgagagcaatttatggggaaaagaaaaaggaaactaaggtatgatctatgcaagatgtttcgttcttgccagtgcctatgttttggtctcctcttttattttcttttattttcaccgtaagagatagagtcgtaagttatgtgtgttcgaacgttaatttctctcctttcatatctcccagacctcccatgttgatattagcccacatcgatcgtgtccttattttcagtcaagaaaaaaaatgacaggggtctaattttggcaaaatatccaaggggctgagaatggcatgttctgttattattctatttttttcatcgaaaaggaggagcaactggccaaatctacatggttggattcgttcattagcaattcagtggtgctagtcagttaagtaaatgttgaatatataaacatatattgatttaatttagtctaaataaaacatagcattgcacatatctatacctaattaaaaataaggcttccggtattattttagtctatccgtctttttttattgtcaccgtttttcattttttttccattccactttttttacgtcacggttttttcgcacgcggtaagaattcagtttttttatccacctgttttttcgtcaccaggctgaaccctagcgccaccgccacgtttatgcacgctggcgagcgggacgaaatagactattagcgacgacgcagtacatagaaagaggcaaaccctaaattgatttcgtgtgtattgcgagaaggaggctgctcgatttatatagagatattagtacatgtgatcaggatgcctgcacgatcttcatgtcgcgtaaccgaaccggataagtcatgcataacttatccggactccacgccgctccacgcacgatctccacactgcgtaaccgaaccagataagtcgcacggaacttatccagactccacgcacagattattcggtgtgtttccaaaaacaaagccgaattttgcaacaaaataaaactgcaaaaagaagccacatctgcgcaagggtggggaaccaattttggcagaatattcacgcgcatgtcgcatacgcgtcgcttggcctggcggaacgagcgagcacatgcgtgtttctcttgttttctccaccacacatatctcaagtggttaagaaagtatcatttcttataggggtctccctctcttaagagattttatgattttaaaaaattaaacttcaaataggttaagatccatctatccaacagtaaaaatactctagaacgggtggtgaatggacagatcacgcatgggcaaatgcatgtagccatttacttttgggtaatttgaaaccatgccattataattttgtaaagtttaagatataccatcggtatctcaatgacatgtaggacccacatgagtcaatgacatgtgggtcaggatgccatatcttaaattttgcaaaattataatggcatggtttcaattttccctccatcattattttctcaagtttaaagtgacatggagagtcgacacgctgaagtccttttctgctgtggttgctctgcatctgatctctgagatttggggtctgttcactttgatattattttcaaccttaccaaattttggtaaagttgccaaaaaaaatgactacatttagtttgctgtcaaaatttggtaactatataagaaatcctgctaaaattttagcaagctgccaaaattttggcaactatactaaaattttggtaatgccaaaatttgataaggttttttttggcataaaagtaaacaggcccttggactgggatgccgtccagaaacttccccaacagttcaagagctcgtcactatgatagcttgattttgattgtgatcaatcaaattcaaatcaggaagagtatattgtagtacgagcgtagagtggcggaggatggaaaaaaaataaggtgtggcagcaacaacacagtacaaacaatgtcatactactaatcaaaactgtatagatttgcaatgcgctgatctagggtattgtgcacattagttgaatgctactcctacattgtaattccatcatttagttgctgaaatatagagtatctacgtgacaataaatagacacgggccaggatgtctaataagagcacccgcaatagtaaagtaaggtgctctctataaaacatatacaactcagcaatagactagattaatagtaaaccacctcaatagtatgtctacaggggtatctatagctctctaatacattgcctcgtttttctctatagactatctccaggttagtagatagctttgctctctctcttcatttaatatcttcgaagtagaaaaatatactgacatagatctcttgtagagagtctatagataaccattgtgggtgtcctaaaagatactatttaatagtaggtgcatcggtaaaaacacagtgattagtatattcattagtgattagacgttaattgtacatatgctcactgacaaaatctaaccataccggaagctccgccgcttagtagaattctgaaattgtccagtaaaaggtaccagtcctgggtccaataacgataagtcgatacaatacgacgatgcctagtgctcccgaaatcataattagatgcaacctggtagctttgctttttaaaattcaacaattagctcaaaacaaattccaggaccatcggacaaacaacaaaatccaccataggtccatagtcgtactagtaaagattctggagcagtgacatcacaaccaaatgctgggatagcgatcttttcctctccccttcctgcttccgcgtttatctggaaatgagaccatttgtagcctgtaccgtgacaattccagatggaattagctgatcgaccatatatccacttcattagctccctcgagggtcataaccacgtacaaggtcaaatatgcagcaaacttagctgcttattagacaagcctgggaggtgaggcttgttactacagaaactaaagggatcatccgcagcaagtgctatttctggcgccaataaaatttttggcccccattgccagtgtcgcacgagcatggagccccccctaccaacctaaaggacactcctctgctccttctgatcgcattccattttcgtcagaatagcagggaaacggcacaccataagtacggttcgtacttgattatataccataataagctgtacattgagtcctcctgctcatcagggctggttcggttcaggtgcacgggcgatcatcagtagctccatagattgacctcgcagtcgtagtcctcctcggcccacgtcgattgccctgccaatggcggcggctcgatgagcattccctgtgccatgtcgaggtacccctgcatttcgaattccagtccgtccatcgggtagcaagggaagtcggcaaagagctccgcgctcgccgcggttgcctgcgcagcgacagcggccgccgcctcggcagccgcattgtgctgcccgggcgccgggcggaacagctcggcggcctcgaccgcggcgcggcgtatctcctcgtgcccggcccccagcggcggcacgcggagcctgcgcggcgagtcggcgaagttgaggcaggcggcgcggccgcgcagcgccatcgccgcgacgtcgtgcgcgcgcgccgccatctcggcggtctcgaaggtgccgagccagatcctctgcttgccgtgcggctcgcgcacctcgcagacccacctcccggggttcctgctgcgcacgcccttgtacaccgggtgcctcgtctccttgaacttggtcctccccgcccgccgcttgggcggcgccgacgacaccgtcatgtacgagtcctcgtccccgtcgccgcccaccggcgacggcgtccccgacgaggagtacccactgccgtagtacgcccactccatcgatggatcagttcactcgacaaggatttgaaattatccgatttggtcttgatttgggaggaaaggaaaacggaccggggcggcggctttatatagttatgcacttgacgggtgggggatgctgcgagcgcgagagcgtgcgcgtccactgctgctacgcggggtggcacagtaggtgccagccagattgaagggcgatgggcgggagccgggtccgcgcgcgggagggggggtttgggctctcgctctgcggttggttgggtgagtgggttcggttggctgtcggaccagctggaggttgctcggacgcgatggggacgcgcgcgacgcgcaggcatggggcgctctttccctctcctgcggggagcggactctgcacggtgggcttgggctcgtgcttctctgatgcggagtttactgggggttgttactctggttttggccgtttggggctttgtggtgacggggacgtaagctgaaagaagccggatcgagagggatcgtgattcattgctcggttgatgcggacgcgtgtgagttggagagcgcgtgattcgttgtcggagccgtggtttatggatggatggggttgcacttgtggggttgatgacgatgctgatgccttccatcgttccctttaatgcacagggaaacatacatacgagcttcatgtgcacactccgtacacaccaattagtaaatgtcacaaaaaatctataaaaattagacatttactcgtaatagtattacatatatatgaaaagtctcgtattcaaatttattgtattttaaccgtaaaaaaaatcagacagttttaagggtaaaaatttgtcaaaaaattgtcttttttattacagctaaaatatattgaagataagatttcacacgtatgtgtaatactattaaaaatatgtctctaattttttctaaaattttctgtgatatttgctagctggtatatacgggaaacttatgtgtatagaatatattcccaatgcacatatgctcatctgaacgtggtaagcttatgtttattttcacgcacaagttcatcctaatacaacacaggaaaccccatgtaggcgtaaatgacttgcacataaagaaagacaactctcacagtttggcgaactagcatatactactaatcggtagaattaaagtttaaatgcacatatcatataataatattttttttgctaatatgaaattttaacaattattaaagacaaataaaaatgcaccgtgacgtttagcacgcgcatactactagtactactaatcgttagaattctgatgcatgtttcatcactccacagtttcaaaggacgctttgatacagaaaaggtacaaagagcagcatgcactaatcgaattctgatgcaatgtttcatcgctccactgtttcaaggacgcttgatacagagagggtacaaagagcgtcatgcgctttgttgctcgagccgtataacaacgggccccactttagtactcctactatggtggacttggtcagctggtctgatgcgccacctgccaatcgacggataccgactgggatacggctgcattatctagcagccagtcctttttgccgctaaggggaatagaccgttggtttggcagttagtacttcgcatctcgcaagctggtttctcgcggtattctggatgggctcttgccgtattctggacgggctcgcggtattctggtctggatgggttgcgcgcatgcgcgctgcgtcgctgccaatggatgggacccgtccgtataaaacgcagcgtttgccaccattgttgctggcatatcttcgatttggactttttaagtccaagaggattttctccacgagaactgaaggctgaccagctgaaaaacagagaatactcctacttggctactacactcctataggtcaaaactacccgtgcttgaaattctagaagccctttgtagaattctaagcttctactaacttctagtagatgattgacatagaaatgtttccagtactagatgattgacatagaaatgtcaagctctcactttctaacagtgtcctgactctgcagctgcttcaatgctgtcatttagctataacaacaaatgttactggtactcttatagcatttagtaccacttatatgcatgtcagtacgctacatcaggatgttcttcttgatgggtcatatttttttaccggttttttatacatgaaaaggaaactttgcatggacaatcttttttggttggaacattttttttatacatgaaaaggaaacttcttaagggattggaaggggaggaagaagaacagccatgattctatagtagtctgaggatcaacaaaattatactcatatcctctacgttttgcagttcatagaagttcctaagtactctattcgtatgaggaagcatcaatacgtaggatctggagaatgtgttatcccctccgatttttaatatatggcacctttacctttttatatatatatttgactatttatcttattaaaaacaacatgattgtcatttattttgttgtgcaattagatagataagagatggggaattttcgaactgtgttgaaccttatttcttgccaacaactcataaatggagccagtaacgccattgaatctgcatggcaaatgatatttctcgttcatcactaatactaatttcacaaatattttcactaatcaacaatgggtatgaaactggtggagctagggcggccgccttaccaggccggaatctagtttcgccgctgactcatctcccacggctaggcctagacccttgcctcctgcccttctccaaaaaaaaaagttatctcatgcacatgagtatattatattaagaggtatttttaaaagtttgtaaagaaaaaaatataaggtcaattttttaatggaaaactcattgaacgaagagggagaaaaatattatccaacaaaaaacaagtgagctatatcaacatattgatatttggatgttgggttatgtataaccatataaagtgtgaggctctagctaactttgtcctataaatatatgtggagatctgatagaataataataactaagggattttactctatgcactccagaaaaagaaaacaaaagctcccatacacgaactcgtggattgtatacgtgacaaagcttgtatatggtgtgaggcactaggtcgacccattgtatggtgggccacatcagaggttacatggtaatctcagtgtgtaaatacttttcatgtacctttagtctcaggtttgttggggtcatgaatccgctagtgattgtacacagcataacaaaggtatgcacaattatgtctacaaggaactaatacaaatactacatctacatgctttttttctttaaaacaatagttgacatagaattcattgtacaaatagtactagaatgtcatagggctcatccttagtattttgtaagatctagtgcatgtcatcggatggaatctactgacagtgcgtggaccaagagacaacatcaaaagaaacttggttggaatatattacataaagcagttcaattattataggagttttttttttctttccgataaggacatacacgaacacatgcacaacactgctacacatacaacactatattgaagcacccacaaatacactcttaaccgtagtaaaaagacaaaaataagtggcacatctatgatttcactatttacgagttttgggagccctcacaatagtgctaattttcgcttggccggccaaattgcaggattacacgctctccaacaatcccaaaagagaacgattgccgggttggtcagggactaattgtcgatcttaacccttaaaccttgggagctaacatagagggcaacatatcctatgcacacaggcccttacgtgtacacacgtgcacaccaactaaaaaatatcaccaaaaaatctagaaaaaatcatacacatactttcaattgtattacacctagggttaaaatcttaacgtcaaattcattatattttagccgtaacaaaaaaaaactgatagttttaaggttgcaattttgtcagaattttattttttttgttattctctatgtagaatgaatttaaagatgcgactttgcacgtagatgtaatactattgaaagtacatgtatgaatttttctagaattttttgtgataatttttagttggtgtacatggtgtgtatacgcgagggcctgtgtgcataggatacgctcccaacgtagagatgcccagattcaagttagcgtggcgacaaactcacggcggggcacgaaccgtacggcggcccatacgtccgtgacggcatgattcccatccctatccccacctcgctcgcggcgcggcccaccagcgccgtcgtgcccctcgtccgcgtcgcggtgcggcggtgcaggcgagatccgcttcgctcagctccctgcccgaccgcgccacggcccgtaggccccccgcgcgcgcaccgcgcccaaatcgatcgatccccgcgtcgtatgctgttgctctgctccgctcaggttgggacgttgggtaggggggatggcgtcgtggaccactcgtcctgtcatccatgcgcgcccaggctgcggctgtaccgcctgtgtacccgccgagccccgtatgcagacaccgggctgcaaaaggtgtgggtgtgctttgtccttttgtcagccactcagccttgcactcgtgttttatcgttctcccctccggctgtgtacggatcgcgtggacacgtgttgctccaggagagctatgcacactgttcagctattggccctggttgtgggcgtaattttgtactttttcaccccttttttgacttaaaaaaaccctaacggaatggtatttgttttgccctttcatatatatatatatattgggtgtgggtaaaatctgtgagactcaacttacccgtattatatatacatcttctgctgatgatttgtgaacctaaagctgttggtgatttgatgcggctgctgccgccaccgtcacaaccaccaaaatactcaatagtaagaatagacttgggctgtgtttagttcagcgcaaagtttagattttggttgaaattggagatgatgtgactgaaaaattgtgtgtgaatgacaggttgatgtgatggaaaaggactgaagtttgggtccaaactttagatctaaacatggccttggtaaaacacacaggtacacagtgaggggttatagattttcaactgctactgatctgataggataccagaaatattgacaagttcaggtatctttcctttttcacatctcaacacatacacataccaggactgaaaaataaactcatttactaaagtatttaatatggcaaaccgacgaagccatccatgtgttggaagcaagtactatcatatgtttttaatgaaagtaatcatctggttaatcatttgcaaaagatcgaatcttgttagatcaggtagtatcgagctaattaaccaccccaagtcgttggtcttttcatttttttcaacgaccaagatcacttacccaaaggccagagtccacacatcggtcatatctacacacactacttcactttttttttagaattactacttcacttcatttcactataagcaatgagcctatgagtgtttagaaaagggtaaggtgtggagcgatgcactgcgcgcacatcttacagttaatccacccccaaattcttatttcacacatgcagtacaagcatacacaaccacaatatatacagtactcctcatggttactcggcatttcaggaaattaaagtattatttttccttttgcagtactgtttatatatgtactgcactggccgatgtgaattgattaatatttcagctagtgagtccccagccaggtgaaacgggagacctataacttccctttaagccggcttcatcaagccaaaacaccacagagagaagccaagagcccgggaaaaaaagagaggagaaacaagctagaacagataggtagacatgcattagcagcagattaggcaatcagctgctgagctaacaccacatccagcatgcatgactggagagcaaaaaagggactccataccagtttcagtttgtagtttgtacctcctcgtctctccacatcattccagcatcatatgcaagcttatcatatcaaatacttagtggtactgtagctataacgagcggcagtgttttggtttcatctccatgcatgcatcaagagtagtagttaattaattattaccgtcatcgatctcagttcatcgccagccgttaccatgcatggagggattgttatctatgggtcacggtagctccagaggctgcccccggcctccgacgggtccggcgaatcgtcggaggagctggggctgagcctcggggggctcatcatcatcccggcggccatgttccgcaggaactgcggcgtctcgaagagggcctcctcgtccaagaaatactggtggctcccggcgccggcgccgctgctgccttcctgctgcgcgccgccgctgcccgccgtggtgcgcgcggcggcactgctcccgccgcgctgctggtgcgctgatccagaggcggcaggggcaatgccgccgccggcacggtcgtgctgcagcgaggcggccgcggcggcagccgctgcgcggatgtcgtccgctgagctggacgcgggtggcgcggtgcgcgaggcggccagatcggggaagttgagcgccgcgtcgggcccacgcagcgcgcgcgccgccacgtcgtaggcgacggcggccatctcggccgtcgggaacgtgccgagccagatgcggcgagccttccgcggctcccggatctccgacacccacttgccgctccggctcctgatccctcggtagaaggggtgcttccccgacgaccgcggcggcggcggcccgtggtcagacatttgatcgatcggcttcagctagggcagcagctagcaagctaggcgcacctatatagttgacgacgacatgcctatctagctatagctagctagctagctagctagtatcatcagctcgatctgagcgcacgtgtgttcgatcgtggcagctgtgggttgagcgcgtgccgagaaacacacgagcaacgcggctatataaggaggcggcggcggcggcgagatcagagcgcgggagagaagcgtgaggaaagccatggcggtcgcttgcgatgagctggtgctcccgaagcgaacaagcaaataacaccacagccacagccccgcgcgcgttattttcaggcgggtgtgtggggattagaaaagtcgcgttgccttcgaccttactaatcacccaagaagggggctgtggcctttccgcggttgaacatggatttaaactgttccatttcaggctccataaattaattgatggccccaatatatttacccctgacctaaaattgcacatgcaaagtgtcgtgagtaatttggttattgataaagtcctactgcctccatcccaaaatatagcaacttttgattatgaatctgggcacatagttgtccagatttatagctaaaaatgggaacggaggaagtaaattggtccacaaattaatttggcttgcttgtgctgctgtgcaggtgcataattttttttatttcaagagacgttttttcccctgaaaagaaatgtgtctatctctattgtatgaattatggtcctaggttgagatggggggtgagaggagcgaggacagaggggaaagaaaggggagattgttgggcttagaaggatggttgtgggaggcggtgaccctacggttgacggtgaggcgccgacagcggcgccagagccacagggatggaggagggcggtgagcaggcggggtaaagcaaggttatggtttagacgccgtggcggattcttcgaccagtggcagagccaaggcccggccagtacaagcatgcgcccgagcttagtcatacagcaagacataagcacatgcttaattactcgatctattggttccaatgcaagccaaaacatccaactaggcactagcaagcaaggcacacattacttggttgtggcacgaggaaaagctactgagacaaccaacaatcatcttcttttttcaaatataatactactactcataaatcttgtttgcaattgtggtatataatgtcacaccccaatccggcaccgccgtacaacggcatctgatatgagcgtgtcgtaggaaaaacagcgcgagccgcttcctacgaaaccgcgatctcagtaccagtcccaggatgtagcgctggtacccgcggtgataaatatgaatcattgcaatccttaaaataaatagaggacttatttaccttaacttaggttgcagctcagacagcccgagaatgcaaccgacgacacggacgaggcaaacaccaacaacagcggcagcagcggaaccaacggtctaacacccaacaccataggcaacaacagggaactaggacgaaatcctaatctttacttcacttcaacttcatcttcagagctggcagaactatatatttatatagagcaagggtgagtacaggagtactcagcaagccatgggaacttaggtggttaatgcaagcttcaaagataaggctgttattttgcaatcggttttgtttgcaagcattttaataatctaagtgtgtgctctccgcgaccagagcgagacaagtctcagctcggtcgggaggtgactagtgaccaaaattttatcaagatttacacaactcccagagttggttccaaggctggtttcccaaaccaaaccaatttttttttccaaacatcccgataatagtggtccccaaacgaccattcacttctagggactcccagtcccgctgtcacccggacagccaaatgctttccaagcatcaggtttcctgaaccttaacacattttcacaaagctgggtaaaacaaaaactacgctaaggaatcacctcacatccgcccatgaccgtgggcacggctgttcgaacagtttgttaacctctgcagagggggtacactttacccacacgacattactaacccggatcactcagcccgtgcagaacggccacatctggagaccttaaggctttcatgacaaggcatttcgaaggccgacacaaggttgccatatgccgacgagaggggtcccagaccaacaacaggttagatcccagaccatactgtgccaggaagcccgggggttctccccaacaccaccctgttgaatccacatgtctctcggcatcaaggctcccccgcttagcaatttactcagccaggggtgtcccattccacccgtgtggtcgcactattgtatgctcggatgtaattccgaaggaatcggtccttaaatgctaccacacaagcattccgcctaggaatggccttgtgtcgcgagttttatttttaaaactcattttctttcacaaggcactgactcaggcgtcgggttttccaatccttttgtaaaccaagttttacccaagaagttactcaaattttaagtttgaaggcgaccgtcgatactcgcacagagtgcacgaatatcgaggcgcaactagatggttacaagggaacatgatataacaattacaatggaaggatcaaatgcaacaagttaggtagacttgccaatctgcctcgcagacggggcaagcagattaagtgcaatcctatcaatgcataatatttttcaagcaatataattaagttcaaatataggctcaagatgttcaaaggtggcttgccttgctcagggtcttcacgaagcttcacaaatcttcgagaattccacttgaagaaaaatatccggtaaccgcaactaggcgcaaacaatcaaaaacctaaacaaagaccaaataaaatatcctatttaggctaattaatagtgccattaaatagatctcaattttacggaattactggaagtggaacgaaggcgatcggagctacggatcgagggatatgaattttggaggtctaaatggattttctggacaaggaaatgttttatcggaatttatggaaataatattctcaagaatattattgacagtcagtgaccaaggaaaatgattcaaggaattttggaataaggaattgatttctgaaagaaggaaaaaggatttattgaatttatagaaaagagaaatatttgtggaatattggaaaagatattctcaagaatatctttgactcattgacaagtggggccaacaagaagtgagagagagagagagcatagatgggctgcggtccatggtggcggatgtggtaggagggaggacgagggagcaaggttagacttcgttccacgacagctggtttggaagagggaggcaatatagactttgttccaaggatcgaggagagaggtgaggcccatcggctggcgagagagagcgagagagtagatgggccggctcgggttgggcggcccatggccgggcgggcgaggccgagccgagccaggcctgcgcacgcgggcggcgctgactggtcgctacttgacctggtcaagcggggccggcgggccagggtagcggccacgttggcacaggagagagagagagagagaggggaggagccgggccggagatcagacggctcacggcgcgcggcggaatccggcgagcggcggcaaaccgaagtggggggacggcgccgggggtaagaggaggaggagtggatcctttccaccggcgcggattagggcgccggggtcggaggagggccggcgacggcgtccggcggcggctgtgagagcggcacggcgcgggcgaggagggcgaagctagcggcagcggcggcgcttcagggaggtccgagggggggcacagggatggcggcggcgccgggaatcaaggagaggaggaaggccgatggccggggaggcacggtggaagtggccggtcacggcgcacggccgagcgcggcgaaacagaggaatggaacgcggcgggctatgtcgagcagcggcgggcgcgatgcggcgagagggggagaagaagggcggtgtcttcagtgctatttcgggcaaggacggggaagaagcagacgggaagctcaccgacgggagggaacgacgtcggcggcgatggttcgatgatgagaaggacgggaagccggcgggaagggcggccgggctccgcggaggatggtgttcgcgacggcgaacgcgactcgacggggcagcactgcgtcagccgagtggtggcgcctggcggcgaactttacgccgaggcgagcgcgccggggaggagatggaggcatgcggggatggaaggactgggtggcggcgtggcgttcttggtcgtggcggggcagccggcgacgaggaggcgacgacacttcatttccaggagcacgggaccaaatggatagataggggggcgcgggggttgggcttttataggaagatggtgctcggctggcgctcaaaggcggtgcggcggtttcgtgggcggcgtgaaatggcggatggcgcggatgcattgggcggtggatcgggcggtgcgaattgaacgcggggcgcgggagcaactgcgtggcgtggtcaaggtggggcagcaaggtgcagatgcggcgtcagcggctctgcctccgagcacaagcggccaaggagtggaggcggggcgccgttgcccggaagggaaaaagagaagggagcggtggaaaggagggctcgccccttccgtttttgggaggagagggggcgggagcacgagctgtgcctcgcggctttggacgcacgcggcgtggggcgcagggcccgagaggatgatgccggcgacgactgcaaaaaggacggggactgtttggaggcgagcacggacacgcggtggttgtcggagcaggcgacgaccgagggtggcgatgtgtcacacccagaaattcccgaatagaattccaagcagaatgtgcattaaaatccccgtccaggaccggccggggtacacaaacgacaatgttgacattcagatccacgtcttacaaatatcataaaagtcttacataaatgcagcggaaaaacgaaagacaacaggagctaagccttgactagaactgcagcgggaacaccactccacagacatcctcgacggcacggacgaagcctactcctcggagaaacctccatctaacacacactcgtactctggggttgggaaaaatagagcaagactgagtattacccactgtactcagcaagtcataccggaataggggtatgatgcagggaattatcaaaggagagttagagtggttcatttgcataaagcgggcatttataaacagaagttgaaagaattaaacagttgcaataattaattaatattgatcatccgctgtccaacgctatcccacgttgcaacaggcccaaccatccacctatactatccaatttcattagactaaactagggtaagactaatcacggtgaatctggttgaccgcccataaccgcgggcacggctattcgaatagttttactctgattagaggtgtacaactgtacccacaagacacagccccacgacacgtttccgtgcgccgacatgccaccacgacataccggaaagaggctgtgacaggacccttcgcataaccccctctaaccaagcacaccacacctcatatttcacccccactcctcgcaaggcaacgggcagtcccctctcgtgcctaggtgaatccggaagcgacagaggccgtcgcagggcccgccccgctccatcacgcccacccttgcctggatgcgtcagctagaggaaagctacactacaagcccagccgttgcccacgctggcttgtggtaagtacgataagttcttccagggcatcccgcgaaccggtccttaaatgccatgggtgcgaccagcaaaaccatgcacccacagcccaccatgtgattcattttaattaaccaacaccaaaacggtggtactaaaccaaccttaccaattgaacctaaaggctatattttagtgagctttccccaatgtgtgctagtggaactaagcatggctaagcaattcctagtccaaaatctattcatgttataacccaagctaacaaaggagcatggcatcaaaaatggcatggctgtaacaataggtaaacaccccatagtaacattataaaacaatgcaatatttgaagaaaacaatagagcattttcaatataggatcaacatgttcaagtgacaagcatgacttgccttgctctgctgctggagaaacctcggcgactatctcgaagtacaccggagcgtcggaagaaccggaatctagcgacatacaaggcaaacattgcaaaacaggctacaagactactgaaacagggaacaaaaccagttttaatggattctacacatttttcatgatttactgacttgaatgggcttaaacggagctcggatgaattagttatgaattttagaagattcactgtgtttattactataaaagaaaaaccttaatgaattattgcgcaataaagccttctagggctgacgtcagcacgggatggggcggcgccgacacgcgggccccactggccagcggctcgggagagggaggaaaggggcgccggcacgcgggcccactcggcagtggctcggtgggggggggagggcgtggaccaggaccacgcgggtggtccaccgccgatccacgggaccgacgaaccagatcgccctcggggccgatcggacgggcggcggcgacctggctcggctcaagaccagccaagcggccacggcgacggcgacggcgcgcgcacacgcgttgccggcgaaggcaaccggtggcggaggcggcggcgcaaaggcggcgccgacgggcggtggtgctaaagcgacggctaacgggcggcggcgctaaagcggcggcaaggagggagagggaggggaatagaggggagagggcgcctcaccgagggtggccggcgcggaggaagacgacggtgaa

SEQ ID NO: 2733 - DNA, 1569 bp, Oryza sativa
ttttaattggttaaaattatttctagggctctgaaaattccactaaaaatcctgttagtgaatttcgacatgtagaactcaaaaaaaattccacatgtcagattcgattattatttgtattactttcttagggttttctcttgatttgcaccggtatttccttagggtcatttatgaattaaattttaggcttgagaggagaacttcggggtgtgacacgatgacgtctcccagacggtcggccacgcgcgcgagcgcgcgggaaacggcgggcggattcaaacggcggcgagcggtttgggcgcggcgagggagagcgagagagaacgtccgagagagggaagggagagagacagcgctctctctctcggtggtcacgtgcggcgcacgtggagatggagggagctgaggagagatgggccagcggcaggtttcggcccaaatcatcacgagggagataaaatagactttttcaggaacttccttttaaggaatttgaggggcatttgagttgggattcgaattcaaattgaacatttgaactcaacataaaatgaaggagccaaggtggggctttaaagcgggaattttggtatttttgggatagatttatatttggcggcacgaaggattatttcagaggatttcaaaaagggaagatcattattcaaaaatggaacaagggagatagcggtagaatgccatggatagatagatagacagaaaggtaagttgataggtagagggacggatagacagatggattgacagatggatagataaacagatagataggtatagtagatagatagatggatcgatcgatagatagatagatcgagactcagagagagatgggatggaagagaaggaagaggtggaccagaaaaaggaagaaggaatccaacctatgagggaggttaaatagactttcacagagagatttaattgggaggttttagggttggaatctggattcgaatttcgaggttgatactcggtctcaggagaataggaaggagtcaaggaagggaacaatattcggagacgagtcaaagggagatggataatttagagagaaagagagtgtaacttgggagcttgagtttgactactcaacgagatatgtgggtaaggattttggagagaagtctgaatagaagggttcggacttcgagattatttcagaacggaaatcattttggggagaactcaaggcgaaagggattgaatcttggggtttagagttcaagggtggaagtgatctcgatttgcatattcagacttgggtcagaagttcgagaaataaaacaagggtagattgacgaaccgataaagagagaaagatagatgaatcaaaacctgagaggttgaattcgaatttgagaatcggtttgaaggaaccaaggagagagtttatgacgcgaaggtgaatccctggacggagttagggttcgggcattctacaaagttcacggatggggttctatgacgggattcccaatagaaggaatcgagcttcgggactatattgggatggaaattttgaggagacgatctttgataaca

SEQ ID NO: 2734 - DNA, 1084 bp, Oryza sativa
tacccatgaattcagaaccccagagtccgcacatcctcaaatacaaagcacttccctagttagatgtaggttagacttcccgttcgagaaactctaccttctacctgccctcaatttatgcacgattaatgaatgccacctgggtggaagcgagaggtggaaatggaaggtcttagttcggaggtgggatctctacctgatagttgcattgccattcatgatgatcccctggcattcgtccattcagccattcaccattcacccattcaactggaattttggttgaatgccggaattgtgtccacaaattgtggatggatagttggttggctggctggatggctggctggatggctggctggatggatggtgaatggctggcggcggttcggttgctttgaagcatttgttgctatctaaattccatttaaggtcgtaccttatcgcccagcatcatcttattctctatttgtattccctccatctttcagatacggatgtagccttggatgtgcccgtgcccaatgaagaggaagagcgcaacatgaaacgtaagtacaaaagtaccggacacccacccagatcccaatagaatccgccaaatcctgcgggaaattgtaatcccattcaccagctcctacatttaattaacaagagaactattgtatttatctaacacctggattatctccacctttcatttgatccctatttatagattacgctgcgttgctaacgggccgcacctcctatttcctcaagggtgaggaaatgaagtccatgtacaccacctacaatccgcagaatgtggtggccaccgcccgtttcctgttccacaagaagaatctatactactccttctacacctcatcgcgaatcggtcgtccgcgtgccattcaattcgttgatgatgcgggtgtaatcctggaggagcatcaactggagaccaccttggcgggcactctcagtgtctatcagaatgccacgggcaagatctgcggtgtctggcgacgagttccacgtgattacaagcgcatcctgcgcgacgatcgtctccatgttgtcctcctctggggcaacaaac

SEQ ID NO: 2735 - DNA, 707 bp, Oryza sativa
aatggcgaggaggcgaatgcgagaggaagaaagggagggggggaggcttgggtttataggaggcggaaaggtcggtttgggagagaggaaccgacattgggcggtcaagccggcgagctggcgctccggctagcggccaaaacgacgacaggaggtgacgccggcgagaggggaaaaagggggaaaaaggggaaaatgagggagagaaagggggctcgccccttgcctctttgggaaaaggcggagggagcgggggcgacgcggcagggggaggaggggcgctgcctccgtcccttggcggcttgcgcgcggagtggcgggggccgggcgatgacgacggcgatgacggcgggcagattggagcggagcggcgacacgggcgacaggcgcggcaggcgctgacgacggcggcgatcaggcggtcggccaccacggcacgcgcgcgcggcctgcaacgggcggcgtccgcgcgggcgcgctcatgcgaacacggcgcgcgggaagcggcaacgagggaccggagagggaggacttggctcggcgcgggcggcttacgcgcacgcgcgcgggcagagcggaggggcgcagggcgcggctctcgcgctcgcgcgcggcgcgcgagggtggggcgctcggcgcggcgacgcgcgctcgcgcgcgcggcgcggggcggagcggagggagagagggggggagcgggggagatg

SEQ ID NO: 2736 - DNA, 1013 bp, Oryza sativa
aggtattttgtagcgtatgggatgcggaattgattttgaagaagtcaaatttggtacgattggttatgtaaagtttctttcttgtactagagagtttcctaaggtgtttatgactcttagtatgagtttggtttgtggctttaggctgcctacctcatgtataaatagaaggggagcatgaggcttcccggtatcgcttttcatagcaatagagttgagttttgagttagcgtttcgagtttagtcgaaatttttgtaaggagtgctgttggtgcactttgtaaacacagagagaatcaataaagtcgtcatctactttaagagttcttcgatttgtgtttcaccgggtttcggcggtctaaccggtaactcaccggcggtcagaccggcagcaaggcggcggtcagaccggcggcggcgatagcgaatggcagctgatctcggcggtcagaccggagatctaatctcggtcagaccgacggcaaccaggcggtcagaccggcaggacaacttcggtcagaccgcgatctatcgatttcgagggtaacttttatttccgctaaacgttttcggtttttgggtataccaaccattcacccctctctggttggtttagttcttgtgattcgatcctatagtcgaaagagttttccaacaaatttggcaagtttacttggtttctatccttctgaaaaaaaatttagaaaggtcaccaggggaatctaaaggtcacccgggggggattcctcgcctgaatatcattaactagattaagaggaaggttacagttacacacagtttaaggttacacacgtatccttctgaaaatgactctaaagtttgctattgattggggtgaccctgactgaagatgacactacaaatagtatttgttctattgtagcggttgactgtaaaggagtatatagatttttggttagaatactctgactagtcaaaagtctcttacacgatcctttatggttgattcactgccatggaagataaagttt

SEQ ID NO: 2737 - DNA, 2187 bp, Oryza sativa
gcaggacccaccacataccatgctttatacggaatcatacctcgtatatagaaagagttccggataaggaagaacgaatagagttatatatgaaactataagtactattcgaattgtatccatattggtctctctagtactatttgaacaagggaatatctataggtataaaaacaagaccttctagggggagaggagaacagatcaacatgttagctccactttgagcaagtttaatagtatagctaaatgttagctccaaatcatctatagctcatctaatagcacatttatacaatagttacctataaaaatatacttacaccattaatatatggtcccacctctcatatatacatagtgtctggttacaaatctataccacgttttcttctctctcttttcttttcttcttgatatgtagttatagttggcttatagcctgctattgtacatgctcttcggagcaagtgagttttagatgtagcggcaatggtggttaggacttccacgttttctccaagagccgtggtatttctgctttcatgtagtgtcaatgttgttatataagttcaacatgcaagttcctttttttttacgataaatatgcagagtttttaagcagctcttgaataccattgatcatgtgccattatttaggacaatctatgaagtacacagagatggtaagatggcatgcatttttagcacgctttaatactgttgatttactatggtatgtgttgaatatggaataattttctactacctacactctactggtgtaataggtagtaatgctaattctcatgcaaaataattgtacaatgaaattacaccccttttgttagttagtacatgaaaaggaactgcacaggccgccttgtaacagcttatccctacacatgatccaaaactagtaaattgaagagtaaacagcaaacatgtgagataatagttattacatccgtcctaaaatatagcaacttttagctatgattcatagcttaaaaatgcttatattttgagacggaggaagtatattttatgacgaagcaagtagaaaaaaaattgaccgcaagtattggtcgtgaatgatattatatctgtcataaaagtggaaaaaataagaaccacatattttcataaatttatattatcaaatcatttatttttttttcaaatttgtaaggtaaattttggcggcatacaacaggatgtgagtttcaaaaagaaaaagaaaaacaggatgtgtcaaagcctttgcttccaatggaccaatgtccaatgaggtaacacatgtacagttccaacttccaaggataagcttataaaagctagtactactgtatattgcagaatcgccctatcggccaaacttgatctatgatcatctagcaattctaagattaattacccatgaacttctgccttgatgtcatcagccatactatatatcgatcagagttgcaggtcaaagattttctttccatctcgtgctgcttgcatatttcagctttcaacctcgtccaaagaagtatttttctcttttttttagaggaaaaaattccattatattactgatgactgatgaggccaaatcgctagcaaccaggtcctccgaactaggaggtagacaatcccaggatagactagaaagaggactattacatcccaaaacaccaatttcatggcccagtttgttacgatcatgtgggtagtgagtgacacacaccgagagaagcaaaatggagatcgatgaacattttgatttcgttgaggagacctcccattggcgtaagcgtctagttggatcctcttagagcttggactagcatcatagaatccgagtcctgctcaacatggataattccctctaacgtattttctcattgccagcagtacgagcaatcaacccaactctccaaccatttcagcaaccaaagaccagaagatttcgccctccaaatcaacggccagcagctcctgtccgacctccttgaagcatctccaccgcccgatccgctcaatctcctccacctccgcctttccatcaaacctcgacgagaaatcctgatcatccaaccatgccttggcaatctccagcagcaacttcgctctatctggaccgtccaatctttctccctgccaaggtggcaacccgtcgtagaagaaatctattagaag

SEQ ID NO: 2738 - DNA, 659 bp, Oryza sativa
cttcagaagatccgctcttcgtggaagttgaagccgacgtttgggaaagcgagcaaggcaagtcacatcatccttgaacatattgaatcccagtttataaaattattttgatttaaattattgcattatcgctttatttaaattcccgcgttatcactgttttatctagccatgcctatttacttttgttatgaccttattattgttattgttattatttccttgttcaccctagaataaacaaaaccccaactagtggacactctactcatggtaccactagtatgattttaggtagatgcttcgctggttaattaggcaacattatgtggttttacaactctagactttgggatattcatatcacctggacactatggaatggtttgattattgtggaattggattcacacctccccctctattcaaaaccctcaaaatggttttaggctgggctcggggtgcatggttttgatagtagcacctcggccatacaaggaccggtcttcgggcctctgttgcaaagcactaccgtacttccacatgtctagtgggtaaggcttagtttgtggctcagtctggttataaacaaaagtacacggatggagatggacgaagtcgggggtcgatggacatctctaggacaaatgaaggctaca

SEQ ID NO: 2739 - DNA, 5659 bp, Oryza sativa
aggggggattaattatgatatgattccagctcgggagcaggcatctgatttagggttggtgctgcagagaatccctgcctgatcgctcgccctgtgtatcgctgcatgggcgaatgggtgtgtgtgtgtgtgtgtgagagagagagagagagagagagagagagagagagagttgggatggatctgttgcccaactgccagcagctgcacccctgagccaggtccgtgtgtggcaccgccgattgctccccatacacgcagcaacaagggaagaacacctgacggattgcttggagccttggatacgtgggattgtctaatccattccgaatccaagacaatactctcccttcgtaaaaaagatcacacaccgtataaaaaatataaagattttttaagttgtatacggtaatggaagtcggttgtgactatatgaggaagcacagcagtaaataaaatctgagtagaagtattaatttgtaatatctgatctatcaaatttttttataattttgcatggagcaagattttaaatgtacagttagatatgatatacaacttagtgcttcaatttttacaaatacaattgtatttcatatttttaaaatatccttctgttttgaacaaattaaaaaatcacttgtattgtatgttgtgtacaatttatatagatcattagatttatttccactcctataatttggacccaccactattgtgtgtatctttctctctctctctcctttccttttcaattactaggatgaattttaggcctccatcatatggtcctagaaaagcagccaccatatcgcttctagaaacctagaaattgccacattagttattacaaaatagacaatatgtaccatttgaccatggtgcacctaaattataaatgggggagataaatcgatatattttacgcaaaatacaactatatttatggaaacataaacttatcaatatatatatatatatatatatatatatatatatatatatatatatatatatatatatatatatatatatatatatatataatacaatagtatctatagaaaagccatgagctatatatcaaatcgaattataatttaaaattctattgcgcgcaagatataattatattttttaaaacaattgtaagtacaataaatccaattctagttttatattctagctccccacaactttacgcaggaaatgcactagcttaaccatgaaaattagtacgtagttttaagggtttcaagggaaatttaaaaaggagcatgagtgatccaatataataaaagggttaaatatgggattattatttttcatatttatatgctgtttttcgacgaatccatataattaaagctggggtttgattggccacaaaagcttaaatattattctctccgccctaaaatataacaatttttagcacttaggatttgtcccaaatataacaacttttgcactaattaatattcccttcccaaccaatcacaaccttacaccattcatttttcccacctacatgcgcttctcaaccaatcaccaacatctttatattcaattctatctattttcttaataactgtgtccaactctaaaactccttatatcttgggacagtacattggtttatacataggtaacagagatgttagctgtcgagaccgagcgagcgcctaagcaaataaaagatgattttccggctcgacaaaaatgtcttgtgaatgagttcagtaacatcacaatgcttggtgttaatcggatgtaactttagtagaggcattaattagaaacgcgttgattgacaaatgaaaattgtttcaccaatgaggaacacatacgatggtcaaaagatgaacaacatcacagtcggtgctttaatttgcacaatctggacggcataacatgataagcaaaaaacctgactcatcaattaacttcacatctgatccctgaccgaaacaatgtcagatcgatgtaggtagagggacaccaaattaattaactagctagcatggccaaatattaaaggacatatatatatatatatatatatatgtgtgtgtgtgtgtgtgtgtgtgtgtgtgtgtgtgtgtgtgtgtgtgtgtgtatatatatatatatatatatatatatgtactttaatatttacaccgaacttctatttccaaccatgtcgactagatctggacgtacgacaatgaaaaaaaaagtcaagcgaatgtttgttaagctaacacgcgcagtacaaaaagaaaactctacttagattgaatccaagtttattttgtccggccgtgcgttagctttatttgacgtgccattgcttcatttcacataatgaaagcgactaataatataataagtaaggtgcgtacatgcttctattacccgtatggtcacaaaagtattagcattgtcactagaatgcacacctacaatttgattcaaccgggtaaacatcagagattctttttggtttagtagtggtgcataactctactctttagatttaaatcctactagctagtaatcacaattttatacacatgagtgtattaagagatgtactcgattgtgtacgtatacttgtcttccgagtaataaaaaataatttcatttgaaacatgaccaaattaaaatccaaagacaaataatgaaagcttaaaacattaaaaatccgatatattctctccgctcaaataattgtcgctttagctaactccttagttattcttttttttccaaaatacatacagtaggcgctcatataaatgcgcacgtactcacacatacccatccctataagtaccttcaaaaactaagccagtatattctgtaattcacaaagttactatatagatgttttgttgttaaagaatacattgtctaccactaaaaattaattaaccgaaatgcaaacacacgtgactagtaatttaaaaaaaatatacatatttcaaacatcgtggtttttatgtttttagattcacaatgataaatacatccctaatatatataattcacatgttgtttaactacgtgactttctaacgattaatgctcaaagttggaagcaaagctaaaaccataaataaactaaatcgaagaatgggaaatctagaaagaaggacaaatcttcttctccccaacaacgacgccacgcgtacaaacgttcgtgcaatcgtacggcctgacattcacacacgcatgcagcttgtaaccctgtcacatgtcggcagcgcaggcgactccgagcgaaactgcgagcggcggctgtggcgcagcgtggctctcccaccgctcacccgagactttgaaacggtatgcatgcacggtcggatgtggccgcagccgcgagctagcgagcgagcgatcgacgcgcgcgggcgccgtcaacctaaccggacacgacacgccgcgacgtcgatctccacttgcggggatccgtgcttggaacggttcaaggccttgcatttcaattccccgctcgccgcgaagcgacatgctgggacagcgagatgtcgggcggtggattggatggatccatatcgcgtcgagcgcgcgcggccggtcgaggtgacgtcgcggcgtcgttgctgggccggccgggcgcccgcggtcgcttgccccgcggcgaccggatcgaaccacgtacgctccacgctccaaggtgttcttgtcacgttttcgcgttttgattctatatgacaaccgattccgcgaactgtccggttgagattgattaccactttacaggcattttcaaccttttcaaaatttgatattgtcaaatttttgataagttagcaaacattatccagttttaatagaataggtaaaatacccaaatctgatgatatcaaattatctattcatgaccaatatttgatagtagactactatcatatactccttccatcctaaaaaagatttaattcttgggtttccgtgttcaacgtttgattgtctgtcttatatgaaattttttttatgattagtattttcattattgttagatgataaaacatgaataatactttatgcatgacttatcttttaaaatttttttaaagtttttttaaataagacgaacggtcaaaggttaaacatgaaaacccataaattgaggtttttttggatggatgaagtatttatcaattttaacaaataataatatggtttaaaataataccaatatgcagcaggtcctacatgctaactacccctagctccgtattaatcgctccatactttggcgatctttcaggatgatgctgatcagtacggagtattaatgccagttcagcccgatacacctcctctgtgtattttggcaatctgtattcagcttgaattctgtatgaacactaataaacgaggcaacaaacgactagtgcttcgaaacagacccccggacagagaactagcgcaactgctttgtgatgtatctcttgataaaccccttgttgagtcctggatatcctctgctccgatctttttgacttcaaacaaatgaatgactgtttccagaaaacaacttcgatgtacacatctcgacgcccttttcaatgccaaccagtaacctgtcatctacaataagatctccggtgttgactaggatatttaatttatcgccttgttttgcactgttcaatatttagttcaaaagatatacggtcagctccaaatccatttcccttcaatctttcgatactatcaagattatttacaaagactagcaaactatcgatcacaacataaatattttagtctaaagttcaaactatcgatcacaacttaaatattttagtctaaagtttttcaattattttttgagggcctcaagagcctgggcatgcaaatattttagttgtgctagtctaatcacaactcaaggttcccttgaaactagggggtcaataacgagtcagtttagcccgttgagttagttatcttaaggaactagcttagctcggcttgttaatgttaacgagctaaaagcctatctcgacttggtttgtgagctagctcacacacacacacacacacacacacatatatatatatatatatatatatatatatatatatatatatataaaatttgtttggtgcttcatggtgcccggacaccattgttgaaattgagtatatacctaattcaaatgagtataaaactttttcaattatttaggtattaacattaactactttactaactagttcaaagcaagtttgaactgaatttgaacttgtttttgttagattttgattctaagtatatagcatccatacatataattagttaggtatgtaatcatagattgtgaaataaagttaaatttgagttgttttgttgataggtataggtatgaatcgaattcttataactaggtatatactcaaaatttaaaaattttgaaaaatttgagtgattttctgcatttgaaaccatggtgcccgggcaccatagtgccccatatgagtgtatatacatatatatatatatgtatatatatatatatatatatatatatatatatatatatatatgtatatatatatatgtacatatatatatatatgtatatatatatatgtatatatatatatatatatatgtatatatatatgtatatgtgtatat

SEQ ID NO: 2740 - DNA, 2767 bp, Oryza sativa
acttctatgcaaacatctaccaaaatagttttcttcaaggcaaattgctgtgtgaaataacggtatgatcagatttgttttatttcatccaaactttaagagacatcaggatatagaggagattatcagataaatgagataatcaaatggaataaaagtccatagttactccacaaaattgagaatatcttttccacacaaggcttgccggttgcggctgttatatgctgtctgctggaagtacgtacgttttcaatgtggttgctttctgccggaattttttacttcagtatcagactatcctagtttggttccttgcttagaccaaacgcacgtaattaactagtcgtgggcactggattccatttattggtatccatccatttgtcaaaagcccttagatcatcagctgataaaaagtctagagcatcagattgtgtggtctcctttactctgcatccacatttgaagacacgcatgtcttgtttctgtagttcccaggcagcactaacaagttctgtcaacttagctacaaaattcatcgtctttttttatggtaacacgatgtctagaaggataacgacaacagcacaagctgacaagcacgctgcactgccaaatcttctcttcatcctttttggcaaatgattcacttagtacctgaaaagaggcccttttcgggggaaaacatcgattaagatctgaaaaagctgaaaggcattgattttgccttacctatcaaattttgtttgtgtttggagtctcaactgctgttttttttccattatttaataattataaaattcgttatcaataaggttttacttagtttggaggcttaattatagctttattatgttttaataattaaaaaattgaaaaaaaaactatttgatttcatgttcaagtctcagtttgctcccttcgattttaaataactatgagtgatactattcaccttcacgctttgattattcatttcttttaaaaataaataccttttcaaatatcacattgtcaaagtgtgttgcatcctattaatttctcacccttacctaaaatttaagagaaatcaaatttcaaagttgaaaaggcaaagtcaatattgacaattattttaaaatagagggagtagtattttttttcaatattgtagatatttaaaatcaataagtagtgatttgtactcgacatgaacactcatttttagattaatgtaaaaactaaattatccaaggtccaaacctacgcacccagggcagcaatgaatgaaatatatatgatgatggtgaatctcggtctaaaccgatatacaactagttgaaccccacgatttgctgtaaaatatgtggatgaatgtatgttatatattataaaaataatatatatatatatatatatatatagatatatatatatatatatatatatatatatatatatatatataatataaaaacattgtgaagataataatttgtcattacttgcatattgagttctaaaataaaataaaattgcgaatgatatgccacatttgcatgatatttaaaatactctagataataattgctagtttgtgatgatgggacacacttgcatgttgagttttaaagttagcgagcatcaactatatagatagtatagatgtggtgtattttttttcctatgctaggatgtgactggagatggacaaaacacaacgaatgaatgacataaaaaaatctttgacagaagcactatcaatctattaacttattaaagtaatagaaaaagaaatctccacttttgctctcacacctagaaaattttcatattaataagataaaaaataaaaaatagaatccatatggaaatacaacttaaaaataactaaaattcaaaattaaaaaactaaggaatattggaagaggatactagattccatatagccatacaatttagagataattgaaattataacttattaaagtaatagaaaaagcagctcatggcctagacattctcatattaataggataaaaagaaaaaaaatagagtctagatagaaatacaatttaaaaatagctgaaattcggaatttaaaagtaagaaatattgaaagaggagactagagtccatgtaagtatacaatttacagataaatgaaatttggaattaaaaaaattgaaagtagaggttagagtacatatagaaatacaataaagaaataacttaaaaaaatattgaaagaagataatagaatccatataggcatacaatttagagataattaaaattcgaaattaaaaaaataagaaaactaaagtagaggttagagtccatataaaaatacaatagcgaaataactaaaagttgaaactaaaaataagaaatactggaagaaaagtgtagagtccaactaggaatataatttagaaataaactgaaattcgaaattaaaaaataagtaatattaaaagaagagtcaagagtctatataagaatttataacttactgaaagtcaacaattttttaaaaataaaagtagagcttagagtctatatagaaatacaattaagaaagaattaaaaatcaaaattataagaaaagaagattaggagaagtgtctagggtatatattggaataccaaatttggtttggataaccggagttgcaacctagtattcgtctaaagaaaagcaactgtatcatttggtctaaagttgataaagacattttcaaataaataaataaatttgtacgtaaacttttatatttgcttt

SEQ ID NO: 2741 - DNA, 1518 bp, Oryza sativa
  unsure (1)..(1518): unsure at all n locations
agtatataactatttgattgataattgaccggagaataaacaagagagtcgtgaaaaatcatactatactttactgtatatattcttcttgtcgtactcccgtttcagcagctcagccccatgcaagcaaaacggaagcaaccagcaaccagtctttgattcgtgtcaaatccgataggtgcttcgagagcgacgaccgcgtgcggatcaggcggcctctggcatctgccatgtgaagcccccaccccctcctccaccatcaggggcgcccccggatgccttacggtgaaaaagcggcgaaagcgacggaccgcgttgttgggtttatctgcnnnnnnnnnnnnnnnnnnnnnnnntccggctaaagcgtgattcccctagcgttgtcagcggcgcggcggttggttacacggttacaactggctttgagccgtcgccaagtgtaataggcagggcagattattagtgatggcatgtgacggagcgtggggctcctcaccaggagaccgcgcaagcccccttttgccggttcggccgggggccctgggtgagattctaagctcctagtctgtggaaagttcgcgagaatggaaaaagcacaagacacgggcgatgtatacaggttcgggccgctgagaagcgtaataccctactcctgtgttctggtggatctgtgtatgaagaagctacaaagagctggagagccagagagctcttattctaaaaaccctcttctccttttttttttctcgtgggatctcctctccagatcatccccccttccagtctcctctcttaagtgggcaaggtcctccttttatatctcaaggggataccacatgcaccacttctccctctctctctttttgggtggaggcccatcctatctatagtaaaacttggcttgccttctcttggaagctgaaacactgcctgtttttgagtgtggccacgcgtcctcgttcgtctgacctcggggatcaccctgtcatctcttcataaatgggcggagatttgcaacggctgctgcccgagtgacccttctgatgggacggcccatacctacctccactccgccggaagcaggtgcaacgtgggaacacggttgtcttctggcgacataaccagtgtcagaccagtcacagaccggtcacctttgtccaccacgtgtcagtttagcaatctgcatgttcgcccttcttcatacaacgtcttgtttataatggttgggataaagcctggcatatatctgaccaggaccaacgtgccatctccaggagctagcacgctggctctggctccggctagggacgagtgcctagagactctcatcctgacgggacggggcgaggcgtgtgtcagatcgcctgttgcctcctaacccgcaatctgaccgatctgtgaccggtcacagaccggataaacgagcgtgccatactgcgctacatgtggcgtgacgcgctcgtccaaaccgcaataaatgtggttaggtgagccccgctatgctcacctacccca

SEQ ID NO: 2742 - DNA, 1407 bp, Oryza sativa
cagataaacccaacaacgcggtccgtcgctttcgccgctttttcaccgtaaggcatccgggggcgcccctgatggtggaggagggggtgggggcttcacatggcagatgccagaggccgcctgatccgcacgcggtcgtcgctctcgaagcacctatcggatttgacacgaatcaaagactggttgctggttgcttccgttttgcttgcatggggctgagctgctgaaacgggagtacgacaagaagaatatatacagtaaagtatagtatgatttttcacgactctcttgtttgattctccggtcaattatcaatcaaatagttatatacttttatggggattactgccaaattaaatcaacatttccaaaatttagcaataccaaatttttggtaagtggacagaattaccaaattttggtagaatgaaataaatatgttatgccaaaattttctatgcattactaatatttggtaacaaactaaatgcagctatatatttatcgattttaccaaacaatgataaagtatggtttaaaataacatcaatcttaataggccctatctctactattataaaaattaaatatgtttgccggtactttggtacattatccgtttatgagtcggattttaagtacgttcgttttttaaaatacatgtgcatatttaagtcggtttttaagttcgttcgttttttaaaataaagaagaaatcttataaggaatctcttttaaaaaaaaccctcatgctaatttgagacgatcagactcccaggcgcagctcatgatttttttttaaaaaaatacatccaaacgaattgacacagtgaatttcaccttaggtaaaccatataacaataataatattaaaataaccttcacccgttgcaacacacgtgtattttttctagtataaaagaaaaacgttgataacactgataaacaggaagtctaccatcttgtaaaatcctatatccaaagtcgattcacataggaaaaacaaaaacttcagtcatgagtacactaacaccattgtatccaaacttctggttttttaagttagtgaatcagtgggattacttatagatcgaacactaggtgataaaatatttgtaaagattgatttaggccttgtttagttccaaaagttttttccaaaaatatcacatcgaatttttgaacacatacatggagcattaaatatagataaaataaaaaactaattacacagtttgcatggaaatcgcgagacgaatcttttgagcctaattagttcatgattagctataagtgttacagtaactcacacgtggtaatgatagattaattaggcttaataaatttgtctcgcggtttccaagtgagttatgaaattagttttttcattcgtgtccgaaaacctct

SEQ ID NO: 2743 - DNA, 9811 bp, Oryza sativa
ggtggaggcgccgacggtgccgggggagagctgtcctccatccgcatcgccgccgcgaggagctgcgacctcgtagtccaggcatcggcgtcggtgctgccatcctctcccgcatcagctccagcccactgctgccgccgccgccgccgctccagcccacgctcgccgccggccgaaggggagagagagagagagagagagagagaaagagagaagggaggaagaggggaggaagaagaaagagagaagatgacatgtggggcccacatgtcagtgggccgcacaattttttatgttgtgaatgacaaacgggtcccacatatatgttttttaattcaaatgcaatctaagcgccatgtgaaccccacatactagatcaacactgctacgtcaatgaaaccgccctccaaaacagtcaagggagtcatattgcaccagtttcaatagttcgggttcgagatatctgtttttgcgatttagggttatggattagattcgggtcacttcagggagtcaaagtggacttattccatccagatttgtaagaacgtgattgcccatggcttttcgcccctcttcatctactacttgttaagctactgaaaactgaatgaacatggcaaatcatgttctgagatagataataatgtaagtgaaattgtgctgttaaaatatttctgttctgtgcaatgtgacaagatttgtatgaacatgattgcccaggccttttcacccctttccatccactacttggtaagctactgaaaactgaatgaacattgcaattcatgttccgggatagataataatgcaagtgaaattgtgctgttaaaatatgtctattctgtgcaaagtgacaactaagttatacaggtgttaaatccagtttcactcaggtagacactagcgaattaagtacaagtgaacatctaaatatttctccctctacttagtataacacctgctaagctagctggctaagtgtgcggcagtgtgcggcggcagcaagggaaagcaacatgattgtttattgagattaacagtactctgcatgcataaattggagtggatgaaaacttttatctcgcattacttgcgtaacacaagcctgaatctaaaacgaatccacttcggatcgcttcagtctggatgcagaaaccaaaacacagaatagtaagtggatcgcttcagtctggatgcagaaaccaaaacacagaatagttatagaaaccgtagcctcgtggttctgaagccagaaacaacggactttcagtcttgcgattgcattcagatgcacgccaatgaaatctatatgaagtgaactacattaattcagatcagaacggggacacgaaccttcgggctagtgaacatcaagcgaactgcgttgattcagatcagaatagggcacatgaacctttgaaacttcgtgatcggttctgaacccttcgtcccggaagcagctcgtgttcacaaaaggggtttttcccccgagatcggaagtactactgtgtcatgcaatcgtgggtgatccgctcgtcggccacacttcggccgaatcaagttgggccgtaggcatgaaagtgtagagacactttcgagttgggacggattagccggccggggtctaggtggttatcgagttgggcttgattagcccaccgtggggacgaatttttttcgtttttagatttttttttaatatttacagaaataatctatcgaccaaaaaaattacagaaatagcccctgccgccctaatggtgggcggcaagctgacgtggcagacggtgggtcgaccgcgccgtctgccgccgtcggccaaaattgcgattaggcccttgccgcccatacagagggtggcaaggggctaattgcaattttagccgcccataaagagcttgcggccaaaagatttttctatgttatgttaataataaataaagaagtatttattggtaaaacttgttaatattgttataaaaatgtattgaagttggttgttgcgcaatttcatatgttaagtgaggtattattttgtaccttattcgacgtattagtactcggataatttatataggcctatcgcagtctgggtcgtagaaacattatatggacttaaacaaggagaattatgtaacatgaagaaatagtagtacaatttgaacatgatacgactatttgcattgcggttacatagatgatattagattcgaattaggagggaggtagtgcaatagttgaacacaacgacgatgtagtaatgggacaaggaagcatgacagtagaaatttcaatatgccaagttgtccgataatagctaacccctacgtgaggatccctctcctctctcaaaccgcgctttagtaaccctgtattgctctggtagttcaagctgcacaacacggctaggtggagttagaacccttctggtgtctatccattctctgtattgacatctccttggtggttcctgggaggaaagaatagatgtaaagcaagcaaagttagtaaatgttgtgagaaaataaggattcatgtaatcaaaatattcttaccatgaaatcgtcgtcaagaatatttggataaacaaagaaccttcgacctaatgttgtaggatttatggaacgaagaacctgacaacgatcaccacacctgcatcttggacgggcttcccatggagggagtgccgtagttagcacccgccagtcgctctgttgttcacgacattgtcgttcataagccgcttttctctgtaagtattgctcagtactttcggatgcgaaataccagcgaccttcttgtaaacaagtggttaggtcgagaacgggattttctgtatcgacccactcgatgtatgcgcaagccgtagtgcgggtctgccgaatagagtagtgttacgaagaataaagcgattgcccatacggaatgaataagcatatgcagataataaaatacctcacggtcatagcacctaaaaaagcgccttcctcgaatattaggattcctcgaagccattagttggcatcgatcaccgcataggtagagaggacgctggcaccaaggtggtagtaggtatacacaaggatcgctacgccagtttggatcctcaacaccccggcgtctagccattgacgaaagccggtcggatttgtaatgaagcaagtggggaagagagtactgaatatgactgagttctgaaatattgtgaggcctcactcgttaaggcgacttatataggcgcaaaaaatcgagtgatacccctgacatgtgaacgtggtggggtatggtgggtacgcctgattggcgccgaaagatacatgcatgatcggcgccgaaagttacattggtcgtatgcgccaaatagcggtcacatataggatctatgaatattacctgaaattggcgtctgaatccggcagggcttcgccccttcttctcttctcctcccctctcttcttttttttttcactggaattgaggagagaagaatgagggctgggggctgggcagcaggccttttataggcagcgaggcctgccgcccggccagagggcggcaaggggccgcctgcaaaatacccggccccgactggcttttttgcattcgggccccttgccgccccaccagagggcggcaagggttttctgcaaaaaactctccctccgtcaccgcccgttcctcccctgtttgccacgtcagcttgccgctccagaggtgggcgacagggtctatttttgtaatttttttggccgatagattatttctgtaaatatttttttaataaaatctaaaaccgaaaaaaattcccgtggagacgatggttttgaccgaggcgtctgtgcttctgtggaggtagcaggtgggctgatgtcgtaggttcacgtgggcgcggggtgtccgcgtaatgtgccgtgcgtcgcgccgtcgctcgattcgcttgggctgctgtgctctgagtgctcccgcttgggcagggccgcggccatcggcaaaagtctactactaactacaccgtacaggcagcggaatgatttaagggataagggagggacctaagtgaaaaaaggcggcagtagcggtgaaaaaatggcgaccaaagtgcacgcccgccgcctctagcgccgaccgcctcccgttccccttccccactccgtcccggcagctacctccgctttccaccacgccggccgatccgcctccccaaccctatcgccggcaggcgcgccacgccaggttccgggctcggagacaccgcacgctccgcccgatgggcacccccgggccggagctcgccgctctcgcgattcgccgcagcggcggccgcctgttcgagcggtagggagggactcgtctccccgcctctccttgtcgtggactcgtggtagcgggggtgggaggagccagagaggctgggggcagggagggaggatgctggggtcgggcctgaatctcgtcagcgcggcgctcggcttcggcatgaccgccgcctttgtcgcgttcgtctgcgcgcggttcgtctgctgccgcgcccgccgcgcggacgctagcgcgtcacggccacacccctcgccggtggacttcgacgcggacttcccctcggatttcgatcgcccggtatgtggcaccttgttctccctcaataatagtcttccgctgcgattttagtccacaaactggagtagtaatttgctcgtgttaacggtatcactgctacctgcagtggcatggcacgtgcacaaaacgactggagtatatctgttttcattttctgtgttcatggacagtacttttctactttcaagcagaaatacttgtcatgtgtcatgctcaatttatgatggccttactgtgtagtaaatcaaatggggaataagtacaggcactagtagtacactagcctgctttaccttgggcgtgcaatgttgttaaagtggctttggattgcttactggggttccttaagagattcattaagaatttgagatgttaccgtctaatctttttaatcattttaatattgtttatggttttatgttccctgtacaaataacaattttatttaagcgactaaaggaggaaggcacatcaacacatgtatgctagacttgtttctgaatttctcttctttgttggtttaaattgggttattctctcttttaaaatgaaaaatgtgttagtcttttggatcatttcctatatatacaaaataagctgaaaaatatcaattcaataataatagtataatgtattttcactgaagttcgtatagcgccaactgcacaaagcatctttctttcagagttagtggtcttgtagtagttcctcttagctagtactactacatataaaacagtgcattgaatctatagtactatgttgagcgtttgagctcatatggaaattattagtgaatagatcaactgaatcaatagtcaacacgccctataaattcattttggacttgaaagtaaatgcaagatttttttttattgttcagatagagcattcccgcagtgggttggaaccattggctgttgctgcaattcctacaatgaagtataactgtgaagctttccattcggaagatgacacccagtaagtacaatcgtcaccatctgaagtaaatattattgaacttctttatagtgtggttcaatgcatataatctgcttctaacatgctattgttagaaaaactatggttattgaaaaatattagcacaatgagttaaaaggtttgttagactttgtggaattcatatccttgtggaaatgttggaatttagatgtgcttaatcgaagcatatttaatcaatatgtacaatgggtagagatattatagattatcaatcatacttcttgttgatgagataacataggacaacacacctgtagcttttatcagtttttttgcagtaccttgggccttcgccaccagtccagatttaataggaaccaatttggcagagttgagtcttatctcattacgttgtcaacctgggttcagtttagtcttacttcaagtaaactttctatcattatcatctctgcttgcagccatacctcttaaatttatgatgcatccataattttttttttttgtaatatataggatgttttgttgtaacaggtgctccatatgtttaagtgaatacaaggagaaggacattctaagaattgtacctatttgtcatcataactttcacctttactgcttagatgcatggttgctgaagcagactacttgcccaatatgccggatctcattgaaagaactgcctgatggaaaatcgaccgtatcctctgctcctaccatgtctcaaccccccaccctccctgagagttctgttaatccaacatctcatttcctcccagttcatcaagaacacagaagccaccaggatggcccagatatgccagaatctgtagaggtggttattgaaatccgacagtgactacggcggaatagtgcaagacaagaatttgcagtttaaattctttgtacgcccttcattgcattgtttgtcgcagtttcaaaatgtttgaagtcaaaattatatgtggtccctttgcaagttgtagactagagaagtcagtcatacaatccacattatcatatgttctttttaatatatgttgtatattgcaagctaagtaaaaataccgataagatctactgatataggagtagagcttatttactgttgagtccctaatttttttatgagtgaatttcagcagggacacctcttaccaaagttttactttcgactatttagggtcactttgaatcgccggattgagaaaagtaggaataggaaaaaagtaggattttgataggaatgtaagtgtaaaacagaggattgcaaaacgtaggaaaaacacaggaatgaccgtttgattgaaccgcagaaaaaatgcaggaattggatgagagaaatagactcaaaggaaagttaccaagagattgaaactcttgttaaatttccttcaaaatctctaaaggatgtccattccataggaatttcaaaagattggatatgattcaatcctttgttttaaagggctttatgggaaatatttctataggattaaaatcctctaaaatttcaatgtttttaggctgtgggatcagctgaccagatagctttttcgcaaacatgtttgcgagtctccatttttaaatgtaaatttattaaaaattatgaaaatgacccactaaaatatggataatggtatttgatcttatagaaaaaatttattgctctgccacttacgatctacatccaggttatactcctcatatttccgccaatgcatatatatcctctagctacctggatacagagatggcaatgggtctccgttcaccgtttccccacggtgaattcatctattaggtggcggggatggttaatatttatccttcatagggaatgaaatggtttcatacttatcaccatcggggatgacggggacgggacgacgcaccattcccccgtccccgtcccccgtggtgacctgactttgttgtagagaggaccaattctaaactttttagacgttctggcccataatattgaagcccaaataacatgtatatataaaaactaaccctagtcaaccagtcaaaactccaaatcctccactccttcagatcgagcactcggcagcggcggctccgttgcacgtgtgcaacgctactccgccagcggccagccaccaggtgcgccgccgctctagacggccaagccgtggacgcgccgccccagctgtcgtcgtcgcgtcccagttgttgacgtgccgccgggagccacggtagttgcgccgcccggtgcctgcagccgtcgacgcgggcgcgacgcttgccgtcctccgtccgctgccagcgccatgccgccctctgtcgccactcgctagcacgccgtccgccgccaacggcctccgtcgctgaagaaatcaactactgaagtgatgatttgtgttgagttgatttgttttgtttaaccggggacggggtaaccacggggataaattcaccgagtggtgatcggggctggagaaaatgtagccctgttgtggttgacgggggcggggacggtgaaattttatcactatgaggacggggacgcggatgtgacccctaacggtgaattccccgttgccatatctacctggatatagcagcggtgttaaagtagtagtaaaatgtatccaaacaaaactaaaaaggtcaagcataaagtgctcctcctgtgatcctgtctccaccggtgcatctatatccgtatttctccttatcaggtatcagaacaactttgaaaagaaagggtgcatccaactttgaaccaacttttattaccaaagtttcagtttaggcatcatttattcaccctttttattctaaactactacctccggcccaaaataagtgtagccgtggatattcgtgtccaacatttgaccattcgtcttatttgaaaattttattaaaaaaattagtcatacagaaaagtactattcatgttttatcatctaataacaacaaaaatactaataataaaaaattctaaataagacgaacggtcaaacgttaaacatgaataatgtaaaactacacttattttggaacggagggagtagctaattttatattgtatcactttgaaccacctcaactttcttatccatccacatctagctcattttctatcaagatatgaactatagacagttttagggcccctttgaatcaaaacatttagagaggaatttcatagggttgaaatcctatagggaatttttctatttggctctttgatttaaagaattgaattttccaaattctatacaattcctatgaaatgactcattgcatgtaagttttggaggaaatttagcaagaggtccaacctattggaaaaaaaaaatcctttgagtatatctctctcatctgattcctgtgtttttcctgcgactcagtcaaacgattatttctatgtttttcctgtgttttgcaatcatctgtttcacacttacattactgtcaaaatcatgtgtttttcttattcctccatttttgttttcattcctactattcaaaggacccttaggagtttattgtcgtgcaaaagccgatgtaattgaaattaccgagttaggccctgtttgattcagcttaggattatgataatctggattattaggagtaagctgaaacaaatagatagcgtattatgatagattattataatctataagccagattactataatctggtaatccactctaaaagtgctttttctactccctccatcccataatataagggattctgagtttttgtttgcactgtttgaccactcgtcttattcaaaaaattttagaattattatttatttttttgacttactttattattcaaagtactttaacacaacttgtcgttttttatatttgcataaattttttaaataagacgagtggtcaaagagtgcaagcaaaaactcaaaatcccttatattatgagacggagggagtagattattgggtgtaacagctaataatccagagaatcaaatagctaacagcttattatatatcggcttattataatccagatatagtaatctgatttaataatttaaattataataattttaagttgaaacaaacggggctttaaaatcaaggtgatgtaaagtgtaacgaagataaactaaacgatacttcattaataaaggacggatttacttgaaaataaactgtatccaaatcttccaacctttttttttgggatccaaacctc

SEQ ID NO: 2744 - DNA, 16444 bp, Oryza sativa
caaagatctgggcacgtacgcccgggacgagctcggaaaggcaaaatctgatcaaagccatccagcccagccagcgacgcccacatcttcgcggatcgttacatggcgacaacgagtggtggctggctcgcagccggcatacgcgccaaaaaagaggcgttatttttgcgcgcggtacacgacgcccctctgcgtccccgtcgcaccaggctaaagacagcttttactctgccgcgtgggcgtcgacgaaacatatgcgaaaataacacaccgcccctgcgtccgcttcgcgcgcgagcgaccacgggtttcgtcccccgccctccttcgtcctctcgcgctactacgagattatttctagaaaccaacaaggcgctgagctgattagtggttaactagcgtcgttttgctccggaaaagcaaactcgtggcctcgaccgcgttgctctccatggacatttgcctcggccacgggggccaggagcaaggcaacaaggaaaaagtacagcgtctcgcgacaaaaacggtgggaagcggaggttacttgtttttatttacgccgaatcggtgggccaataacagcttcccgccggccgggcgggctggctggctggctacaaatacaacaaggcctcgtggcagcataggcatgcatggtccatctcgacgcacacgcatgcaacaaaagaaaaaacgcaaccaccaccgcctcaccgaggcaggcaacaatgccaaaacttgtccagccttccagcagtacttcagtagcaccactccaaaatcaaatgcatgcatggctgcctggaccaatctcggccgttggctaggccaccatgctctccatgcccgttggtcaccaccggtcaagacaaacatactgttacttgcaatcttgcattctagcttgttgccgctggtactgatcatgcatggacccctcgcccaaaatagagaaaagaaacactcggtgcttctcaatcggttatataaaatatatgccaccacttgttcgccaaggtgcattttccatgtacgcctatggcttagctagccgatgcatggcgcacatactgcatgcgttcttggctactaaacccaacttgcaaagaaaaaaggcctagatttcctcactccgaacatggcgtgtcgctttgcacctatatccccgggtgaggcatccacatatacgcagatccattactattgatggtgtgtatctgaccccaaaagcagctagtaggttgggtgaggctacttgatttggagagcatcgaagcagaaatgattagatcgttgcctcatcgagtaagtctagaagcgaaaccacgcatctggtgaccagcgagggagtccccagttttccaaacacctggttttaaagcgtactagtcgtacatgcttctctggagatttctcacaacttgatcacacaacttcgcaagtgtgtggcagtttttaattgtcctgcatttagctggggcggcagatgcagagtaacctagctcgaagagtttacctttgcttattttgaaaagatcccaagaactattataattttactactagctaggtgtgtctaaaatagctttttaaagtgggcaaaacgaatatgactaatggcctttgccgaccaaaactcaatccccagtatatggattattgtttgacagatcgttttgcagtgtacaattaagtccactatttctttatttgacagatcttacttctatctttactattataaaaattaaagatatttttgccggtattttggtacgtcatccgtgtatgagtcggtttttaagttcgtttgcttttgaaaatacatatccatatttgagtcggtttttaagatcgtttacttttggatatgtttaaaaaaactcgcatgctaacttagatgattggattcctaactgtagctcatgattttcttaaaaatatatatatctaagcgaactcacacagtgaatttcatcttaactaaaccatataacaataataaaattaaaatagactccacccgttacaacgtacggatatttttttctagtataaacaggtttaagcaaaaccttgtatttatctgtcgagtcagcaaattcatcattttgatttcgcaaaaggttgttttctatgttcacaaaagtacagatgacatggcaaacaaattaaggctgcgttctttccgcaagtttcccaaccccttttcctcgttttccacgtgcacgcttttcaaactgctaaatggtgtgtttttttgcaaaaagtttctatacgaaagttgctttaaaaaaacaaattaatctatttttgaaaaaaaaattaactaatacttaattaatcacacgctaatggaccgctccgttttccgtgcggtggagttgggttcccaaccccaactatcaaacacagcctaaggatgagagtatgcaggaagcgaagacattgacattgctaatttatcaaattattttttatcatgtttattaaatagctgtgaagcaatgagataaggaacgctgctaataaaaccagttgactttgcacagtacttcttccgtcaaaaaatatagacatttttaagattgacacggatattaataaagtatatgagaatgattggagaaagtatgtggttggctgaacagagaaagtgcgtaaaaaagaatggttgtgattagttgagaggatgaagtaggtgaagaaatagctttattttgggacaagatactgttttagaaataactatattttgaacggaagtagtagcttgttagacacatttgttatacaaacagtatggagggtagacttcatttgtttgtatatatatatacgttgtcaacgcataaaagaaacttgagtgtgagttgaccagagggtccagaagtactatgtgggataggcgattgaactttgaagggggaataatataagattaacatctcgagagaatatcatctcgtttgttcatacactattcaaatagttaaaaaatgacaagatttatacaacattcatatacaatttcacaaaatcttatctaaactcaactcatatattcacatagggatttgtcaattttttaattatacattggatttgtctttgttttaattatttctcaaagtgtggatcaagttttaacttactgtgtttcatattataagactttctagtattgtccatattcatatagatgttaattaatctagacacatactggatatgtgtctagattaattaacatctatatgaatgtgagtaatgctagaaagtcttataatataaaacggaggaagtaatagatttagatttttggtgcagtgataaatgtcactggatttttccctaaaacattttgtgatcatttatgttgaatttgattgaaaaaagggatatccttgagagattaaaatcaattcctctatttaaggtgtcctagagctcaatgttcaaatcggagaagaaaatcagaaccatagaatatacctatttccctgacaagtttttaaaatttaagcgtaaagaatgagagtcaaacacaaataaaatgggctaacgaaatctcgcgcaggcactactattgccggccatagcgaaaaaaatatcacgcagggcggcattatcatgcatagcttaataagaaacgaaagaaaaaaacatatctgtacgaccatgtgattcctgtttttttttccctcatggcatatcttgatttggaattttgtcatagacttcagaaaaatgttttatcagtacagaatctggacgagttctcgtaaaactgaaatcaataccttagcaataagatttactactaactctgaccagtggtactaaataagataatcaatgccacttactgtagctataaaggagaaggtatgtaactgagtgcacccacaatagttatctataggctctttacaatagatccatgtcaacatattttcctacttggaagagattaaatgaagagagagagcaaagctatctactaacctggagaaagtctatagagaaaaacgaggcaatggattagagagctatagatacccatgtagacataccattgaagtggtttactattaatctagtctattactgagatgtaaatgttttatagatagcaacttactttaccattgcgggtgctctgaagccaaaaggtacttgtgccaacatgtttgtcttggataaactaaaatatgtccttcgaaaagaataaaacaaaacaatattaaaggtataagtacatcgtgtatgttttatatagtaaatctaaataagagctgttgttgaacgcgcaggtacacgaattagcgaaaaggaaatggagataatacgcatgggcggctctggcagatagatacagcagcaaggacaagaaaccaattcaagaagtgtcaaaagcaaagtgctgcgcctatgcgcgctatgagaggaaaaaaggccgggagcagagcactcctcgcctatataaagagaggctcaggcttcccatcccctcgcgcggctcagagcacacagctccaccaacctcacacggcctcaggcctcagcctccaaaggggagacaggagagaaagctaacgcttctctctctctctcggttaattgcctgtctgcgtgggagttacctccacacagcgccgtaaaagcttcgagcgaaaccccacgcacgtacgcaggcacgcacacgcgcgccggcgggcgggagaagaccagagtgttcttctgtttcagctatgacgacctgcgcggatgaccagacgggctgcgccttcttcgcccccttgctgtcctccaagggggcggaggtcgtcatcttggtggccggcgatgaggcggaggagcagcagccggcgccggtgctgacgagcaagccgccgggtcggctcgccaaggcggtgaacgaagcctggtccgtttctttgggcgtcgcgttcccggtgacgccgtccatgttcacctgctcggcacggggcgaggcgcggtccattcttggcctcgcattcccgatgatactgacgggtttgctgctctatctccggtcgatgatctcgatgctattccttggtcacctcggcgggctggccctcgccggcgggtccctcgccatcggattcgccaatattaccggctactctgtcctctccggcctcgccatgggcatggagccgatatgcggtcaggccttcggcgcgggcaattacgcgctcctgggcgtcaccatgcagcggacggtgctcctcctcatcgcggccgccatccccataggtggcctgtgggtgcagatgcggcctctcctcctcttctgtggccaggacgccgccatcgcggcggtcgccgagacctacattttcgcgtctctccctgacctcgtgctccaggcattcctccacccggtgaggatatacctcaggacgcaatccatcaacctgcccctcaccgtgtgcgccggcctggccattgccatccacctccccatcaactacgttctcgtagtcgtcctcggcctcggcgtaaaggcggtcgcattggcgtccgtgctggccaacttgaacctcgtgctcttcctcctcgcctacatcttcttgaaaggcgtccacaagcgcaccggcggtttccttctgtccgccgagagcttccgtggctggggcgagctcatcagcctcgcgctgccgagctgcgtgagcgtctgcctcgagtggtggtggtacgagatcatgatcctgctgtgcggcctgctgctgaacccgcaggcgacggtggcgtccatgggcatactgatccagaccacgtcgctcatatacatcttcccttcgtcgctcagcttcggcgtgtccacccgcgtgagcaacgagctaggcgcggggcagcccgaggaggcgagccgcgcagccacggtggggctcgtgctcggcttcgggttcggcgccttcgcctccgcgttcgcgttcctcgtgcgcaacgtgtgggcgagcatgttcacggccgacccggccatcgtcgcgctcaccgcgtccgtgctgcccatcctgggcttgtgcgagctcggcaactgcccgcagacgacggggtgcggggtgctgcgcggcagcgcgcggcccaaggacgccgcgagcatcaacctccgctccttctacctcgtcgggacgcccgtggcgctcgtcatggcattctggttccacttggacttcaggggcctctggttcggtctgctcgctgcgcaggccacctgcacggtgcgcatgctgctggtcatcggccggacggattgggcggccgaggccaagcggtccaagcagctcaccggagcgggcgccgccaacatggagagtgacgacagagttgccgcggacgagaagtcgcgcttacccgtcgatacggacgtggagcgatcgagcgatcacactgatcggtgttgaactgctgacagcaacagcgcgagccgcatgcgtattgtagtaatctagcctctctttttttctttttcttttttaccatttttatttcctccctctttccaaatttcggcgggggaggaatcagatgctgacagagcgacaattttgttctcggatgctaattagcaatgtaaagattatgctgattgtttattagtagcatagagttggagaatatgagataccaaggaaaaagattaattttgactcttttcacaatggaggagcaaactgttcacggcttcgctttctcttgctccgggtcggtgtctggtccagggaggccggccgcgtgacgactcggtcagcggcacgggccaaccagtggtagcaccgggtctcagctctaaagtcgcgtggcgcgtggctttggacaaaccgtcgggacccgccattttttagcctcgtagccgtcgggccgtcaagttgacactcgcggctttaacttctggtagccggtaccttttcggatacaactgtgctatggaaatcggactatcgcacgttcttgtaacaaagggccggctgacttgtaaagcacacctaattgctatcgattagaattctagaccatgattagctctggttttctttgcttttggggttaggacccgcatgcttgtgtattgagaaaattctgtaggataagcgtggaatagtccatcctataaattacaaaatgcaaacccatgtctcaaagagctgtaggataagcgtgaaatagtccatcctataaactacaaaatgcaaaacccatgtctcgaagagccctgctccggccggcatcgcgggcaagcgagccccacgttgaggcgtggttgggcttgagcgagcttcccgtgcgcgcggctcgcgcacaggcctggatccctgtgttctggctcagctcagcacccacgcgcgtgcgcgcgacggatggcgtttggcaccggcatcgccgcaccgcgcgttaaaaaacgacccgctcctccgctctcgctcgctcagccccaactcggccactcctttttttttttttggaaacctgccactccttggagttcctagaagatggcactgtttggaggcaccaaaaggcatcgtcaagctgtcaggcctgcttatatatgcactgctagtacggagtactataaactagtactcgtaataccgaacgtttggataaagtacagctcatcttcacaaagatgttggagttcggatcgaatgcccgagctgcacaatgcgctgcatagatcggagaccgaccgatgactagatgagcacctgttgtgccaacggataacatggttatgtgtctgttgtatgtgctccccgcccaatcacacctgctgctgacgtggaagggaatcgtactcatttggagtcaaaaccgttgtttacctccaccgatcgaagaatctgaggtggagtggcagcctggcttgctcaatcgaccaatgggactgtatacacgcttgaatgcttgatcctttgagagtcaatgattgttcccggtcgcttggattggatcattccaatttaaacaagttatgttccctggttcttgggcgagctcgagaggtgtctccaccgaagtagaaatcgcgtttactttcctacgcgatcagctcacggctcatcagtgatcgcaatacatgcatgatgcacacgtcccattgggctgagatcgcattttaattaggccccctttaaactgtgaccgatagtataggtcgcatggcaaaccgtttgaaagggcatgtacctattaaaggctaagttcctattaaaaaaagctacatatatccaaatggatatagaggccgggtaaaaaaatattcttctaaaaaaaagattcaaaacaaattttccaagagattaaaactcttgcttactttcctataaaatatctatagaattatccattccataggatttttaaaggaaatgatatgattcaatcatttgttttaaagggttttgtagaatttttcctatatgattgaaatcattcaaatttcctatgttttttcccttacaaatgagggttcttttgaaatacgagattgaaaaaaaggaggaattaaaataaagtaggattttgacatgaatataagtgtcaaacaaataattacaaaacatgcaaaaagtacaagaatgattgtttgagttgaccgaagaaaaaaatcacatgaagcggatgagagagagactcatagaaattttcaagagattgtgccctttgatcatatatactattcctatataattatctccattagctgttattctagctagccatatcatcttatttatttcagccattagatcactatcaaaatccaataaaaaatgttagatccccttttcctcttgtcctatgtcactgcatgtttgcatctgtttgaaacggtaagtaataagaacatccctaacttagaaactatcaactagtttctatagttgccatgtcatatagagactatgtataaaaactatatatcaatggacagtgtcttcaaattaaattctcatccaatcatctatcctctcttcttttatccacatatgccattgttttcattcttggttcttgtgtagagatgatttcttccatgagaaataatttattcatcattttacatctctcctcattaactctcttgccacgttagatttttgctcatgtgacaatttatttaatgctatagataccagatgatatggagggctgaggatggcctaaaaactaccatcaaagctctttttcgccaaattggccctaatcccattaattctctcataactatcctacaattaggataatcctcacacacaacggcatcctccttctcgagagctgatgtatgccatcatcccttcttaatcgatgctaattacatggtagtcatcgttcatttcctagagtactttagttttgccgattatctatagcatatatttgctttcatgaacaacacttgacagcaactcattgtacatatccactatacctgatatttgcaaggttaattatatcaatgacttttcggttagggatatgcttatgtgaaagtatgttcaaattttgattatttgaagtcgttctatattcatgtaacttttaagttaaactgagaaaacttctgcacattggattttttttaattttcccgcacataaatgtttatgtctagctacatacacatgtaaaagccaaacactttgtgacatactcctttcatcccataaaaaattaatctagtactagatgtgacatatcctagtcttacgaatctaaacatacctttatccagattcattgtgctagaatatgtcacatccagtattagattcgttttttttgggccggagggagtatgcattattttctttgaaattttcaaactagccattctcaaagagaacaatgatcatagtaataaaagaaacaattgtcatcgttctattcaacctccctattttacaccttcactaatgattcttatttttttagtgaaaatgttcgcaatgcgcgggggcataatctagtatgtacatgtttggccatcattatggtctttaaagaacactaatttctccaaattatctacacaatgctggattgaagtttactttttaaaaaatataattataggttatataaactctagtttctaattttctataaacataaatatgtttcgtacacactatattaatcaaactacattgttttaaatcaatacccaattaaaaaatacatctatttctcttttccttggtttaacatgggaatttttctagtcctagagcaaacactggttccttttatgcttctcctaataataagcaaattgccatgttttgcgatggataaaagaaaatatatcataatatgtcataaaaaatatagttttatcaaatatgttagcatcatgtgttttcttattcgaacattaagtattcacttgttttaaccaaatactggatcgctccataatattagaaaactatattcacgtcaatttgtataaactacaaaaaatctgccgccactagggcctcaaggagtttacaaataaaagctagataaaactataataaagttataaataaatgcatgaaaagttgtaatggcaatcgacactccaggcttatgcaaccacaattggattcccaccacaccaaacttgtagtttctgctaatatgttccacaatttgactctatataaacgaatttaagaaaaaaaaagatggaatacatttctatatcaatagacgttgttgtaaatgaacttattgttttttttaatgaaagctacatgtgaacttttccttttgaaatcgagatgacatgtttctaaaagagagatgacatgtttcctcaattaaggcacgtataatagcaattaatagcaggttcgtcttagggttgtcaatttgctgacacaaaagagaggggaacggaaagagaaatatcgatgttaagtttaccaatggcttaacattatcatatcttagcgtttataaaaaaatattactccatgggaatatgaaaaggaaaaaaaagtaataaaaattatctgatacattaattattatattctttaccgttgtaactgttgaaaaagatactagctagtctctaactgtgtgttggtcgtcattcctgtcttgctaaaattttctccatatgtactatttcatgtcttgacccaatctatatgctagcttatgaaccttctttaacaaccatattatagtcatcatgatttgttggtttattactgtataagcgacttacagacatggacgaaactcgcgatcgttgcttttcacacctcgtgtctatctcttaggaaattagttttttgcttctagttcaccgcaacctccgacgagttgctgcgtccatgtatatccatccattcgcaggtggagacatgcatgtcgacatctcttccgaatcatttaaagggaaatacaaatagaaaacacatgcctccgccgctaatcatataggagctgactatgcgtcctcgagataactcagcaccgttagtgcatgaatcctgacggaatggtaggtccgattttcctcatcaaatgcaggtcagcgtgtgatatatggcactatggagcacatgaacttaattatacgaattacgaccccctcctctgccgccgggttacgtccctgttgcgcgatttcaatttatttctctcgtacttggattgcgtgacttttcatgtacatgaacgggcggtcgaatgtccggcgccacggccggcctcgtaatttctgtcaatatcatggagctccatccaccgacttgtaaagcgacgccgatcgcaattgaccatcttccgtagatccactgcacggtaggatgcatgcataggcggcagagaccaagcaggagcagtcatagctagtttcagctgctcgtctcacataatttcaaccgaagaacacttgaagaaacagcttcctggtggaatgtcaagacaccgtgagcgtccccggccagtaggatcactcgcttccggcgaccggcttcagcttccgggacgtatcctccgaatacgacgccgcgagtctgcgacggaagatgaggcacgcatgccatgtgcgtggcagactggaacaagctaagtaaggcagatacactgatgcctaaaacacgaactgttatttattgtggtcaattcggccacggcaatctgggccggctggcgaccgatcgatagagtgagcgaacgccgattccagttacgtgcctaccttgccgcggccgtcatcgtcgcgttggtttcccctttgaacagggcaaagcagcggggaagggaaatcaagcacgtcgcctgcacctgcgggctgagagtgacggctcatgtggtcttttgcgcctgggagggagcgtgtctagtggcaggggagcacggggcaatccagcccaatcccatcgcatccatcccgggtgcacacggtgacacggctaggctaggcgcccgcggcgccgtgggtccagcggtcgctgccccgccagtagctagtggagtcgatagagggatcggatggctggttggctttgggctcgctgagcctcctcagcgagccccgcgcgcgcgtcgcaccggtggaaaagaaagtcgtgacggcgaccgcacgcgcgcgcgcgcgagggagacggggcgcagcgcgtggtcgtggttggtgcggtgcacgggagggacgcgtccgcgcgggcggcgggggcggcaggtgcgggtgggggcgcgcggtcatcagcggccgagccgcgggcgccgcagcgcgtggcggtcgtattccgcggcaaagctggactggtaaattggtcccttccgaggaaacattcagcgccgcctcgcccgctcgtagtagcttcgatttcgagcggagttggaagaatagctggaaccatctccaccttgcaaaatgccgaaccacatgattttcaccgtatgaaccagtcagcactcaaatctcgcagatatctaactccggacttgagcctgatcctaacgtaagacttgtcatgttgccatccgtttatctctgacaaagttagcgtttgtcactaatatctttctgattggtatgtcgtatgatgggtcgtttaatttttcgttccccaattgtctacccgttgtacgtacgtggctgactttgtactacaatatatcaaaagaattgctggcgtcgcataaccggatttatgccataatttaaggtttgaacccaggttttgtttacctcatttgccacgcctcgtcaactggcgacgggtacaggactacagcgcgaaaaaggaggtggggagatagcgttttctgttccctgattcctcatccatctgcagggcgcacgtttgccgggctgcagaatatcaatccctaggacaaaaagtacaacagaagttagacctgcaaagataagatattttatatacatataacaatgtatctagccactctacaatacgccaattagccgcctaaatttgtaatgtattacgacggataagcttatctttgtgaggaattatttggataatggttttttagtatagtagttcggataagctagtaaaactacatcggcaccttcatcctagtagtagattagaactgaggcctccattattactgcaatcgcggaatcagaatcttgatgaaagagagtaaagcaacaaaaagccatgctcaagaagatgatagatgtgttgactattgcttatgcgccccaacagtttataagtgcagattttagatgactggagcccgcaccaatttccatcctgatcggttttcttcactggcagttcatgttgatggtggagagtgctatagcagatagatatggtcttggtaatacacagtgatattgtttactggagtatatggtactctactgtcatccattgaggtggagcttggacaaaggtaaagagatactatcaccaatactcacattaattgttgagagcttggaatcaaagtaccactgatgcacttgcagagtattgaaacatatccaaagttgttcggtaaaggggccgttttccaaggactgccgattactttaaataatctcacaacatacccatttctctttataagaaaccatcactaccagcagaaacagagatatattaagataaatcacttcacttataaaccgtacatgtagcccttgctctagtctagatgctaaaaatatttatttggtactacatccgtcctaatataagtgcaattgtggttttcgtgtccaacgtatgactgtccgtcttatttgaaaaaattataaaaaaattaaaaaaaattagtcacacaaaacactattcatgttttatcatataataacaataaaaatactaatcataaatatttatcaaataagacggaatgtcacacgttggacacgaaaactcacaattacacttatattaggaaagaggtagcactttcatagtagtaagtggtaaaaggtatactactaattagtactcaaacaaaacatgcaaaccaaacaagccaaactggtggacgaaggccgtgtttagtttcaaagtttttctttaaactttcaattttttcatcacatcaaaactttcatacacacataaactttcaactttttcgtcacatcgatcgttccaatttaaccaaacttctaattttggcatgaactaaacacagctgaagaaagatgaaggtcttctttttttttttttacgttgcaaaatttgcaataagctactacaacagataatgaaaataagttccatttggacagaagaaaagaaacatgtttagaaattttaaaacaactgatcgtcagctcacatgtaaaaaaaagaagtctataatgaatttccaaaatgagcagcgatgttcctttgtctgctcaggagatcaattgtgtaccggatagctagccagtgacatagagccacctgatgtcttgctgagttcattcttgaattctttagatgctgacttctctacaaggtattttattatgagctgatctactttgccaatgtttattgaccaataataaatacccataaccagtcaatgtccattcatattatctaagaaaagtcaatatacatccacattattataggaaaatccagcgtgtacttcacgccgttgaccatttacatatataatgtccgattgagaaacatataaactgcaagtaagtcaaatagtaaattagaaatagttctgtggtctgattcctgaaagttgacaactccaatttcttattagttagttttggttgactaattgtatgaattataaaatgcaatcgtgtggcaaatggcatagttgtttcttttttcgctgttaaaacctctaggtgttctgccaccacttcaaagactgtcattcatgtaaaactttgctggccggtttgttagaaaaccaaaatttgtaatagttgacatgagtaatgctaattttcagaattttgcagtgttgaaataggtagacaccagtccgagaatctgtctatattaaaacaaaagaaggtcaacactctaaactagcccactatgacattccagcccacatgagtatacagcccagcacataccaacttagtacaaacttaaatttatccatggtccagattggaataagttcactttgactctattaaaagtgacccgaatctaatccgtgaccttaaaccgcaaaaccagatatcttaacctctaaactgttaaaaccagtgcaatttgactccctcggtagttttggatagcggttttgctgacgtggtgtctacgtggcattgttgacctggtccgccgttgacgtggtgcttaggtggcatgtggagttgtggacccattcgtcattcccacaaaataaaattttgtggggcccactgggggtctatcccttcctcctcccccgctctctctctccctcatcattgagccagggccagtgttggcggcggcagaggcggagtggcggcaataggtggagtggtggtggtggacgggcaaaggcgccggcgacgccgtgggaaaggagccagagctcgagggagtcgttggtgtccctctctctcccctttaccactctttctctctcccacttcggcggcagaggcggagtggcggtggcggacgtgagggtggaggcgccgacggcgccgggtgagaggaacaagagctcgagggagccatcgacgccccccttctctctcactctctctctctctctctctcttcggcagtggaggcagagtggtgacggcgaacgggagggtggaggcgccgacggtgctaggggagaggaacaagagctcgagggagccatcggcgtctctctctctctctctcttcctctttggcgccgggggcggagtggcgacggtagacgggagggtggaggtgccgacggcgcttggggagaggaacaagagctc

SEQ ID NO: 2745 - DNA, 962 bp, Oryza sativa
tgaaaacctgatgccgtctattgcttcatgaactagattctgggtatcatcatgagccactttgctactgactctagtagtctctggatcctccttaggcttggtggcattatcagtagcttcttctgtcatgtagaacacagcacatgattcgggagattcaatagttagtgtatattcccatgtctaacacatttcaaggtgcaaaactaacaacataaactttgactcactagatatcttccgtttcttgcaggcgtaaaaactcttgagaccgggtgctctgtcagttgggctgatgtttttatctctaattatatgcacctgaatgtaaggcatgaagaaacaagaggtaattgtattgttggattagggaagactgaacccacaagggaactcaagaaatgggtatgaatgaagattataaaggaacaatcaagtagtagtagtagatttggaagaaagttatcaagcatttcagaaacacttgccttgaattttgttgtgctcacaagctcaaagaccacaacatcgccaaccttgatatcatggttaatcgcaaaacctctccatccagcactgagtccctgcttaccacccaggtaatttgtgttatggttgttcccattctcatcttcgagcacaatgtcagtgtcatgctttgggagatacttgttgcagaagccagctggtagaccctgcagaggagaacaataatcagatgcagagaaaaccaaaaagaagtttctaggtggcttgtgcagaactagtgtcagccattttcataaacacaataactcaagcagtaagagctaacatgcaagaaatgtacataagttggatataacttgtatgtgtgagacttctcttcctaaaacaaaatttaatgaaaaagattagaagtttagaacatgttaatagggtagtaggaagttttaaataagatccataacacgctttaa

SEQ ID NO: 2746 - DNA, 641 bp, Oryza sativa
  unsure (1)..(641): unsure at all n locations
tctaagggagtaaaagtgaacttattcccgaccaacatattccatgtttgtcgatgacaattcatatgatcgatcgcctaccaatagcaaaatgtagaatttctcttcatataatgctacgtcattgctatataaatcaatttttttcacaataaataaataaatcactttacctggagtaatgatgatatttttctcctcctcatcacgaagaaatacaatctggatcaaaaaatcgtatggaaccatgacgtatagcaacgtaacctgggccttgggccgtcgaagcaagcccacctaaccacactcccagcgccgccgccggccgtacgccggagaccggagcctctcgggaacaccgccgccgcttggccatctcccctgccgacgacacgaccgcttccaccaccgcctctcctcttctcttctccactcttctcctccccccgccgccgccgccccacgcgcgcgcgcgtcctcttaaatttagccgatgcctcctctcctctcctcctctccatccacctattctcgccccaccctctcctcctcctcctnctcctcctccgcacccacatccaggccgtcccgccgcggctggatgaaggctcatcgatcccttgccggccgccgcgaccgcg

SEQ ID NO: 2747 - DNA, 1037 bp, Oryza sativa
ttggcaaagatttttgggaaggaccttaaccttggccggccttcagcaggcccaggaactggcgtgtcagaggcagatgaaaggtcgtgggaacaaaggactggtggtgggagctcattgctccccaatgtccaaagaggtttgcagaatttcacttggagtcaggctcggggcctgaattctcatcagcagaagtttggcaacggtatattgattgtgagcaatgaagccacaccgcgcaacaatggaggagttgacagctctactgcaacacagtttcagcttcagaaagcaccaccacttcagaaactaccacagctccagaaatcacatcagctagtaaagccacagcaactagtgagtcagcaacagttgcagcctcaagctcccaggcaaatagatttcagtgctgggaccagttccaaacctggtgttttgactaaaaaaccagctggtattgatggggatggtgcagaggtggatggcttgtgtaaagacgaaggtccgccacctgcattagaagaccggcggcctagaaagaggggaagaaagcctgcaaacgggagggaagagccactaaatcatgttgaggccgagcgccagaggagggagaagctcaaccagcgattctatgcactgagagccgttgtacccaatatatcaaaaatggacaaggcatccctccttggtgacgccataacatacatcactgacctacagaagaagctcaaagagatggaggtagagcgagaaaggcttatcgagtctggaatgatcgatccgagggatcggacgcctcgacctgaggtggacattcaggtggttcaggatgaggttctagtccgagtgatgagccccatggaaagccaccctgtcagggccatcttccaagctttcgaagaggcagaagtccatgcaggggagtcgaagatcacaagcaacaacggcacggccgtgcattctttcatcatcaagtgccctggcgccgaacagcaaacgagggagaaggtgattgccgccatgtctcgcgtgatgaa

SEQ ID NO: 2748 - DNA, 3529 bp, Oryza sativa
tggatagtctggtgttatgaatccatgagtcttggttgtcaacactgttttgaagtttgttaaactgtctaaaaaaaaaacaaacttaatatttcattagcctgtatacccatctccctctgaagcacggagttctactcattttgtttcagaaagataaaatcaagtgtttgctcttctgcctggcgttttctaataaaagaatatttttcatgcaggcaaagccattaatcctctttgtaaaggtatcttttcatgcaacttgttcctccttatttgttttagtaattctcatgcttcatgttgctgaacctgttttttaaagaataaaatcaatgaaaatttagggtcctcccctcccgttccccaaaagggggatatttgttactttaacagaactacacattatctaaatgttcatcactctgtttttctgccagtagttagtactgatgccaagtacacctctttatttttgcagttaagcgagcttccatatcccattctgtatctctgtctttaagattgatgtgctttttttttataacatcgtggtttgaaattagttactctactgactttcagttgccgctccacaccccactgcaaatgtcagtacaaacaacagccttttggatcccttttcaagtgggaatggtactgtgctattagtgcaaaaacatgagcctgaatgttcaagtgttgtatcatcaatacaaggacagaatatggatctgaaagtgatggctacaatttgtttaaccaatttgatgttgtgcaagatttttctgatcattactatgcaaagaattcaccagggaaggtaagctgtgccgctttatgaactctatttctatcactagatccaactgtgaattaatttcctgtctttacttgtgaccactgaccagacctccaaagattgggtgaagacaatccaaaatgaatggaagcttctacagaaagatctacctggtcagtacatgcttttatatggcaaatcaatgtatgcatttttatcaaaccgccagtgcctagatggtgaatacatataatggtcctttcttataatagacctgctgttttatgccaattgtatctgatcacatgccaacagaatacgtttgagatatttctagacttaaagatagttggatgccctgtatgggctataccaatttgcttgtgtggtttgtagtcttggcatgactggtgctgagtcccaaactagctaatgacattgtctaggctttgatgtataaaatactatatttggtgccctatctattagtgtctggtgtgtgccacatatcttatacctataggccctcatttgtcaccctcttccatgtaatcttgtcgatagcagcatataacatgtatcccaaaatcatcctttcttaagtttggggaatgggacaaatcgaaattaactcctacatctatcaaatcatgttaccgaaaaggtatcacacgtatcattacatacactatcacttttgtgccttaaatctttcgtttagaggagctgtgcctgaaattatatgatgtcttcagtactagcaacttgcatctcagcatggtttcaatcatgcagaatctatctatgttagagcttatgaggataggattgatctgctgagggctgctattgttgggccagctggaactccctatcatgatggtctgttcttctttgatgttcgctttccttctgaatacccacaatctccaccggtatgtaaccacttcacagttcacacacgctttgcaccattattttcatgttactaccatcattaatataatctctttaaaatcatatccaacatgtacagaaagttcattaccattcgggtgggcttcggctaaatccaaacttgtatgagagtgggaaagtttgccttagcctgctgaacacctggtggggtactggatgcgagaagtggggcaagtcaaaatcaaccatactgcaggtgctggtttccatccagggtcttgtgttgaatgataaaccatactttaatgagccaggcaacaaaaattcggctaatacagctcctggagaaaagtactcgttggcttataatcagactgccttcctactatcctgcaggacaatgatgtattcacttcggaagcctccaaaggtaactacagaacccccatctctcgtcaagtttaaagtggtaatttcacaagtctctgtgctggaaaagatagtaatagaagaatttcagctgtcagggttatatcagtgcttctacagtcatccagataaagtgaactgctctctgtgcctatatgcttttaaatactgatatacagttaggaactactataacattagtcatgctgtaccaaccgtacttgtcactccgtgaaactctttagcaggcattcagttgccaggagagcgattttccggcttgagaattgtgttgtgttgcgtcatgaaattgccaacttaaaaatttatctgtgggcacatttaactaacaaagacacgcattgtgataatgtgttttggagttttgacagtatgttattgcaaataaacagctgaataagtgagcgcatcagcgcaagaacatttgattttgaaacatcatcagttcatcaccatatgtacctatgaagtcctataaacacaattcagttccatatacctcttgcagatcgattcgctctcacacacacctttcattcactgcagcattttgagtcccttgttgcacgccacttccatgagcgtgagcgcgtcatcctggatgcgtgcgacgcatacatatctggcgcagtcgttggatcatcctctgcgaagggcaccaagcatccccgcgacaacaacagatcgtttgcagatttcaagaagtcactggagaagtactctgaactgctcaggaaggacttggccgcgaaccgcacacacttcctgaaactgacaagagactcgccggctgccgcagatgagatcgttgagtgtaccagcagctagaatcgtcagagcatttgaccattgcagttcacctgcctaactcaaaagtgaaaatggtgtatagatcatagcactcgttacacatactgtgtaggttttttgtttggaggcaagatcgttcggattaattatgcaagaattcgggttgagttcagtgctagccattttgtttagtagctgtttctggtgatacaccaattggatgatcgaaacgtggtccaattctgccagcttaggctttgaacctgctgcattttaaatttttaatagaacctgttgcactagtttatatatgcctatatttacgtggtaacagacagagcagagcgtgttctatctttggttttgaagacgtccattttgatgacgtctttcaactccagacattatttatgctcgaaattgtaaagtaccgcaaatttggtttatgcggaggtttagccagggttccaaatatgaaatgtaatattcacagtagacatatcgatgctggtctggtttgtgagacctcttgaacaacaaatcgagcta

SEQ ID NO: 2749 - DNA, 935 bp, Oryza sativa
gagtaccgcaactccggccccggcgcggcggtcggcgggcgcgtaccatggccgggccaccgcgtcatcaagctgccggaggaggccatggagttcaccgtcgggaggttcatcggcggctactcctggctgccgcccaccggcgtcgccttcgtagccggcctgaccgtgtgaggcgactctcactgactcatggtagcttaagccaataagttgcatttgctaattgggagataggtggtagtaaaagtaggtgtaatttttcaagtatgatgtaatcatctacacatgctaactgattcaggaaaattatgattaatgattagtttgtaggcttgaatttggattgagaaatgagaattctgaattgggcacaaaaacaccatgaatgtgaatgaataaacctgtgaaatattatacaataacgatattttttgcaatgttggtgtaatgagaaaataaattgtttgtccaactacttggtccctgcaagcaatgagagtgcagatgaaaatagtgtactagctagtaccctggaaataaaatatgccaaccaaaaagctccttttggttgtcacttaggctgctcacaatatcacagtgagaatatatgcttttctttgcattggatttccaggaaatagtacctgctagatgggtgtggggcttaccactagaagatcgaaagaaccaaaagctagcataaagagagaatatcagagagtggcttataattgatgggctattgccactaaattcctggcacaaattcttagctaaaatatcgtgtatttgtgctccttatcttgtatgtaggggaataattgtgtatttgtgttcgacaatcttcagctattttttcccggcaaagcagtagcattgtatcgttatcaacaatgacaactgataaaatctaaacataaacaattggatcc

SEQ ID NO: 2750 - DNA, 1000 bp, Oryza sativa
ttcatattgatgttaatgaatctagacatatatatctatatagattcattaacattaatatgaatgtggaaaatgctagaatgacttacattgtgaaacggaggaagtagttttttttcttttgtgtctcttttagatttaattgaacatgttgcttaaccccacgatcattcggcccactgaactcaaccgatcccatcccatgatcatgcttgctaagcgatagctgaggcggagcgttgtttctttttcttttcctttttttttaatcctctttcttctactactatctctctctttttaccttcaggaaggctcttcatttgaacggatggctacgatttgtcatttctgttttgtcgttttctgtatcggatggtcaccgttttgttcattacatggctcatccaagttgctgttttgttcattacatggttcatccaagttgctttgagagatttactttttcagttaggtagatttgatgatttattttactacaaaatattacgtaattatcgtttattttatggtgacttgatctatcatgaaatgatctttaagcatgacttctttttatatatatttgtacaaaaattttgaatgagacaaatgattaaacgttcataaaaaaaatcaacgacatcaatatattaaaaaacgaaggtagtatcaaatttggcacagtggagttgatttgtgagggtgtgacgctgccgagagagagtagagagtgtgtgctcagaattggctcactcacctgcttgtacttcttcatgcggcacccatcggcggtctcgatgatgaactccgtggagaacaggttggcgagcttgacaccgtagccaccgccgccgtcgttcgtcgccttgttctgatcatcctcttcgtcgtcgtcatggaggtggccgaagaacatctccggcgcgtagacgccgcgctcctcgtcgacgagctcgacggggacgacgccgcggccgttatagaagacggagacgct

SEQ ID NO: 2751 - DNA, 3103 bp, Oryza sativa
tacacgccatcttgggtttttaatagaggaagctgttaacttttcgaaagatgtttgagcattcattttatttaaaaattttgtgtaaatgtgtgaaaatgtaaagtaactttaataataaaccaagttatagaaaataataatgatacaatgttttaaataagataaatgatcaaacatgtgataaaaagttatataatttattaaaacccggggatatatttacattgcatcccgtagggtagattgtacattgtaacatgaatgctatttttccaatcattagaagtgaattacttgtaattatccatttataaatagctttattttgaaacgaaggatggactttcctacttcatccatcccaaaatataaggtgtgcacatgtatcaagaaagtatgtaaaaatgattgagagatattacgatgttaaggaaaaaaaattaagtgaagaaattaaatgaataataattatgattagttgaggaaaggggtaaataaaaaaaataaatttatttcaagacaaaggtactaaaaatagctttagaccctgtttagatgagactaaaacttttaattttctatcacatcggatgtttgaacactaattataaatattaaacgtagactattaataaaacacatccataatcttggactaattcacgagacaaatctattaagcctaattaatccatgattagcatatgtgatgctacagtaaatattctctaactatggattaattaggcttaaaaatttgtctcgcaaattagctttcatttatgtaattagttttgtaagtagtctatatttaatactctaaattagtgtctaaatacagaggttaaagttaagtctctgaatccaaacaccaccttattttttaggacggaggtaatataagattgctagtttgactactctctggttaaaaagcccaatctagaataaggtgtaacattataatctcattctaggttgttttttttatattaggttgtttttttttaaggaagaagaaacacgtctgacggtgtgaggcagcagccgatgttctcacagaaaaaaaagcgattttgctatatctcactcgaaagattttttcttatctctcactcgattttctcactcaaatttacagtgcattttcttgtaagttacagtgtaatttatgaaacttacactgtaacttttgtaagttacactgtaatttttgaatcttcacatgtaaattttaaattttgtattggatttggtctttttcttgaggatatggtaatttaatgttcattatggtgtttcttaattgctttttgctttttattatatctatcggattttaatacaaagattaaaaatctgtgtgatacgattataaaaatctttcgaaagatgtataggtactcccaaaaaaaaagagaagaaccagcggaggcccaatcggtagccttataagtctcgcagcacaaaatgggccgctacttactataagaatgtacgggccgaaaagcccagttcgtccctcgtgccgcctctctccgggccgaaaaagcccagctcgtccctcgtgggcccactccgccgctctcctctccgtcaagacggttggcgtttgttcggcagccggcggttgtcacggtgggacccacttgcaagtcgaacgggaaatgggaaaaaaaaaatctctcatatccgactgactccgagaagtccggtgacgagagagatcgagagaacactcgccttagctcttcttcttctcccttctctacggggagttgcggctccggcgggcgcgcgacgagaggatcgccgaagaggttggtcgcgccccccccccggcgcaaaatcgctccgatcgattccatttcaccccgatttctgcttcggattccagtctgttggttcccccgcttgaactcgcaggaatggtgggattgggggtttcgagggggcgcggggattagtagtcccagggtttagtggagatgcggtgctgagggtcggaggatgctgtggcgggggcggttgaatcgcgttgcggcggaatcaacagcttggtgcggcgtggtagcattgttctgtgttggctggggataggtgcagggtggttttcagtggaatcacgtattcaaggctttttttatatataaaaaaacgtggtcatggaatcaatattatcagcactttgtagagtctatgccgaatcttttgttgcttttggaagaatatatgatgtcagttgttagtgattttgcactgaggtgactggttgaattaggaaaggtctaagctgcctgctatgaggtaggcaagaaggctgcatgaatgatgaatcagtcaatatcagatcactcttgctggctatttggtcccaacttttactagttagataatgtcttaacgaatgcttccatgtgtaatctatttgccatagtaacagggcactaaccaatcactttagctgcaactttagggtttattatgtttccatggcttgatggtaacattgtcaaactgatccttcgtgttgtgcaatataagctgaactgttgctacacctctcggtttatactatattaaaaccttcagtccttcgcaattaactgctctgttatacattggggaaagtggagaagaactttgattaggaatttattgctttcagttactcgtggtgcctttcagaatcatggcaaacaatattctgcatttgacaggcataaatgcccatcatatgttgttctatgctcacatattgctaatatgtttattttgcttttggaatcttttcagtgcccagaactgagattttgagtttctaatatcgattttcattccaagggagaattgatatacatatgaaactctgagaaggatgggttatggcatgagtaggatggaggaggaatacagcgagcatgaagatcagaataatggtggatctaattcacaagtgaataatgagttcttaaacacacataatgatattttccatatgactcaaataagatcaggacctagtgaaagtcttcgcaagtctattggtacaagcaaagatgtgatatcgacaaccaggttattgtctggaagggaaatt

SEQ ID NO: 2752 - DNA, 2350 bp, Oryza sativa
attagtagaacctattagtatatcatttttttaaaataaatattgaattccgcatatgtgatccttgttcaaaaaatgtttcaagaaaaaccatggaggtgttagcatgctgggggcaagaataacctagtgttaacctttatatcttatgtcccatattctaatcttgtacggagtactaatggacttcaatttaggtggtgggcattttattttgccaatgttcggtgagtgatgccgagatgcatattgaattgtgcgtgatatgtcatatgtgttctaaattattgccttttatgaataatattgcatatcgtgtgtatctcaatgtgaagttatcaaatttataggaaaagggattatccaatttttttagcattttttgactactttctacatttttaggaaacaaaaataaattggaaatttctcatcggtttctcgacataatcgattggttttcgatacgaaccaattgatattttcactttgcttgcactttcaattgccgatcggaattttaatgtttatgtttgacatttggatagagtcgataggatttcgacacatgaccgatccactttgcttgcactttcaattgctgatccgaattttaatgtttatgttcgatatctcggtagagtcgacaggatttcgacacatgaccgaacaaaaccgataatttgaatttaaatttttggctacaaaatttgttcggaatctgtctcgatcggatctggcagcatactgccagcgtccggcatggaaggtgtttctgaattgtgaaccctggtggcggtggccccgcgaggcgagaaaggccgggtctcagtctctacgagcttgtgttttgggtggatccacacaggagtagataggttcttccggcccgagttcgcagcgggcgcgggggcgcaccgcatgccccgcgggaaaactaattactgtctgacgtccgatacaatcacaaatatcgaacgcctccactcaatgttagtagtacatgtgttatactgtgatttttttttcttgtgctcaggtgcacctacgggtgatgtatacgcttataacaactttattttaaaactttaaacaactttttttttctgttttacttatctggtcaataatttgatcgtactatttgattcgttacaattaaatctttacaacaagacctcactcgattatattctgattattttttaaaacttattttttaatgttgcgcatagttttactcagttgtttcaataagtatttcttagtgtttcactattccatttataaatgttacacatatttttcccacagtctaaaaaatgttttagcaaattaattattcttgtgaatatattatgtttcacatgacttttttaatgtttcattagttaggactaaatgtttcatgcagtaattgtcgatgttgcagtcagtattatcgaaatgttgcatctctttgaaacacatttaattacatgatgaaacaatttttctataaggggtgaaacaacgctcgattttttatcaaaatataaccatatgagatcttgttgctaagatttaatctattatattattaaaacagctttgaaaggaggcaccacgttcgttgtgagagctagaaattcccacattaataggataaaaagaaaaaaaaagaaaagaagagtccaagtagaagtacaatttaaaaatagttcaaattcggaattaaaactaagcaatattgaaagaagtttctatataagaacccaatacgagatcaatcaaaattcgaaataaaactaaaataaaatccaaaattataaaaggaaagaagagtccaagtagaaatacaatttaaaaatagctgaaattcgaaattaaaaataagcaatattgaaagaagtttccatataagaacctaatacgagattaatcaaaattcaaaaaataaaataaaatccaaaattagaaaaggaaatgggagtccaagtagaaatacaatttaaaatagctgaaattcggaattaaaaataaagaatattaaaagaagagtccatataataacccaatacgagattaattaaaattcgaaataaaaataaataaatccgaaattagcaaaagaaaataaaagaagagttcaagtaggaattcaatttaaaattagctgaaattcggaattaaaaataagcaatagtgaaagaaaaatccatataaaaacccaatacgagattaattaaaatttagaataaaaaataaaataatatctaaaattagaaaaattaaaagagagttcaagtaggaatacaattttgaaacaactaaaattgaaaataaaaaataaaaacattaaaagaacaca

SEQ ID NO: 2753 - DNA, 16819 bp, Oryza sativa
caaaattagaaaaggaaatgggagtccaagtagaaatacaatttaaaatagctgaaattcggaattaaaaataaagaatattaaaagaagagtccatataataacccaatacgagattaattaaaattcgaaataaaaataaataaatccgaaattagcaaaagaaaataaaagaagagttcaagtaggaattcaatttaaaattagctgaaattcggaattaaaaataagcaatagtgaaagaaaaatccatataaaaacccaatacgagattaattaaaatttagaataaaaaataaaataatatctaaaattagaaaaattaaaagagagttcaagtaggaatacaattttgaaacaactaaaattgaaaataaaaaataaaaacattaaaagaacacaatacaatattaactaattttttttaaaaaaaatctgagattagaaaaagaaaaataagatttcaattaggaatacaatttattaataactaaaatttttgataaaaataaagattattgaaagaaaaaaccatctaaagcacatgacgagataaattaagtaacaggcctataaaaagtagagtggtgcaggcggttgatacaatatataaaaattattaataaaacaccaaataaaatcctaatgacgattaaaaggagggacattagacaggccgtgaagcaaacgagtaaggcagttgccgggacttctaaaaagtaaaaaaaacaaaccccattgataatcatatttgatttttaaaatcctaatgacaataaaaaggataagcagcggacggggtgtataagggtatagttgcggagccgccgacggttgaggggacttctagaaaataaaaaatgaattccaacgatagttatgttcgatttttagaatcacaatgataataaagagtaggcggcggacggactatacaggggtatagtggcatcatttgatggggcttttaaaaattataaaaaatgaaagtacaagtccaattttaaaggttcagaacttctaaaaagtaaaaaaaacaatgataatcatgttcaattgtaaaatctcaatgacaataaagaagggaggcagcgggcgagccgtagaggagtacattggcaaagccgtgttaacgaccaaatttggtaatctaaggatcggagatggagaagaaatcgagaagaagtcgagatggaaatcgtcccggaaacagagtgaagatcggctggagtccgaatcggctacggctaagatcggcagagttcgagtcagacggggttagccgattaagccgaatccgacagtatgacacagcatacgttgtcggtttaggttgatgtgcttcataatgattgccacgcatggatagagtcctcagaaggcaattgtatctattaattaggatattttatgtaatttccttagagatatgtttgggcaaaagtctgccgcaaagacttatggtatcttagagtttgttagagataagagtcgtgtccgatgtggacatatcttgttataatgattacaatgatataattataccgtagattggattgataaattattagataaaactatttatactgggtaaataagtatgtatacatgcatgcaagaggtagtgagagagagctgttagagagacgtccgattttagtgcatctatcggacgtccgatgcgtaggcgtccccggaaaaaaggctagggaaaatggtagtatgatcaagtatataggaactacgtagaaccttctgaatggaatgaagtactagtactagattctaagcacaattgtgcaaaggctaaatggctaatgcacgactgttacaaaatgtttatgtgtgcccagttgccagcctggcgacatgcttgagaacccaccttttagttagactaaccgaacgtcaatttaagtatatagtcatctcttgccttctaaggtttaggcaccattattgtgtctcccttaagccctcgcttgttcggctcatgatggaaatggaattgaaattgacgctcctaatttcctatatgaggtttctgattaattaagttcagacatcatgcaaccagacagccgtgcaaacttaattagcaccacggctatcgtcccaatccatccgattaataattaattaattaattaatgaacgtaacgagcagctacattttcttattattctcgctgggcctaatcactctctgtagtactccctccactccagtttcattttaattgacgttttggacaatgacatggtatacaaaatatatctttgactttatttttctattataagatatacaataaataaatacatgctcacttttattatagtgatttgaatgataaatctatatatgttgttctagtatctttaaactaaatattttaaaagttattgatggtcaaagttataaagtttgacttcaaccttatccaaaacgtcaattattactacctccgttttttaatagatgacgccgttgactttttctcgcatgtttgaccattcgtcttattcaaaaattttatgcaaatgtataagatataaatcacacttaaaatattatgagtgataaaacaactcataacaaaataaattataattacataaattttttgaataaggcgaatggtcaaacatgtgagaaaaaatcaacggcgtcatctattaaaaaacggagggggtatataacaggagggagtatacttacttcaaagtcaaaccgcgggtattattacatttatgtccacctctacgcatttcaagaaatgtaattacagtgattctctgcgagcgtttggtacttaagctaagctgaccgagttcgtgctagcgtgtgcgcggcgagcggcctcatcgtggccggaaaaacaactcgtcgcacgaagcagcgaccggacaccgtgctgctcacaagccggcaatgccccaacacgcccacttgtttcttaccgttggcttcgaggccccacggtctgacaagtcctccacattctgtccaggtcaatcagtccaactgtttatccaacaagacaataataatggaactatggaagatgaaattttgatcttttttagatgggtgaaaaatgatccagaccaccaaccaaagtccaaactacttcaggctctagaaaaaagagaaccactgtaacaccaaaagccactttcctttttgcttgctcggcgactcaccgccgctgacaggtgggcctggtgattcggtgccagtctcctcgtccatgtttgccactttcgccgacgtgggtgggtgggccttcgggtgaagctgaaggaagcacaaacagagccgacgatacggactgtaactttttcgcatgtgcttcgcgcgaattattcaggatctctctctgtcatccggtcgaaagcgacctcccatgtcatactgtctccggataaactgcccatgtttatcacagagaataccgaacggattgcgtagttttctcgccatgaacccgtgcaggtagattcagttgctcgcgcccgatggtttgtacgagccaatactcgtcccctatccgttgtactgccaccgttgcatacgctacaaaacgccgtgcgtcccatcagctgctgttgcgtatcctactctcgtttcgtcacggagtgggtaaaaggactaaattaacagcaaggtaatccaggattacgcgagttccataccgcatcagtgcccttttttacctagtaggcgccaactaggcgaaccggacaggacaaagccacgaaacggagcaccgaccacgctggccgatgtgggctgtgcagctaaccatgtcaccaggtcactagcccgttacgcccgcgtcgtgttccggcccaccttacgcctcccggtagatccacgagccccacacgggcggatccactgtcacacgggcccaacggttcgctggccccactggcagcctaacgatggtttctcggttttacatggggggaaagccggtggctcggcacccgaggtcagtggaattgatggcgcccaactgccacgtgagaccgtgaccccacatgtcatcctcccgtaggacggcctcggacccacaccgagcctcagggacgaactagccgtttgcgggtcggcactaaaaaaatcggagacccatcggttcaacgggagggacgcgcgagcgccgccaatgaggcgaggggagggtggccgcgtcgtgcttcagtagtagtgggggcagtgggcgagttcttgctgcgagttcgtcgcgagagaggaagcagcagagagaaagagagcaaaagcagcgagaggttgtggggagagagaggagcgaattgattagtgtcgccacatcgtctccaccaccaccacctccgtccttcctcgccaagccaccatcattgcgccaccgccgcaagatctgagctcgactcctcctctcctcgcccccgcacgggcgcacgacgctagcttcttaagtatttttcttcttaccgcgcagcgcgcggcggctggctggctagctagcttctcggcaaaggcttgttgcggttgcggttgcagtacaggggcgtgtgtgcgcgcgagcggcggtggtacggtgcccgcacccacccaccaccacccccgccattaaaggcgctcacgcaccgcctccagcttcttcgtccacgagaaagcgaggtgatcagagagagagagagagagagagtgagtgaagcggagctcacttcctcccctcacgggagcagccaacgcccagcgccgccaccacccacgccgttcgcgcgctttaaagaaggcgcgccaccttcgcataagcttaaaagattccccacaccacctcctctcacctcgcgccacgagcgttgatcggtgcttttcattgttcttccttgctgcagaagagacagagagagggagaggcagaggacgaggatgatggcggtgctcgcgcggctgggcgtcattgtggtgttgtgggcggtggtggcggaggggattcttgaccccgtcgacttcctggcgctgcaggcggtgcggcggtcgctcgacgatatgcctggctcgtcgttcttcgaagcgtgggacttcacggccgacccgtgcgggttccccggggtgttctgcgacggcaacaaggtgtcggcgctggcgctcggcgacccgagggcggggtcgccggggctgtccgggcggctcgaccaggcgctggggcggctgtccgcgctcaccgagctgtcgctcgtgcccgggcgcgtcgaaggcgagctcccggagtcgctcagctcgtgccggaacctccgattcttggccgtcagcaagaacctcatctccggccagataccggacggcctcggcgggctgtccaacctccggacgctcgacgtcagcttcaaccagatctccggcaccatcccggcgtcgatcgccacgctgccgtcgatcaccaacctcatcctctgccacaaccatctcaccggcggcatcccgtcgttcccggactcgtcgccgctcatccggctcgacctcaagcacaacgacctctccggcggcgtgccgaacctgccgagcacgctccagtacctctcgctctcggcgaaccggctcaccggcaccgtcgactccgtgctcccccggctcactcggctcaactacctcgacctcagcatgaaccagctcgacggcccaatcccggcgtccgtcttcacattgccgctgtccgtgctccagctgcagcgcaacttcttctccggcctcctccagccggcgaacgacgtgacgatccaggtggtggacctgagctacaaccgcttctggggccccgtgtcgccgctcctcgccggcgtggggcagctgtacctgaataacaaccggttcaccggcgaggtgccggcgcggctggtgcaggagctggtcggctccggcgggctccaggtgctgtacctgcagcacaacttcctcaccggcatcgagatttcgccggcgtcgtcgctcccctccagcgtctcgctctgcctcatgtacaactgcatggtgccgccggtgtacgcgccgtgcccgctcaaggccggctcgacgaacacccggccggccgaccagtgcccggagtggaggggctaatcaaagctggcaacacaacgccgacgccattgccggatcgcctcggatcgtccaagctcaagaaaaccggaaaagaatggaggagattgcaaatggcggtctccgattctttgattaatttgtccagttactagcgttccaatgtggattactattctttttggttggggggagatggatggagatagtcacagacaagaagtaagttccttaataatcttgggtttataggcgtaatttctttctcctttttttgtgtttaggtggtgtatgttcttttgtgtcccctgctgtatagttgcgtgagtagtaaaacattggctcttgatgttatgtgaggtggcgacgatcgattgatgtatctgatgatgatcatgatgatggtggtgttagaaatctgtgatgttatttatatatcgcattgccattgggcaagcatagtatcacaagcattcgctgtgcttcattttagttacagttactcgtcacagttcattcttgtcagagaaacaatggctatattatggatgagcatatttttatgattatttcaggggaaaaaaaagcataacggtagatgatgaataacacgcttgtagaatgattgctcagggcgcaatcacaaaaacagaagcaaagccaagaattagcaatgcagctccccacactgaacaatcattacgtaaagcagagaactaactaatcaatctatctgctggccttctgaagtctgaacaatcatcctatctgcatttgcaagactggcaggaccagagtacttgcatacaaccgatcattaggccatgttgttccttcttgattggagttcttttttttttaacaactactctacgtgatatgatttccatgcagctgatccttcgtatgtccttcacattctctcattcgtcctcctcctcccctgttcatctccctgtcctaaccctggcttaaaaccctctcgcgtgtacagtactcgtcttgcacagtgaaacataactctcgtctcgccttaatttcgctgtcagtacgcgatacgagcgatccttgtgcgtgcgtccttgcgtactcggtttgtggcgagttggtagctctggtttttaatggagctgcaactgcacgcaacagttggaaaaatcgcgcgagatcagcaaattcgcgacgcagagggggaggacgtcgcacggcgaggcggaagccgtcctctgctcggcttccggtggtttcgagttggagacaagcgggttgttcactttgttgcaaaaatcatattttgatgttatcgaatttcgataacgttgaatgtatctagtttacgattttatcaaagtttgatagtgttttcgtgagtttttttttgtcggaattgtaagatcatgttttgccacgtataccggccgggctgtcggtgtaactcgtacgcgatacgtatcccctcgaggccttgaaggcttggatggtacacgtactggtacgtacgagaaataaaagggctcatcgtgacacgggcgcgatggtaaagtctctctctcttcattagccgtggtgcggcgagcgtgactgcgcgatggccatttaattctctgtttcactttctttttttcctctcttcttttcacatcgtcatgtttcatgttagtgatgctttctttaccttgccacccccacacgcatgtaacgaatgactactcggccggagtactcgctatagactgtaaagaggtgataacaactcaacatgatccaaagcactccttcttcccctacatcctgtgggggccccgtttcaccgccatgtgggccatggcacatgcaaagcggataattgtacatgtttggcagcggcatgtcagtttgtccccacatgacagtgacgcagcacggcgaaaggcggtgagtgtcgctgcaattagcttgggcaaaaatgtggtactactactacaaactgccatcgagatcattcatcacgccgccccgacgagcgagcgagcgaccttacctcggctttcctcttttctgcctgtgaagtgcgtggttgttccgaaagcgtgatgcccactggtctttccattcctggctcttttgagttttgactgtttgttcggtttctagctttgcaaattgcaatcccttctttcgcgccagtgactgagagacagaataataatacagacagctgcttactatatagatttttatagcctatctctcagctcacttatatagttgttaatttttcactataaatatatggtccacatgtctgtctcatagattttcttggttacagtgtctaaaccggctgtaaacttacagccggcttctcatctatctcctctcctttctcatccacctcagcattcagaccctgtttagatgggactaaaactttttagtccctatcatatcagatgtttggacactaattataaatattaagcgtagactattaataaaaaccattctataaccctgtactaattcgcgagacgaatctattgagcctaattaatccatgattagcctatgtgatgctatagtaaacatgcgctaattatgaattaattaggcttaaaaaatttatcacgcgaattagctctcatttatgtaattagttttataagtagcctatgtttaatgctctaaattcacccgatatgatagggactaaagtttagtcctgtatccaaacaccacgtcagtcttcttggagccctctattatactcgctgacggatgatagaattttagaattgagcggtatgtgcaaaagcaggttttgtcgtcggagaagaggacgtggctgtggctcatgtgaaaagaaaggcaatttggctggtagcttttgctttgtacggagtagtactactagacttctagagctgaactagcagtaatagtttctaaacctcagtagtctgttgatccgtcggccatggcctaccgatcgcatgggcaaggcccaagcccagcacccgctatccaggttctttctggcgcacccaccgatccaatcgagaggcctccgtataggaataagttcactttgggtccctctatttgtcgctcagtctgattttcgtcacttgatcgcaaaaccggatacgataggtccctcaacttacgaaaccgtttaaatagaatccatcagcagtatttaacctggttttggctgaggtggcccctacgtggctaatttgacttggccttcatctcacgtggcattgatgtggcgcttacatggcaaattgaacccaaaaataataaaacctatgggacccacatgtcaatttcacacacacaataataaaaaaatggtggggcccacatggaccccacatgtcatcatcactaccatctctctatcccctctctctccatcatctctccttcctcttatctctatccccctctctctcccctgacaatggtgagcggcggcgggcggcgcagaggggcggcaagcggcaggtggagcggaggggcggcgggtggagcacgacgacgaccactgcggcgtctccgaagataacgacaacgacaacgacgctctgcccagaactcgcgtccgtcctgtcctcgcccgtccgcgctgctcgtcatgagcttgcaggcaggggtgtccatggccgcatggagggtgcccgcgctgctgaagagccacgtcggcgacgagatctcctaccacggtggtgccgtgctccggggcgacattctcgtcaccgttgtgtggtacgggaagttcaagctggcgcagaaggccatcgtcgttaacttcctcctctccctcacggccacgccgccgcctccgaacgcgacgacgccctccgccgagaagtggtggagcaccatcgctgccgtggttcttgcgagtggttctcgcgcgcgccgaccaatgggagggagggagaggagtgggggtcggcagtcggcgggagttggcggtgcgcgtgaggaggtcactggcgagcacgggctccacgccgtcggccgcttcgcctgcgatgcccagcagaatagcgccgcccctcctcgcccggttgccgagcgccgcctccctcctcgcccaccgttgggcaccgcctccctcctcgtccggccgccgcgtgccgctccgcccaccgcctccctcctcgcctggctgccgcgagcggcccctcctctcgcccggccgccgccgccgcctccctcctcgccggccgccgcgtgccgctccgcccaccgcccccctctgcgttgccgctcgccgttctgtaagggagagatagggggatagagataagagggggctgacatgtgggaccacatgggccccaccttttcttattatttttgtgtagctgacatgtgggtcccacgttttattattattttcccgggatccaattgccacgtaagcaccacatcaataccatgtgggataaggacctagtcaaagggagccatgtcatccaaaaccgggcataatactgccgagggatatcttttgcacggttttgtaagttggggaacccgtcatacccggttttgcgaccgagggacgaaaatcggactgggcgacaaatagagggacccaatgtgaacttattccctccgtataaggcctcggagctgacaggccgaacagcccaacccaccattcttcgcgcgacctgtgagggaataagtccactttgactcccttaaaagtgactcgaatctaatccgtaaccctcaaccgcaaaaccggataagatgactccctgaattattgaaaccagcacaatttgactccctcagcggttttggagggcggttttgctgatgtggtaatgttgacctagtcttcgtcccacatggcgcttacgtggcattagacttaaaaaaatatatctatgggacccgcatgtcatcccctctctctcttcttctttctcctttctctctctttctctccccttttctcttcaccttctctctcgtgtagcaatcggcgggcaggggcggcgacagcggcaacggcggcggcggcaggcgggcgagcgctggagtgtgcggcatggaagctgccccctgtgacggtggggtgcgcggggaggcgtgtgacgaaggggaggaggccatggcggcgggctcgacgaagtgggacttgaggaggcgcgagcacccggtcacgcacaaagacgagcaccctgatggcggcgacaatgtagccgacatatatatggcaaaagtatttgcggttagttttggttctcatcggcgagcgtggttgccatcgttgggtgtcatgaacaacatgtcaccatcgatgatggctggacctagtgtttgctctgttgtgtcgtacgtctcaagtgaataatttctaggtttttgtccctcgccttcctctctatggcactgagtttgttgagctcccatgtgagcgagtgtctgagcgagcatcggtggcaggctggcagcagccacagccagcaggcgcacaacttgaggtcgacctcgccgtcgggggtcatgctgctcgacgccatcactgttagagtacgcagctcggcccatcaaccatgggctacccaggtcatattgggtctgctccaccacaggttcaactggagccacaactttaggtcctgggcctacacccaaaagactagtctgatgggtaaggaccgccctcaccttttaagtcgtgttcccccaccctcaattaccgatgtggggctaaacccaacaatctcccccgtcacatcaacccatgtgaccccgaagacttgtcctgggcctacacaacccaaaaggaccgccctcaccttttaagtcgtgttcccccaccctcaattaccgatgtggggctaaacccaacaatctcccccgtcacatcaacccatgtgaccccgaagacttgtccggggcctacacaacccaaaagactagtctgatgggtgaggaccgcccccaccttttaagtcgtgttcccccaccatcaattaccgatgtggagctaaacccaacaatctcccccgtcacatcaacccatgtgaccccgaagacttgttacctggcctcaggcccaacaatctcccccgtcacatcaacccatgtgaccccgaagacttgttacctggcctctccaccatatgacccatggaaattgttccaggtttcaaaccttgggctctgataccacttgttagagtacgcagcccggcccatcaactatgggccacccaggtcacattgggcctgctccaccacaggcccaaccggagccacaactttaggtcctgcgcctacacaacccaaaagactagtctgatgggtgaggaccgcccccaccttttaagtcgtgctcccccaccatcaattaccgatgtgggactaaacccaacaatcaccacccgactcgaccaactccatcgccgttgactcgtcttctggttcgccctccaccacctctccttgtcttccccgacgccttcctcggtccgttactctgtcatgtgcacgtcgggctcgtagctcgagctcgagtagttttgtcggtccccaactcaccgccgccttcctcccttcccacggacgggcagctgacatcgagctcgatggggttcaccggccgcgccgctgccgtcgggagctcaagtttgactcgtgagctggttgttgttgaggtggagcaagctgagcttccgcattgcgccgatctgggaaggtatctcgccagagagctgcacgtagccgccgccgcttcagctcccgccggccgccaccactctggcccccacccgccgccgctccagcccgtgctccccgcggccggccgaaggggagagaagagaaagagaaagaaagagagaagggacgaagagaggaggaagaagaaagagagagaggtcagtggggcccacattttttttatgtgtgtgaataacaaacgggtcccacgtatactttttaattcaaatgccacataagcgccacgtcaatcacacagattaggtcaacaccgccacgtcaacaccatgtcagtgaaaccaccctccaaaaccacccagagagtcaaattgcaccggttttaatagttcgggggtcgagatatccgattttacggtttagggtcatggattagattcgggtcacttttaagggagtcaaagtggacttattccacccgtgaggccgtgacgctactgcgcggcccgacagcggcgccgccccggattcttccatgcttccggcgggaccgcgtcgcgcgcacgctggaacggacggtgccagccggtcccgtttccgttttttcctttttttttctttttctcttttacggtgttgggaaggttccagaacgggtggacgcttctggaaacagactcggccgcggatctctcccctgcataaatcccgggcacccgagcgctccgcccgtctcggcctcacgacacaaaagtttgtcaacagcagccgcccgctgcttctagatacttcttcctccatttctttcctccttgccaccgtctcgtcccccacgctcttgcgacctcttataatttcaccgctatgactcatatccttcgccacaacaaaatgtttttttttctcactatttttctattttaaggagttattatgttccttctttggtctgtagtagagtttaaggaatttatttttcaattgttttctgtttttttaccgcgcgtgttcgtgtgatgtttttttggatctgtggattgcgctgctcgtactgtgttgtccttgacctgaggagggtgcgcacgcggcgaccagagggagcgggacaggcagagggcgcaggcgcggaagccggttgtgaaggggcgcgacgacgggctcacgccggagcagcgccgcgagagggacgccaaggcgctgcaggagaaggcggccaggaaggcggcgcaggccaccgggcagggcggcaacggcggcgccggcgccaagggaaagagcggcgggaagaagtaggcatcggcatatgccggcatttgatctgttctcacctcacgtctggttgcgtgtgacaacaccgttctttcgatcgtcatctgctcctgatcctgcccatgttggcagatctgtactgctatttcttggatctttggaaattgcattacaaatttatgtagattgtgaaagcaaatttactccgctcctgcacggatcaaattaactcccagctcatgctccataaatcagtgacatatacagattgacatgtatacggaccacatgtaaagctccaccaagggaaacgctgtacagacaaccaaagaaaactctgtgtattcccggacgagcgcatgactctgactacgagtatccattttttacgacgcgccatcttcttcacaatatatctaatatctagccaaactgtgtaatctgtttaaacccatttgtttcgtgccattatctgcatatatgctaatggaagatcgcaagcaccgaatcaatcgagatcagtagtctcttcttgctgacaggaagacctggaccacttggcaacccggccgtcccaggatgagctgacaagcatagggtcgaagggatgccaactgcagtctcgaattgccagctgatgatatcctttgagttttgcaacttgtgatccgctcacctgaacatggaacaagatagtgcaatatgagcctttcgaaatactaattgaagtaacaagatgaaagaaattgtctgaagaatccttatgttactgaagtaacaatatggacaaagaaattgtcaaaagaatacttatggtgaagggaggacaacggtacactttttgtcgcctattctgtggtagaataggttttcagtgtacggaatgaatttaatttttttgcactgtcacagatccaactactctttaaaagatggcatgtaatttggagcatcatcagttgtccatattctctaataaatcaaaacagtttatttgcgaataaatattaatttatcgataaaaattttatatatttgttcgtagcgacttaaaagttagtgtaaaaaattacgttgaaaatatcttaaaatcaatttcaaattcaagttagaaaatttaaattttggcttttgttttgacttatgaggccaaccaatgaggctcccaatatctttcccatcttcccctactctaacgctgctgcatgccagccatcagggactttgcctaccaaaggctgttgtaacagctgtttaaaaacccttcttttcccttaataaacttcggccggtttcaaccggcctggcgaaaaaacctaggctgtttgagcaaaacgcattgcaaagcaaaacaattgggctggcattttgtaacatcatggatttgtaacccataccatttcctttttgcataacatgattaatctaattacatgcaattctcttgcgtgtttgagaaaaaaaggaataatctaattcggtattggaggttatccaaagatcatatacaactctcaagctagcataagtgcacaacaactgcctgctggtactagactaattacattgctaaaagaacgaataggccaattggtcatggtattacatttgtccactagaggaacgagtcagcgtataggtggtcagtcatatgaaccgatgctgtatacaatctatgacataaatacaaggtttgtttcctatagcccgaacacccaaaatagttatattatttttcgctttgattgaaggcactagccagaacagatatcatgcagtgagatatgcaagtcaaggataccagtaccaccatgtgaactattacaagcctggaattggccaaactggctgagatcttacatatttggatgcagtcttcaggttctgggaaaggcaagagtcattttggctttggcgaaaaaaaaaacaccttgttggagtgatgtttttagggggagaaatatatgtggcacaaatgcacaatgcagaatctggttgatagttttatttacatattcagacaatggtgtttgcctattgccatttcagatttccccaatttgcatgtagaaaaaatcacacacatatacaagtacgcaactacacaagcattaaaaaaatagaatcagacttccttgaagaagatcgaaaaaaaatcaacaggaaaattcatccaagaaaggtgcttgagtatagcaagcgcagtgcaatctgtagattgctgtcatgaaagttgaaaagagacataccacatcgtagatacaaacactagaatcataggatcctgtatatatgtacttctgtcctgtgctgtagaaacaaaaaaaaacataaagggacattagcacttactactttacatagtttgactaatacaaaatccttcatatgacatatcagaaccgagaatcatgaagttacctatatgcaggagaaaaatagcaacggatcaatgtacgaagaactgaatggccccagtatgtagctattgactgatcatggggatgctttagttgcttatactgttgtggatatcttgaatatctatagtcccaatttgaggttctgtcttcataactgcatgaaacaataagattggtaaaattcctgtcttcataactaaaattttacgttttatgttgatagctcaacacctacctatcagcattggatgtcattttcctgatgtcccacattttgatagcttggtcttttccatttgatatgaaacaccgaccatctccacggctatcaatatga

SEQ ID NO: 2754 - DNA, 633 bp, Oryza sativa
ccaacggtgaggatgtagacatccaacaacggcggcataacaggccagccgtgtaggcggaggcaccactcggcggcgacggaggcaggccggcggtgaagtcgtagacgcccaacagcggcggcataataggccagccgtgtaggcggaggcaccactcggcggcgacggaggcaggccggcggtgaagtcgtagacgcccaacagcggcggcataataggccagccgtgtaggcggaggcaccactcggcggcgacggaggcaggccggcggtgaagtcgtagacgcccaacagcggcagcataataggccagccgtgtagacggaggcaccactcggcggcgacggaggcaggccggcggtgaagtcgtagacgcccaacagcggcggcataataggccagccgtgtaggcggaggcaccactcggcggcgacggaggcaggccggcggtgaagtcgtagacgcccaacagcggcggcataataggccagccgtgtaggcggaggcaccactcggcggcgacggaggcaggccggcggtgaagtcgtagacgcccaacagcggcggcataataggccagccgtgtagacggaggcaccactcggcggcgacggaggcaagccggcggtga

SEQ ID NO: 2755 - DNA, 9342 bp, Oryza sativa
aaaaactgctcaatattcaatcttttgatatatcaaattttgtttggttttaccacacaggttacttttccaatcataagtatttacagtgcttaggataagattatgtcaaacttttgaaattttgatcattaataatttctcaaatgcttagttaaaaaaatgcatatgcatttttgtcttgaaaggtatacaatcttggaggagtttactttgttatcaaaattaatcctaccaagttttggcaaggtaattagtaatctaaacatggtcaaaatttatctccactaccaaagtttattaatctagaatgtttagcaaaggtaacaaactaaacacaacttacacttctcaactaaccaaacattggtgatgccaaaatttgacacaaccaaaatttaataagattgatttaggcatcaaagtgaatagctccttaatatcataaacttattagatcctgtaaacttattaatataaaattaatattcaaagttttaaaagtttgtccgaatattatctaaaacataaaatatttatgacgaggtacattaccactattttatttacctatgaacagtaactaccaaagaactgcacacagtgatactcccaatgaagtcaaaaaagactcatgatagaaaattccagcagcatattttccatctaaaaaacagctgttgtgttcccaatccaaacaacgtatacaactatacatacagttgtagcaaaaaaataaaataaaatagtgcgagttgattcagcttcaagactcatccgggcatgcatgtgcctgtagcacaataattgcagtagttttgtttcatttcgagtactcaccaatccatcagtgtgatttcaaataggaaaataccagtgcgtacaaatttgtataccttccaggagttgtatccaagacaagtagacaagatacttcttttctcatcatcttgatgctattctgccaagctaactagccaatcatttctcagataagaagttatgaaatcagatcagaagcagcagaggttagacccggttaggccgttgtgagggccggccggacaggaggttgccgctgccggccggcaatcagagcgagaatattggattaggccggctgcagccatgtgaaatgagcagagccggattaattagtagtagattagttagtttaagcgaaaattctaagctctgttgcttagggatgagctgaaatttagtgcgatatgatgatgatgatgatgatgtgcttcgatagatgcttagatggaaaagaaaaacacacagtggcccaggtcatgtgattatatttatcccccgtgctattatatataggctttttctctgagcaaatgctggtgattagatccttaatttgtactttggggaaatgtcaaagcgagactttttgatgagctgagcgcgagctagcgtaatttccacacgttttatgttcactttggacaggaggagcaaatggagagatgagtcactgaaaagcctaactggttgcatcaaggacaagtcaggttcatagattcaggacaagcctaatgtgtgccagttaagatgagatgttttctcggtgctggcccatgtttagaataccaccactgggactaggaaaatcttggtttgctatagctgcaaacctacggtcaattcaactactaactcgtactactagtttttagcctctttcagagttggcaaagttttgtttaggactgcatcctcagcatttggttaatcatttaatcttagtaaagagtattttgaaatttctagtagtaggttgagtaggagtacttgagtatgtcctaatcgtcattaggcgaccaactgaagctgaaagtgggtatgtgtctccccaagtcacggtaataaggtaattaaaccaccatgtaggaatttcattcagataatggcttcttaccacaacagaaagcagagcgtgttgagagggatgcccggccaaacaggggtttttatctgggcgcaacatgccactgaaccagccactaaattgatttaagccacatataaaaagttttagtaataaatttctttgaacgttatattgtaatcgccacttaaattgatacatatgggctgtatttagattcaaagtttggatccaaacttcagtcctttttcatcatatcaacctgtcatacacacacaacttttcagtcacatcatctccaatttcaatcaaaatttaaattttacgctgaactaaacacatggttgattcgagaattgttcccctggatatttatttcacggtctatgcgtagctcatcacattcccggcagccaaatcatgaacccaaaacggatagagattacccctcccgatccatgctcatcatcacccgtaccatatgcccacctcctgacagaggcgccaatcaacttgacaacacttatctgttccccttacctcacctgtttagttagtgagcatgatgcagagcagcagacacattgtggatattgtgggtaccccatacccatacggcatggttatccgactagtcataggggataacttatatctatggaatatgtaatagatcatgactcgggtattacgtttccttgtatattacggaacggcctaaagtcctggtttgataatattgtaaagtagatttaggaaaccgataccgtattggttaaggtttctatcttgtaatcctgccccccatcctatataaggtgggcaggaggccctctagggggcagatgagacaacctgatcgtcagatcaatacacactcggcggattcaaatccccaaacaggagtagggtattacctctcattgagagggcctgaacctgtctaaatcctttgtctccgcatccatccacttttaggtctcgtgcgctaccccgttttattattgccgaaatcatgtttcgacagttggcgcgccaggtaggggttgcgtcgagtttcctatcaacgagcgcgatggaatcaatttcatgagtcgccgacttcgttttcgctttgggagttttcacttcctttccgtcgaccacttcttcaagctcctcttctctgacttgatccaaatcagtcagggggaaactcaatctgatttttatcattatttatcatattgatttttaatctcagattaacctcttgctattttttgttgttgttcgcatataattacgcggcactattgaggcgattgatgctggtcatggactcgaggcgtctcagctttccggtcgatcggccgcgagtccactctgccggcttgtcttcgccaccgccattgctgataacaacaacgacttcaccgccggccgcctcgtctgccgccgactggtgtctccgcctgcacggctggcctattatgctgtcgttgttgggcgtctacatcttcatcaccggcctgccttcgtcgccgccgattggtgtcctcgcctatacggttggttggtcacaccaccgttcatgggcgtccacgtcttcaccgccggcctgcctccgtcgccgccgactggtgtcctcgcctatacggttggttggtcacaccaccgttcatgggcgtccacgtcttcaccgaccggcatgcctccgtcgccgccgattggtgcctccgcctacacggctggcctattatgccgccgctgttgggcgtctacgacttcaccgaccggcttgcctccgtcgccgccgattggtgcctccgcctacacggctggcctattatgccgccgctgttgggcgtctacgacttcaccgccggcctgcctccgtcgccgccgagtggtgcctccgcctacacggctggcctattatgctgccgctgttgggcgtctacgacttcaccgccggcctgcctccgtcgccgccgagtggtgcctccgcctacacggctggcctattatgccgccgctgttgggcgtctacgacttcaccgccggcctgcctccgtcgccgccgagtggtgcctccgcctacacggctggcctattatgccgccgctgttgggcgtctacgacttcaccgccggcctgcctccgtcgccgccgagtggtgcctccgcctacacggctggcctgttatgccgccgttgttggatgtctacatcctcaccgttggctcaccttcgttgccgtcgactggtgtttccgcttacacggctgacctattatgccgccattagtgggcatcttcgctttcaccgtcgaccgccttcgtcgccgccgactggtgtcttcattgttattgatggacgactttgttcccacattggccacttctgccatcaccaaggggaatattacaaagctaagtcatcatttattttattctttatatgatatttttccttttcctctgcctcactacaccaattggtcttccattgagtagtgagtcgggggctacagatgttatatcatattttttataatatttatcttgattgcttgcgacataatctgagtacaaaagtacctatcgagttatggagttctatcttcctatgctttccgtttggtttgccaatggatggttgcctttgggccgattcctagcacccgggggctcgttggatggaccgaataacgcaaggtgctaagtattattcagaataaatcaaaagcatagagataagataatttattttctgctcttaataattgcaaaagtacccgagtagtaaactccgatccgtgaaactttgttccattaatgacgaactcatgacactcatatgcatgtttgggaagtgcttaggccgactcccagtgcttggtggctatgactagtcgggcagagtgtttaaacgtaatgagtcatctgctcggggaaatcaaaattgacaagaggagaaatacatatttataaatattttaaaatacttgattttttctcgagtattatatttatatcagatactactcatcctatatgattgttctgcaggatccagatccagatatgcataaaagggattcatggctttaagcttatctcttacgctccaggaatggatcagtcagaacatcaccaccggcttgccttcgccgccgccgactggtgtttccgcctgcacggctggcctattatgccgccgttgttgggcgtctacgtcttcaccgaccggccgcctccgccgccgccgactgatgtcctcgcctgcacggctggcctttatgccgccgttgttgggcgtctacgtcttcaccgaccggcttgccttcgccgccgccgactggtgtttccgcctgcacggctggcctttatgccgccgttgttgggcgtctacgtcttcaccgaccggcttgccttcgccgctgccgactggtgtttccgcctgcacggctggcctttatgccgccgttgttgggcgtctacgtcttcaccgaccggccgcctcgtccgccgccgaccgatgtcctcgcctgcacggctggcctttatgccgccgttgttgggcatctacgtcttcaccgaccggccgcctcgtccgccgccgaccgatgtcctcgcctgcacggctggcctttatgccgccgttgttggacgtctacgtcttcaccgaccggcttgccttcgccgccgccgactggtgtttccgcctgcacggctggcctttatgccgccgttgttgggcgtctacgtcttcaccgaccggcttgccttcgccgccgccgactggtgtcaccgcctgcacggctggcctgttataacgccaactgatgctaccttcttcacggctggctacatcgctgtcactactaataggcatcagtatcgtcaacacaagctgcctacgtttgccatggctgccgactggtttcttcacttccatggctgcatgattctgccagtgttgattggccttatcttcttcaccgccggtcgtctcgtctgctgctgactagtgccctcacctctacgtctggtttatacagctaccactactgatggacatcatcgtcttccgttgccgactggttatgccgccgccgactagtgcttttatcttcacaactgcgcgtcttcgctaccagtttgcttttgttgccgccgactcgtgttcacttcctcacggcgatgcaactttgtcatcatggtggagcgacttcatctttattatcttcggcaccggcaaactctattgctgctacttcacaagttttactacttcaccaaccacgacgtctttgtgaacctcgacatctcggcatgcaatgccatgatattttactacaacaagtgactctccaatattcaggatttctacttggacaccttcaacacatatcttcaatcaagcaatgactactcgacgacaaggagctataattctcgactctatgttcagttgtttcccaactaaccaaagagtcgggggctacacaaatataaggctcaaaatttgacaaattaatcagccaatgagtcaactccaggagtcattatcttcatctttgcttcggaacagacattctacttcaacaacttcaaatatttcggtttagacgagttgggcaacaacatcaactctcctccaattatttgtcttcacggttggcctactacgcaactgccgatagaggatctcatcgttatcatcggctgctacatcgctattgactggatcaccgacatcgtcatcttcatcaacatcttgtcaagcctcatcaacatagcctactctgctgccgttgatgggaaacttcgtcatcatagtcggctatctctgttgccgctaatcatcattaccgtcggatgcgtttgtcgccgccgattattttcttcatcttcatgattggtggatttcgccatcactgttgatgcgcgtctacatcttcatcgtcggtttgctcttgtcaccaccgactgttctttcgttgttgttgggcgcctacatcttcactgctagctgacctgactgttgccgactggtttcttcgcctccatggttatgcaacttcattacatttgattggtggcatctttactactactgacatcttccgttacttctgatgagcaatttcgtcttcatgttggtcatttcatctccatgccgactgcgtcagctattgccaatagacaattttgactatgacagaaggacaagctatatgctcaggggctcatcaactcaagcgtgaggattatatctccaatttggacttgttccggatacattccacgtggattcatagtcatgagtctattttctatgctcaaagactggaccaattattattccccgtaagggctatcaaccgaatacttgcgccagtcgggattcaattattatatttatttttggagtatcccataagggataatcattcagatcagaagctattcatatgagctacacttggtctatattacccggaagatttattactcaggagcatgttacatgcgtcatcctttaaagggtgtcgaaggcatattttttggcctaggcctaatatgtctgcagcccatattttcaggtgtggcctgtcacgttcttttagggacttaggcactttttgcttaggccaaagtgcgcgtgatcaagtgcccaataccttaaaatccttttataccgcagttactcaactttttaggagttggtacaatgcatcttaaaaggtgtcaaacagtaaagctttatatagctgccccgctgactttttaatatagtcatggtgctgtttgggtttttaagcaattgattggatacaatatcattgctttttgccacgtaagtgtgcgtttttattgaccaatattatggcttaggctgattatatattgtggtcattttctaggcggttggtaaatcctttatgagtttatttactcggattttacaccacatatgccatatatttccaggtgtggtgaaaccatgtgtcttctagggacttaagtacatctgttaaagcagtgtgcgcatggcgtatgcccaatactttggaaatttctttattcataatatacaagcttctttatagctattttgctatatcactcatcatattttacaaagcggttggtatatcactcggatcatgttatttggaggattcacaccgcatatgctatatattgatatcaagtcacttggttgattacgattatcaaaaccactcggttggttggattatttattccttgactatatgcttggtttgttcaattaaccacattgtcgggggctacacctattaggtgcatctagtcggtgcacctgactttattttccagccctccacagtcttcagatttggtaaaagtactcgggagaccatgacaaagatgattgaagcactcggctttggagtaatctggttcgagagaagattatcttttcgactgcgaaggtctcaggggctactgtggatattgtgggtaccccatacccatacggcatggttatccgactagtcataggggataacttatatctatggaatatgtaatagatcatgactcgggtattacgtttccttgtatattacggaacggcctaaagtcctggtttgataatattgtaaagtagatttaggaaaccgataccgtattggttaaggtttctatcttgtaatcctgccccccatcctatataaggtgggcaggaggccctctagggggcagatgagacaacctgatcgtcagatcaatacacactcggcggattcaaatccccaaacaggagtagggtattacctctcattgagagggcctgaacctgtctaaatcctttgtctccgcatccatccacttttaggtctcgtgcgctaccccgttttattattgccgaaatcatgtttcgacacacatacacacacatccattagcagcaaacagttaatcatcatcagtcagctgctgcgctcgtccaatgccgtgccccagcgtcgtccacgtacatctctactcttatcatttggtgtacctaataagagtaggaggaggagaaggaggaggagaagaaaggactcgcgagaagaaaacaaaagaaaaggcgaggaaaagagagaaaggaactctcacaaatggggcagggggcgcgcggtgcagatccatccaagcgagagtacgtataaaaacaaacaaaaaaacacaggagagagagagagagagagagagagaaagaagcttggagagagagagaaaggagtagtagtagtagaggggagagagagagagggagaaaaatattggagaggggaagtgggggaggagggaggggtgggggcccacctccacaagttttactttttcagccgcccggttttgtcgtctcctccgtcctctcctcctcttcctcctcgctattaccccc

SEQ ID NO: 2756 - DNA, 7773 bp, Oryza sativa
cccccccccccccctctccctgttggttgccttctccgtgccgaacaccacagcgcgcgcgcgggggggcgggttcggctctctcgcgagctccgctctctgtccctctctctctctcgccgcctcctgcctcgcacactcgagattggtggggtggatttgggggaggaggaggtggggtggggtggggtggttgctgaggaggaggtggtggtgagagatcgggcggcgggttgccgccggaggaggtagagggatcctcgggggagggcggttcttgggtcgggggacccccccatggcgtgaggagagggtgccctccgggagatcttgcggggcgggtgtgtggtgttgctagctgaggctgttgggtgggtacccccgagcggccggggaatctcctcccttctcgagcgaccgcccgcgtcgctccgccatggccggcagcgacgaggtcaaccgcaacgagtgcaaggtgcgtgtgctcttccttcttgaaccccttccgctctctctcccgcggtggcgtgtgtgtccgtgtctgtcgcctccggattaggccgcggccgaggcggtcgcggttggggttcttgatttgcgccgccgcgcgcgccccgctcgctttatggtttgcggggggaaggatcgattggggccggcctggcctgcgatttggcggtcaatcgctgccttttctttcccctttgggctcagccccaattttatcccccctcgtgcttgcctcggccgttttagggcgggtggtgaactgtggtggtggtaatactgcctgcctgctgccggccgcagcggcagctacccaacaaagccggaagaaacccccattcacaatcaccgcggccgcccgtgttggttgggagcgttcgcgcgcgccaaagcttgcatctttgtggcaagcgcctctcgcattgggtttttttttttttttgggggggggggttgtttcttttttgtccgagcaggaatcagcaaagaaaaacatacgcatatgcacaccgattgattgattgctctggtttcgcttccgcgattgcgagatagtagtagtagtagagggtcgctcactgtggttgtggttgtggttggttgtggtgcagacggtggtgccgctccacacatgggtgctcatctccaacttcaagctgtcgtacaacattctgcggcgggcggacgggacgttcgagcgggacctcggggagtacctggacaggagggtgccggcgaacgcgcggccgctggagggggtgtcgtcgttcgaccacatcatcgaccagtcggtggggctggaggtgcgcatctaccgggcggcggcggagggtgacgcggaggagggggcggcggcggtgacgcggcccatccttgagttcctgacggacgcgccagcggcggagccgttcccggtgatcatattcttccacggcggcagcttcgtgcactcgtcggccagctcgaccatctacgacagtctgtgccgccggttcgtgaagctgagcaagggcgtcgtggtgtccgtcaactaccggcgcgcgccggagcaccgctacccgtgcgcgtacgacgacgggtggaccgcgctcaagtgggtcatgtcgcagccgttcatgcgcagcggcggcgacgcgcaggcccgcgtgttcctctccggcgacagctccggcggcaacatcgcccaccacgtcgccgtccgcgccgccgacgagggcgtcaaggtctgcggcaacatcctgctcaacgccatgttcggcggcaccgagcgcacggagtcggagcggcggctcgacggcaagtacttcgtgacgctccaggacagggactggtactggaaggcgtacctgccggaggacgccgaccgggaccatccggcgtgcaacccgttcggcccgaacggccggcggctcgggggcctccccttcgccaagagcctcatcatcgtgtcgggcctggacctcacctgcgaccggcagctcgcctacgccgacgccctccgggaggacggccaccacgtcaaggttgtccaatgcgagaacgccacggtggggttctacctgttgcccaacaccgtccactaccacgaggtcatggaggagatctccgacttcctcaacgctaacctctactactagtacatatacagcccctctccctctcccccctcgctgatcgtcgtctccaacacaaatactccttatagggaagatggtaattcagcttgactttgttatagtacctactactactactactactacctcctatactactgctgctgcttgggatcgcaatgccgtcgtctgctcttgtgtggcgaaggagaagctagctccatgctgtctgatcagctctaatcaaatggtgactcggttgcgtcgaggaagaagaagaaagtcgtccgtcgtcgtcgtccttgttccactaatcatcgttcatccttttctttttttgtggtttggatcgttctttgatccatgttttccatgttttgcctggggtcagtgtagtcaagacaagttgagggtagttccatgtctgtcatgcatgcctccattagtactactactgttgtgactttggttgatggagagaagaagcatgtttttttttcttttaatctcgcattccatccatcttctccatgtactccaaagagaggaaagttgctatctaacgttatgtgtacagtgatcgatcaacaaggagatttgaggaggcatgccccttttgttgctgttgatgttctagttttatcttctttcttgttaacaggattggatggtgctctcttgctcactctcaatccatgcttgctcactctcttgctcactcgtactagtcctttttagggtataaagcatttgcacgctgggtcgtcgtcgtcgtctcccttctgatcttttttctttattccctccgtttcaaaatgcttgaagacgttgactttttaagcatatgtttaaccgtttgtcttattaaaaaaatttaagtaattattaattctttttctatcatttgattcattgttaaatatatttttatgtagacataattttacatattttataaaagtttttgaataagacgaatgatcaaacgtgtgctaaaaaatcaacggtgttaaatatttcgaaattgagggagggagtatattgtggttgtaatgcgtgaactatgaatgccctctgcttcactccacatgggtgtcggtgagtgtaaacaagaagaggagaggagaggagaggatgggggctcatgcatatgtgagatttgtagtagcgctttgaggtgataactgtttgtcctttctctccccaatgccatgtgtcattctttctgtatgcgaaaattggatggacagccaattctgtgacgggcgtacttggatcctgccagtattacggcggtgtctgtcggtggtaaaaaaaaaaggcgctaggaaaaagcgctacgcaaaggaaggggtggcagcaagtccacagctaaatgcgaaaaccactaccccgtggaagtgacgtcgtctcgtctgtgttattttcgtccctggtacggccatgtgttggctgccagcctctgataaccgtgccaaacgttagtcgtgtcacagtcgtgttattagctgcaaccatgataagcttcacatcatttaacgtacttattgtccggtaaaacgtgtgctagtagtgcacgtagcaccatgtttaggaagggaatgtaatggagtttgtgggggttttgcctcttctcttcgatcctggttgtcctgagcgcatcggacgctggctgcctcgcggtcgcgggctggtatggatgtgacattattccgctccgtgcatgcatgtcaccgttgcgccgggccacgctttggctagtcgtaccactagcatgtactccatcatccttatgattcaagttataagttgttttttttggtctcgcaacaagacgtcgcaccagagctagcgcaggcgagatccgttgaatcacagcgtggcacgagcggctagctacatggtcgccgtcgtagttccaccactagcccgttgtttgattgatgccttgatgggtggctcctccgctccccgcgcgcttagcttagccatcacaacggtcgagcgcacctctctccagagccggggtagtaggttagttcatgtgaacgtccaaaaaagaacaactcggattgtgtaggggctcaacggtgagatactcctactttgtgtccaaaaacagctcggatcgtgaattcatgtacgttacatcaaaccggagcttactgtttttagtctctctcccatctccattttcatttagattgtgctcaaagcaggtacttactactagagagtagagaccaaccaatatttatttgaagccatccaagaagagtccatatgaatatggtcccgttcttctaataagagttggatggaagattttttaataagagttggatggaagattaagattttcgtggcacgctttttaaacttctaaacggtacattttatgtgaaaactttctgtatgaaagttgttctaaaatatcatattctattttttaagtttgtaatgattaaagcttaattaattatatgttaatataatctcgttttacgtaaaaaaatttcatcttttgtcttaagaaggaaagaacaccgcctatgttgatcgtcgcacggttgtaaagcggggaagaaagctactagcatggcaggtatcatcaaaaggccgagactttctcgtgcacttaaagtcacggagtagtgcagctagcggccgttgaaaatattgacgctttggaaaggtggcagaagtctcccgataaaggacaaacgacgcctgcctgcagctaccctcgctttcgactattattacgtgcactgtcccggctgcgctcgagctgaggctgaggctgaggctgagctgagctagcgtggtggcatcacgcggaccagacagatgccatatgccactccatttaattatgcgtgtaaaccctagtagtaacatttctatttctatggcatttttttcttggtgtttctcctcctctcgccgactagccgagcctatttggagcgtctgtcaactacattgacagtttcttttaaaatcttcagccgctaaaaactcttctatacaattcagattttaggcttttaaaatttaatttagaatataacaacttttctatatgttcccttatctaaaaatcacaatcatttttatttaacttcttcgtctatttatcttagctaattacagtaattttctatttaagcttacaataattttaacttaacaattttgtcgaagtttttatatttccggacaaaaatacgaggaaactggaactcttgttttctttctctctacatttttagccttgtttagattccaaaaacttttgacaaaaaaagtcaaatcaaatatttagacacatgtatggagcattaaatatggacggaaaaaaatttgcacagtttgcatgtaaattgtgagacgaatcttttgagcctaattacgccatgatttgacaatgtgatgctacagtaaacatttgctaatggcggtgcgggcagctagctagggtccgccctagagccgtccgcgtgagagcgacacgaggacttggcagtgtatacaatcgttatcgattctcactgtacctatatcaaggcattatacactatatatagtacacgtcctttttgttttttgacattgttggctggagcatgtgcaaaaatgtaagctaaatgatgattaccccagcgcgtgtgtactagtaaatccaacgtcttaacgacgttgccgcgggagtaggttgacacgacggccgggcgcgtggtgtgtgtgcttcgtgtcgtcacggcaactcgatcgatcgtccgcaccaaacgacccacacccgcacccaaaatcgagccgtaatcacggcgccgcgtgtgggcaaaaacaaacctcaccgccggccggaatgattccgggctagtgcgcccaatcatccgcgtggccgacgatgacgcgacgcgcgcgacgacacatgggggcgtggcacgggacagaggcagcagctagcgcagcgcccgcgcgcaggtgaaacgcgcgcgcgccccacgtgaagcggccgccggttacacggctcgcgcggacgccacggcgatgcctcgcgcgtggtggaatggtggaaaccgcggctggcacgttggcttggctcccggccggcgcgggggtttggtatggttttgtgctgggtggccacctgccgctccagacacgtacacgtactactcgtacgtatggctcggcttgtctcggtgtgtactagtagtattgttgtctcatcctacgtcagatagctattctcttcgtccacttgatataaaagattttttttcttaaactagcaaagtattctctccttcctataatacaaagtgctgtgttgtgttttagagcgatttgacacatcgtaatattataaatttgaaaaacaatctacttatatttgtagatacgtcacatctctctaacctccaaaatcctttatgttctggacggagagagttgcagatataaagaaaatgatgtaaaaggtgataggagacgtaataaactagtaaaaaaatggatatatggggattaaacccgtataaaagtgagtaggtaaaaaaaataatctatggctgtgtttagatccaggggtaaatatttttaccatatcacatcggatatacgaacacacatttgaagtattaaatatggtctaataacaaaacaaattacataatccgcctgtaaactgcgagacgaatttattaagcctaattaatatatcattagcaaatatttactgtagcatcacattgtcaaatcatggagcaattaggcttaaaagattcgtctcgcaaattagtcgcaatctatgtaattaattattttttagccaatatttaatacttcatgcagatattcaaacattcgatgtgactggctgaaaaattttagggtacgatctaaataaggcccctataaaagttggtatacgaggaataaagaaatgtctcgagatatcgcagaaaatcttttattttaaaacaaatttaaacaccaataatctccaatgtccaatttttcatcacagaataataatcaaaaacacctttgattttacaatctccctcttaatgaacacattggcaaaccttattaaaaatatttttgtgtttggaaaaataaaaacaaaagtggtaaaaagcacactgcgtacaaatgtacacatcgtgctaaaaaatccaaaagaaaacttctccccctttttaaaaagaaagaaattcccaattgaaccaaaaacatgctgttctcaataactctccaaaaattcaccttacttctccaaaaatccaaaaattttcacattacttctcccccttttgacaatgatttcatcaaacataggaattatgtttattaatgttcaagagcttagcatacatatagcatatcaagtcatgtgttgcaataaaaagaagataaacccatctataatataacaagcatgcattaaagtataaccatgaaccacagattttacaattaagcttgaatcaacaatcaaaattcatgatttcatacgatttataatgcaacatcttaacaagcacataggttgaaaaataaacactaaacacatatacctattgcatttatcactctttctcaaataacctttagcacaaaacaactaagagaattt

SEQ ID NO: 2757 - DNA, 1141 bp, Oryza sativa
tcaaataacctttagcacaaaacaactaagagaattttttttaaccttttctttttcttgagcctttttgctcatatttttctattttattctgggtacgtctttgtcgtcaagactgtttcaaggaattcggcacccattattttgctcacatcgaatacgtccttgtcgtcaagaatgtttccaaggattcggtattcattttttcatattttttattctcttttcacaatgagcaaataaagctatttgaggaataacaagtcaataaagcatatatatatagagcatttatagatcaaaccatatgctagcatcaacattgcatatttgcttaattcaagtatagaatttaagtgtcatacatcatctcccttaaaagcaaaatctaaatctcatgaaaagattagaatacatacaagctatgctagagacaaataaaccttcaaagtattgctagcatgtacaagaaaataccatatgtataaacaaagctctcttttctcaatttttctcattgtcatattattgctcaataaaaccatgaggtacaaactccccctcaaaccatgccaaaaggatgaattatacccaattcaccacgaagaaaagcaaagcgattagaatccaaaagtttagtgaaaatatcagcaatttgcaactttgtgtccaaaaactgcaattcaaaatctcccttctcaacatgatccctaaaaaagtgaaaacgaatatcaatgtgctttgtgcgtgagtgttgaacaggattcttagcaatattgatagcaccagtattatcacaaaagagaggtactttctcaaaagtaagaccataatctttcaaagtagataaaagccaaagaatctgtgaacaacaactagcagcagcaacatattcagattcagcagttgactgagcaacactagattattttcctagaagaccatgcaatcaatgatgtaccaagaaaatgacatgttccactactacttttcctatcaattctacaacctccaaaatcggcatcagaatatccacttaagcatatagaagatgaaatagaataccaaattccaaactgaaatgtatgattcaaatacctcattattcgcttgaccgcttgacgatgtgaagcaagaggag

SEQ ID NO: 2758 - DNA, 712 bp, Oryza sativa
ggtcggtgaagacgtagatgcccaacaacggcggcataaaggccagccgtgcaggcgaggacatcggtcggcggcggacgaggcggccggtcggtgaagacgtagacgcccaacaacggcggcataaaggccagccgtgcaggcggaaacaccagtcggcagcggcgaaggcaagccggtcggtgaagacgtagacgcccaacaacggcggcataaaggccagccgtgcaggcggaaacaccagtcggcggcggcgaaggcaagccggtcggtgaagacgtagacgcccaacaacggcggcataaaggccagccgtgcaggcgaggacatcggtcggcggcggacgaggcggccggtcggtgaagacgtagacgccaacaacggcggcataaaggccagccgtgcaggcggaaacaccagtcggcagcggcgaaggcaagccggtcggtgaagacatagacgcccaacaacggcggcataaaggccagccgtgcaggcggaaacaccagtcggcagcggcgaaggcaagccggtcggtgaagacgtagacgcccaacaacggcggcataaaggccagccgtgcaggcggaaacaccagtcggcggcggcggaggcaagccggtcggtgaagacgtagacgcccaacaacggcggcataataggccagccgtgcaggcggaaacaccagtcggcggcggcgaaggccagccgg

SEQ ID NO: 2759 - DNA, 774 bp, Oryza sativa
gtgaagtcgtagacgcccaacagcggcagcataataggccagccgtgtagacggaggcaccactcggcggcgacggaggcaggccggcggtgaagtcgtagacgcccaacagcggcggcataataggccagccgtgtaggcggaggcaccactcggcggcgacggaggcaggccggcggtgaagtcgtagacgcccaacagcggcggcataataggccagccgtgtaggcggaggcaccactcggcggcgacggaggcaggccggcggtgaagtcgtagacgcccaacagcggcggcataataggccagccgtgtagacggaggcaccactcggcggcgacggaggcaggccggcggtgaagtcgtagacgcccaacagcggcggcataataggccagccgtgtaggcggaggcaccactcggcggcgacggaggcaagccggcggtgaagtcgtagacgcccaacagcggcggcataataggccagccgtgtagacggaggcaccactcggcggcgacggaggcaggccggcggtgaagtcgtagacgcccaacagcggcggcataataggccagccgtgtaggcggaggcaccactcggcggcgacggaggcaggccggcggtgaagacgtagacgcccaacagcggcggcataataggccagccgtgtaggcggaggcaccactcggcggcgacggaggcaggccggcggtgaagtcgtagacgcccaacagcggcggcataataggccagccgtgtaggcggaggcacca

SEQ ID NO: 2760 - DNA, 645 bp, Oryza sativa
aacatgcatagatgtatagtggccttcaaaagaaaaaaaggagatgcagagctgtctgttttgtactttcctttgcctaattttatgacatatgaccatcctgtgtaatgagcaatcactaataccactaaggccatcttatactcacactccaatttaaagatccacagttgatttatacttcatacatcttcctttgggacattcttgatcgattagatttgttgcagtataaacatgtccactatacatttgtattattttcttataaattctttgttctttcattttctgcaggacatccacgatggactagatttttcacagcatgaagatgttcgatatacatttggaatattttctgttaaattctcttctgatggccgagagcttgttgctggcagtaacgatgattcaatatatgtttatgaccttgtggcaaacaaactaacgttgcgtttgcctgctcatcatgtatgataatttggttgttttcatggcttgtatctttatttaatcttcttaatctatttcttaagttggttatgggctctttccatatttgatctctaatgtgttcccccctacttttccagtctgatgtcaacacagtagcatttgctgacgaaactggccatctcatat

SEQ ID NO: 2761 - DNA, 24021 bp, Oryza sativa
ttcctgcagcccacacaaacgcgaactgcttctggaccagactcttccttagtatatccatcctatgataaaattaaatttgtcagaaaatggaatatgtcatgcacagcagattatgtccaaagcactatttcactaacatcatggaactatggaagtaactccaattaatgtattcctttagtatatatatatatatacatgtatccatatgacaacttaagttcacgtttactttaaaaaaaaaaaatctatgcaactccatgatataactggttatgtatgcataagaggaaggctaatgaagttaaatggaagcagtaataatataataaaaaataatggaattttcccataaagatcaatttggcaatgtcatacctcgcatcttcctttcttactttcctttgcaaggcagaagctatctgtaattccagtctgaacatgaccgctatgaactccacccttttgaagaccaaacttgggaatgacatgatcatcgaacaatgggtttgagccatcgtgtataccatatggtttatttgatgttattactgttatgttcatatatttaagctcggcgaaatcattttcagattggcaattattgtcattgcgcatgctggatagagctacaccagaagtaaaggaatcccacataaagtagctctgcattaggtcagcagaagagaaaaataataataaggtaaaagtgaacaggttcccatattgtaccaaacataagatctaaggatataagcatataacttactgtatagaattcatcattgaaccatgtgtctcgagccatttttaaagagtcaaaacaatattgtgcttcatatgtactttgttgttgttggaatgcataaaagaactcctcattgaccggaattgtattagttgcatcaagagggacaagggtgattgcaatgccagaatggaacacctgaaatgaataaattatattatactagctaaaggcctgtgttttgctacagataacaggaaaaatatcaccatatttctaaaatgaataaatcatattttccgtgaaatatgttatccacattttccctataggaaaatgtggctatccacataattttatatgtggctatacatttattaattttatatgttgctatccatccaaatttagttcttatgtaatattaagaagttcaaggggtaatatgtaaaaattgtaatgggagtaggtgggatggcagattcactgccaccaccattgagtctttttaaggagtatagataatctgctagataaagattaagaatgatgaagtaaaaaagagtttagatataagtaaatgtggcataaaattctttcttcaacaaaagaatcatagatggaagttttcattttagaaaccaagtcttctatagctgttatatgatactagtctaataaaagagttcaagtctcttagatacaaaagaagaacaaggttaacgagtatgtcagcatgtactaattgagtacatattaatttaaaaccaacagaggaacttaaggtacatattaattaagaaaagcagtacaggatgggatgaaatgtaagtttctgactttactccttatggagaagagatactgaagaccttaaatttaacgatagagatcagatcagtaaggcattgcaaaaatctacttccaaatttcaacaaaagaaaacggtggcacagcctaacatgtaaatctgggccatatacctgatatgcagcaaaaggatctgcaaacatgttgaattctgcattcggattggttctgtagctagtaaacaggttaccatggtcaccacactgctgtggcgtgcaagatgtggtagaattttttgggcagcaacctgtagggttctccgatctcactccaccacccataatgtatatgtgctccacattttttttcaggtgtggatgtgtcataagaaaaatggcgaagttcgtatgtgaccctattagcatgacggttgtagggcctgctgatattgtctctatcaacacttgctgtgctgtagactgatgaagtggtatgtatcttctgttaccctgttttacatattaaaagagtacattggagctggtaataaaaacgaaaatagccagattatccagtaatattcttgcagaaaagatcaaagcacacttcagcgattgattgatattgaaaatgccaaatggcatccccgaattccctagacccagttcactgatactgcaaatacaagtgttcagataacagcaatgatttttgagtgtcatactgtcatccataaattcttactagtcagcttgcctcaaactacaaaccaattagagaccaagtgaaagatgaccagtttctagagacatttatacaaatttgttgatatctgcccttctgcctgaaatgtttacaacatgactttgttggaagtcttaaagaataatagaaaaatccatccaaatagtcagtgtagctctttgaaatagacaaaaagaaacatagagcagtcctaggagcacattgtcaatatacagagttcttgctggtagttttgaagttccaacaactttgtgttagcaagacaactgctaagttaacaaggaaatgagaaggagagaccgtaggaccaaattttattgccgtgtttgacatttgctccgactaaaggattttagatctaaggatattagatactccactcaacttaaagtacctcaatttaaaatgatatgttggcacaaaattatgtagtggtgcagtggtgcgaaaactgaccaattttaggaacaacgacttaactactatgtgcactttctttgcgagagatgcagtgtgcacttatcctacctgaacaccaaaattgcggcattcgacaagaaggagcacaaaatgaagcatacctgtggaaggaagccttttcttatgccagagtttgtgtcgatgtccaaccgcccaccgccttcaagtggaatagcctgcctataccggcagggcccaaaggttgtcatgccctaaatttgaacgtttgtatattagtgatcctaaaaaagcagacataaatttgggcaattctactacatattttggtctagatcataacaaagtgatgaattctaaattgtacctgatcaatcagaggtaaataaccaccaacgttcgggtgtatggtgccatggcctgatataccaccatcaccaccaacaccaactgggatgtcatcacggcccatcatgtatagcatatcatagagatgattcacagcatgaccagcatcggtccacgcattcacgtcgatggtgaccgcctgctcatgtttacaagaagagtaatgtaccatcgatttcttgcaaagacccacaaagaacttgtctaatactaccatagataatgtcagaagaaaatttgcataatcagtcggtgtaaaatcactatttaactgagcggctacatcaatccttagcttgacacacaatcgctgtaaaatcatcatcgattccaaatttccgatcaatagctaccgattgctccttgggtggctaatgcgaacgcggaagaaacaagctgcttcgatttctcaccattccgcacattccccggtagcccgcggcagcgcggagaactcaggccagttgcctcgagtgtcccagccgctcgcgcagatccccctatacgggatcctcctccgaatccacggtgataggtggagtgcgccatcgccacctagtttgaattcgcctgccgccgccgccgtggtgtcgccgccacacttgctcccccggccggccgctgccctcggcatcgccacgcgaccacgtatcccgccggagtcgacgcgacgccgcgctccgtccacgggcgctcgtcggtggcattgtcgtgtggccgtggtggtggcggcgccggcgccccatcccaccggcgacctcatccgcttcacaaatttaatgggcgaacggcccaaaccttgaaagtatccggataggaaaaattattgatgggcctaaatttgttgctaccctagttgagcttgagaatttaacccgttagtgtaactgtcagttgcccgatcttcttcagttaaaaaaagaacaatgagttcagagctttgcaaaaaaaatataaaaaaaaattgggcagatttttttgaaacaaactcagtcgtccgtatatcttgaaacttgaaattgacgaaatcatcatggacatctaactgttaaagggtacgttgtctaccactgaaggaataattagccgcaaatgcgaatccctgtgtcaaatctaggacttaaatccaaatggattgatttaataaaaaaactaaccagttgagttatgcttacttagcaagtttggatagatttgttagagcaattttcaacgtgtacggtgtacccccttagaaatggccaaatgggtacctgaatattcttaacggattctggtcaatgcattgatcggtacaaatcgtggtgaagttttatcacgaatcttcttgtaaaagaataatctagcctgcgtgaacactcggtaaaggatccaatgtactgctacaagacttctacacgctcttttttttcccgattacacataaatgctcaacactaaagatgtaatgccacactcacacgtatgtaaattatacccctaacacatgctcaaagatagaaaaatcaacgacgccggtctcactaaatttatgcttaaagttcacttacacttaaataaattcatgtatattaagatttaaagcttagtggattaatacgattatattattcttagaaaagtaatgtgccaagcaatctctccgcgcgatatgtgtcgttttttatgcaaaaaaatatgtgacggtatagacgtatcataacaaatatcatattgatatatactagctatggaagtaatctattatttgagataaaaacaaagagagagaataatacaagtttcgatggcgcccatcctcttagttagcacaaaaaggaatcaacaaaaatgttggcttacatacacacgtcatcaaattcccaaccgaccaaccgcaagaaatactctttgaaattgagttagctaatctctcggttcacttttgggagatatatggcttaatcatgaaatgtggtggtgaagtgcaggtagcatatagtcaaagggaagatgctccatcactgtcttgcctatagctaactcctgtactttaattatgctcgagtaatgacactgccatgcaaccagcaatgcttggggggggggggggggcagttgaatttgcatgtaattaggagcagattctgctcgttttgtttgaaggtaagatgtttttgtattatgctaattaagttaaacttatttaagtctaaccaatcatgcatgcatcatatagaaaaatataatgtagtaacatttataccaaatttatttcattgtattaactgttgaacgtgtatttttatagtatatttgtttgatattgaaaatattactgtattgttgtataaacttgatcaaaattaaatgaataaaaccaaaatatctcgggtacgtcttaattaatttacatatgctcgaatacaagttcgtggcgcacgcggagagatgatcgatcaacgtgatcgatgtatatatatatatttatgcaatgacagaacttctacaagtttgaccaatttgctagcttgcttgtattctaaagcaaaatattaacgggcgatttgagtacgagtcaggatcaagttgaattatttggagagaaaaatatgcatatagctagtatagtacacaacacgaggtcgggaaagtttgcttccgggaaggcgggaaggtatatatatagagagagagacgatttctcattcattaaaaaccaaaagtccaagatacgtacgatcagccatttcacaagtccaagatatatacgtttgggtcgacttcatgggtagttttgagtgttaggaacgagctgttaagtacacaaaataaggaaatgttgtataggatttatatgttatgttatttatacagttaaaaggcatgaacaatattggtggcatctacgcgatgatgctaggatatttggtgggacggaggatgtaaggagaattaatatgaatgtcctttgttgatcccagcacacggtttaataggcaattttacaccatactagcaaaatacttatgctttactatggataaaaaaatatatatattataataatatcattgaaaatatatttttattaaatatattagtatcacttgtttatttatttaaatatatggtattaacttgtttaaaacaaatactaaactatgttaaatatcagaaaatatcatactaacttataaaaaactacaaaacaaatggtgtagatggtaaattcactgccaccaatagtgtcttttaaatcccttctctatcaatatataaggcaaatttcttgccttcttttcaaaaaaaaatagtgtcttttaaaagagtatagatttccatatatatatatatataattataccagtaattatatgaatttgttgtaaatgaataagcaaacaatttataagagttgtttgtatattatataaatattgcataaaaatgtttatacacatagcaatcgtctaaaccaatgtttatactctttgtttatgtttatgttaagccactacgagttactcaaaatccaaaattgaacacaaaacaagaggataaattaaagggacttggtaaaccgtacatgtggatgcatgggatccttttccttgtcaggtccaactgtcggctctactagtctgctgctgcagtacatggttagtcgtgacatgcaccgttttgtttggaaatgttttgtcggccatagacatcgactgaactatgataggaccgaagatgttaatatggatcgctcacgagtacgtactgtatggctattatatacgcattcgacaaaaaaaaaagaaagaagagcaatagtagaaatgaagaacagttatgaggtttgccagtattagctagctagctgcatgtgcttcattcatggaaacagcaatttttggtttctttcaagagtatggagctccaatcaaaagcagcaatatattagttgtcactgcaaggaacgatcaaaggcaatgcctaaccaacgtattatctcctatattttctttgcttggatatatatgatccacatgacgataatcctagttaggcaggaatgcggacttgcagagaaatgcaagaaggtaagcaaaaccattactactactactaccaccaatcaagtcatcaaccatgcatgcaagagaaattaagaagctatacacgctacgtgctgagacgtacgtggctgcagcatcaccacactaaccttgagctcgaactcggagcggttctgcttgaggaggtagagcagcgcgaagaggtcgtcggtgtccatgtccgtgtccaccagtatcctcctcggcttcgccgccgccgccgccgccacgacgacggcgaggaccaccaccagcaccgccgtcgccgccctccgcagcggcgtcatcttcgtcccgtccgtcatctacacgggcggcggcaacgacaccaccggcgcccgagctggagactggagagagagagagaccctgtgtggcagtcgccgtagtctgctatccaattcagcgagcagttaacggaggattggatagttaacgaagcaagtcgagtgagctagctaccctgccaccatcagggtccagggcaagccattaaatgctatagctcgcgcgactcagagagagaaggacgattgggtatgggccgtatatatgggcgtatccgcgtatgcgtagggactagtaggaaggctgttggcacatgcacactcatactagctagatctacaaatggatggattttaaaaacctaggtgctttcattttgtaagtatatgcatgctatctcaatatatgtttttttctttaacaaggtaatatatatatatataaacattatctgtcacttcataaatataggaagttacatttattaacacaaatatgcagagaaaacagtatcaccaacacaggaaagcatgtctacgctgccagtttacaaacctcatgcaccgtagatgtcatattcgcagccggcaccataagagcatcactgataaaccatgattattgtttacaactgacacacataggggaacatatatatggccaattcttatttacaaccggtacatatatgagtcttaagcttagcagggacatgttgacaggctcatatcaaacccatcggcaatagtcctactgtagacatatacaaataattgtctaactaattaaaaaaattaaaaaatccttcttccaccaacaattataaggaacattccccgcaaaaaaaaattataaggaacattgaaatgaaggataggcaaaagatttttagaggattgttcatttcctttggaattttttccatggacccatttgattcttcataggaagaagatataatcttttttttcaaaagatctcattcctatagtcaatttcataggggaaatgagcaagagattaacctcttgtaaactttcatttggtttaatttttccaatggggcaattaaagggcttctctttccggtggttgtgtttttaattcctatagggttggggaaaaaacatgctacttcgatttcaacggtcatgcatatttttgccaacttcgggtggagattcacaaatatgattcaataattgtgatttatttatcttgtgttggtgcctattagtttgtatttgagtattgctgaattcaaagtgtgtcttgtgaactctgtggtgtgtgatcgctgttaagcaagtctgtgtaataagtggttgtagctcttttttagtaaaggccggagttatttccattatctaaaaaaggagtgtaaaaaaataggaattgctcaatcacgttgtttagatgcttcatggaaatagtacatgaatttggagtgagagtgacacaaaaggaattgttcaaaaaggtttgatctcatgttaaatatcctataaaattccagtaatttttaaggtcgttttatagaaatttcaaaggactccaaaagagcccacaagaaatttcttccaaatatcatgtgttcgtaagaagccttaaacattatatgccacttcataaacgtggaaacattatgtccgctccttgaataaccatgtatatttgtgattggaggtattaactctgttttacataaatatatatatttatcatattatcaatttttaagacattatgactggactcgtcttattaaaactatctatcatttatttaattgtaaatgtttattgctaaagatatcttaagaatgcatggtttatattttcttatatttacattagttttaaaaaggtaaattgtcacaacgatgtgttaaaaagttagcgtcatatatttaaaaagaaagagtaggacttaatgtacgcagaaggaataatataatttcagatccatcgttcatagtcctgcggtacacgcacactgtcgaactaatcaatcccttttcctggatatcattgtccccctttttctccaaatacctttggcaatagtacgctcccacacgttaaactcgtgataccctcatgcccatgctaatatgctaagtactcccttcgtcaaaaaaaaacaaaattagaagggaatgtgacaaaattagaaggggatgtgaggatgtgaccatacaacaaatctaggaggagtcacatcttttctatattgtttttttaatgtggggaggggggagggctccataaatgattatgagtgtcttgtcactcttcatgactgttggcagcgtggggtttggagatatctggctgcggagagcccaccggccggggcaggtcccaatcgttggagctggagtagctgacaaattaagtgtgtatgaagatggcagaatggggtagatggaacgaaaagataagagcctttttggcttctacgtgatgtacgatcctaagagctaatctattaagaaaaggctggttgagagtggagtacttgtactggtagctaggatcgcgacctataattaattttatactcgagattttgttagcttgcacgtatgagcatttttttaagcaagaacgtacaccaatttgaggttgtaattgtctctaccctactcgattgataaaatcatttttcatggaatgattgtttcgtgttcatatcagtcaaccgtctattatagtgtgtcttttccgccatataatgagataaatacaagctactctcgtaaaaactactccctccgtcccataatataaggaattttgagtttttgcttgcactatttaaccactcgtcttattaaaaaaatttagagttattatttatttttttgacttactttattatccaaagtattttaagcacaacttttcatttttttttatatttgcacaattttttttaataagacgagtgttcaaacagtgcaataaaaacttaaaatcccttatattatgggacggagagagtagtgaattgtacccgagtcatctcctctcacagaccggtgctcctttttcctctcttattctcttccctttacttagtgaagtttagcggtgtctatgtataactattttattgtttctctacatgctctaaatatgacttttatactgttatagttcttatatgttttccatatatatagccctcgtgtactctagttattcattgctttatgaatgataccatttgaaagcagaatgtattatactagtgacataaaaggaagccattgtgctcgctctcgtgacctagaaattctctaattaatccgaaaaaaaagaaatatgaattattaattaaaatgtgggttcaaatcctatctttctataaagttaaggctcactacatcctaaagcttaacatgcaaatatgccacatcatccactaacatttactacatctcaaatctcatgcaagcatgctaatctattaagttttagagctttaaaatgcaagcatgttaattaaattatcatcctacataattcacataatatttcaatatatctctgcatcattttttataatatcttatatacctatatagttcatcctcacttaaatttaagagctttaaaaaatccaagcatgttaaatcatcattccacataattctcaaaatattttcattttgtataatatctatatacctatataattcattcgcacttagttaatgttatttctctcttctctcattaagccatatcacctcaattgtttctagccctcaaatgatcaatctatggttggaattatctcccttattttcttctctcataaagccacatcatattacttttaaatttgggtcattattctatatactatttaaattatgataaaccacatcaacttatataagtttctatcgtctagctatcttacacattatttctatttcttattatcataccaaactcccacagcaacacgcggggtttcatctagttactacagacaagataaaccaaagaatccaactaggaaaaaaataaaagagagtacatataaaactagcaattatatatcgcatgcaaaaaaaaaattagaaccctaaaattttgattgaaagtctatcagcattgtaaagtttgaaaccaaacattcaattccctaaactttagaatacattcacacaacctcctaatgtgattttacaaaatggattttatttaatttgtatatacattagcttagctttgatcatgtgacataagcattggatatatatgttaaagttttcacttaaatatttctttttgcatcttgtttgctttcacttacaagaaaagtacaagttgtatgatatcactgtacagcataaagttacaacctacaattgatgatgcgtaaaaatattgtaaagttcaggaggttggatatctggtttcaaagttcacggggctaaatggagtttaatttaaagtttagggggtatttagactttttccaaaaaaaatataaatgctataactggaatataagttgaaatattaataaatagttcatgctaaacataaataactacaatcggaaataaatattaaaacctacaggttaaattaatccattctacaggggaaaataagcatgatatccactaaattaaaactgataaaaatattagtgaagatgagctaatttctagcaggatgattcttacatcgatgttattactgattcttgctacataaggatagttcaaggttgaagcaagtgcgtagaagaagatttaaagcttagtcttctaatttttctctttctagtgaagttttctgattttctttcttattagtcttctagctttttttctattttttttatattccttagttataaggcttgggatccaagtactcatatttatagtggttggttagaccggatttcaatctgttacggaatcgctgaggccaaaatggtgagacacaggtaatcaggaattcaggatttttagatgacttacagattatagaatcatcaacgggacactgggatttgtagggattcaacatgttgatgtgttgcctcaggtacgggctccaatacatgttgatactagtaggctagtagctcaatcgtactctatttgtcccataatataggaacctagagatagaatattttatatagtaggaaaaagtatgaattacccactaatatatcgtgttcgctcgaattacccattgcacccgaaaaccagatattgcttaccctaaactttcaatataataccggacgaattgcccccctcgatccaatcaaagcggttttatcttgcgtggcgtacgcgtggcaatctagtcagcattttcttttttaaaatagtgggacccacctgtcatccctcctctaaccctcttcctaatctatctatctatctctctctcgcgcgcgcgcgggcacaaggcacgcacagcggtgcatgtgggcggcggcgcaaggcgagatgcaggaaccaaaagccggagctgggttgtgggaggcgtggaaggggtgcggctgggagggcgttgcggtgggcgcgtggggtggtgcgagacgcaaatgcaggagccggagggcggagctaggtggtgggtggcatggaggggacgcggctgggagggcgaggtgctgcggcagacgcgaaatcaggctcctcctccgcagtcgcctcctcccgcttctgcctcaactcctcctccacgtcctcttcccgacgccgctgcagcgtggccgggttgatgtcggcaaccgcatctgcagcctgccgtgaaggcggatggcgcgatggggaaagccggagcaggcggcaggagagaagccgccttcgccggtgaaggccaagcggtcgtcctcaccaactaattaagtccaagtcgtcgggtaaggggaagaggtccccgtcgccgactaggtccaaatcgatagccatgggtgcggctgggagggggaattagtcgcgctcgtccacgaccacacggggatccccctgccgccaacacggtctcagcagcagcgcgaggcaggctcaggcgaggcgcgcgtcacccacaccaccaccaccttcaccccgcccacttccttccggccttttccgcctcaaccttggctgcggttgtggcagccgatgtcctgccttcgtttctgacgtcgccgcctaccgtccgtccccgcgcgccgccgtacgcaccgacctcctgcacttggcaacgccatagagagagagggggggagggggaaggggaagaggagaaagaggaggtgagagactatgacaggtgggccccactatttttttttaaaaaaaaagaaaatgttgactgggttaccacgcatacgctatgtcggacaaaaccactttggattgggttgagggggtaattcgtccgatgttgaaagttcaaggtgaatgatatctggttttagggtttaggaggtaattcggccaaccacaaagtttagagggaggggtaattcatactttttccttttatagtataatgaatcatataccctcctgcctaaattttattcggttctagattactatattatggggcagatggagacatagagtaactcgcgctgttggcatgtgccatgtcagttctcactagttttgtgttgtgtggaacatttcattccacaagttgagcaccaagctaaccactccagcacaagttcgtttacagtgtactcccaagctctgtttactcctctttcacatgcttttactgcgtacagtggcaattcgcgtccaggctctagtatagccccttctggacaagaggttcaatcgcaacatgggccgaggcctactaatgtgacgaacgtacgtacgcgatgagagtattgatggaataaggtccttttaacttgtcgacgaatccgattttcatactttaactggaaaaccagatataataggtctatcaactattaaaaccggtgaaaaaggtccctcgacggttttgatggcgattttggttgacgtggcgcgtatgtggctagtttaactcggtcttgatctgacatggtgcttacgtggcaaattgatccagaaaaataataaaacccgtgggaccacatatcagtttcgcacaaatgataataataaaatggtgggacccacgtgggccccccatgtcatcctcaatcctgggtgggcggcgagctccaagctgacggcgcccggagcgaggccgccaccgccgtcgaggcggagagggcgtcagcgggaggagatcgcaacggcgtcggagcagccggcgaggaggtcggcgtagacgtggtcgaacccgaggagcgcctggagcatgcaccgcctgccgaggcgtgtcgccacttctgcgacgcggttgagcgcgtcgagcttctcggcgagcgtgagcgccaggagccacgagtcgtcgcctggcacgagcgcacgcacggcctgggagccgaggcagagcaggtgagcagccgcgccgcctcggtgtccgacagcgagcggatacaggttggcggcgcgcgacatggcgttggccacatcgaatgacaggatgtcgaccttcccgtcatccaccccctccgccgccgccgccgccgcgccgcgccgcccttgccgctactcgtcaccggcttcactttcctagacgacgacgtcgccatggacaacaccttgtgcaccagcgaccggcctccatggcgatttcttgattttcttcttggatcaaacaaagattaaccaaaaggaggctaaaaagtagtaagaaaaatatctccgcttttgcaccaaatccagctaaacaagaaaccaaccacgagcagtcaaaacagacacaccgatttttttcaaatcccgtcgatttgaaattcaaacctaaatcctctgatttcttcgttgtctcgctagtagcaagcagcaggagcaattaatggcggggagcagagctaaagcaaacaaacaaattaaacaaccaagtaacgagaaatggaaaaacaatggagaaaggtgaccacgaagacgaatcatggcctctcctgccgccgccgcgatctcctcccgctggcgccctctctgcctcgacggcggcggcagcctcgctccgggcgccgtcactgcagcgctcactgtccacccgggcccaaccgcctcggtgcgcctcgcctccgcgcacctggcctccgtagatccaaacgtggccggagaggggagaggaaagagagaggagcgaggatgaggggagagaggtgaacagagtggagacggggagagagaggaagaaaataaggggattggggatgacatgtggggcccacgtgggtcccaccatttattattattatgtgcgctaaactgacacgtgggtcccacgggttttattatttttccagatcaaattgccacgtaagcatcacgtcagatgaagaccgagtcaatctagccacctaggcgccacgtcagccaaaaccgtcaagggaccttctttacactgattttgatagttgaggaacatgttgtatctggtttttctgttaaaagatgaaaatcggattcattagcaagttaagggacctagataaacttattccgagtattgattgccacattaagcctgccactccaagcggcagtatggtcggtgccattggctggcccatcatcgtaccagccagtccagccatatacgagcaaggaaaaagtacaatgaagatcctgaacttgtcatcgagttaaaaaactttctcaaaccgtaaaacaggtatctgacgtctcttaactaattaaaaccgttataataggttctatgacagtattgcacccggttttgtcagctgactcagtataggtcccacatgtaagcctcttcttccttcctctctccttccctttccctttccacgggcgacgggcgtgcgcgggcggcggggacggagaggttgggcatggtgaggttggcgcggccggtgggggaggagctgagcgcagccggcggtcagcggggcgggagaggaggagggcgtcggcggccgaagacgggcgacgcggcggcggtgacggctgcgacgcagcgccggtgatggcggcgacgggcaacgcagtcgggtgcgtcgcgaggaaggaggggacgaggcgggacaagcaagccgccgggacatcctcttcgccgccgccggggggccgcctcgtcgccacgacggccagcggcagcaggatgggaggaggcacaagtgcaaggtggcgccggctgcgacggggtgcgtggcgaccgacagcgggggagaggagctgggcgcagcaggcgaagatgggcggccggctcatccccgctgccgccgcccacgcccgcggcgaacggtgaaggtgaaggggtagagcttgtggcgacggaacttagggaagcaagagcggagggcgacgtcctcggcggcggaggaggagaggctggcatccccacccgcgacatccccgtcgacctcgtcggcgccaagctcctcccccaccagccgcgcacgcccgtcgcccgtcgcccgtcgcccgtcgatgtagagcaccaagttcatctccgcctggcacggcccgccgcagaacgcctccgccgcctccgaatctccgatggcacaccgcacacctagcgcgccctccggacaagcctgtactgcccctggcacccgctgtagatctttacccggccaccaatgcaagaacacacacatccaagattgcagaacgtcaaaaacagagtctattttctacttgaactcttttttctttcttttttggctgaaattgtttcaattactgctcaagtttgatttcgaactatcaatgatgtgcttacatatctatcgttgaagcagatgatggccccggcaatgatgtcttcagtgtttcttttctgaccatggaagggtgttgctgcctcgtctgcgacggcgatggcgacatgcatctagatggggctgtgagcagcacgatgggcagagcccggtcgggaggaggaggacggcgccggagacggcgagcgtgaggaagccgacgacttgggtggagttgggcgcgtgcgtttgcaccgccggagcgtcgatgacaagtccgccgccgcgggcgcttaccttacccatggcgttgcgtcggacgtgcgcgtgctgctgccgatgggaagaaaaaaaagagtctgacatatgggacccacgtgggtcccacgctgagtcaactgccacgtaggacaaaaccgggtgtaatactgctctaggagctattgtaaccggttttaattagttaagagacactggatatctggttttgcggtttgaaaacgtttttttaactcgatgacaagttcagggaccttcggtgtactttttcctacgagcaatttactcctcgtgataggccttcaatggtgacactgtgacaggccagaccaaccgccgcaatctaatccatcccacccaaaccattcgggcccgcgtagcaaagccaccgcgctttttcactcgtataggtggatcatcatcccgctttatgcattgctattagcaatggcggagctagaaaactttttaaacatagacaaacttaaatatacctaatattcgctataattttataactttatttagaaaataaaatttcaatggtgtatttagtggcgagcccaggcggctacctggcttgcggtggctccgcccctagctactaaagtacctcacaattagtaaccatatatagtctctcgctagtgataaaaagacacaatacatgtctatactacttaaaggtaatagtgtcaccatcaaatcacggcgccaatgtcactggcgccccactcctgccacgtcagcttggctcgccgacacagtgccacggtggcgcgaggacggtgccaaaggtgttggcgccaccatgttagacgacggcgccagtctttctgttgtaaaaaaggatcatttttagaataagtttttccaagggtttatttataaaataagtttttcaaaataactaaaatgtaaaaaaatattagctttctgttgcagtgcttttgttagagtgcgcagcccagcccacccaggtcacattgggcctgctctaccacaggcctaaccggagccacaactttaggtcttgggcctatacaaccaaaaagactagtctgatgggtgaggaccgctctcaccttttaagtcgtactcacatatcatcaattaccgatgtgggactaaacccaacagctttatctcgattagaaaaaccataaacttgcaagcttttgtagtaattttaaatgagatacacaatacaaattatcacgagccattgacggaattttttatttataataattaataatatttaaattaaataattagtaattccttttgagtatttaccaaaataagaaggacgctattctaaacagcttccgcatcaggacgctcctgtaaacagcgtccgcggatggacgctaatccaaacgacgtccagaccggtgtagccacttcaaatgcagcgaaccgagcaaaaaaaaaaggaagaaaaattacggtggcgctagggtaggttgccgccgccgccgttgcctccttccaccgtttgcctcaacatcgggaggctgtagcagacgcccgcccccaggaggccctcacgaccgcccgcatcgattccagaggacactgccattggcggcttccaatttgggaggccgaaggttgttgtcctccccggaggctgctgctgctatctgctcgactcctgggagaccgttgaattccattatcctgataaagtacgtatgaacacaatgtatatagcagctgatcaatggtaattagctaaacgtatgcatgggcacctgttacctcccaccgaaagacataagtagatcaatgtgaaagacatgcatgtcttgcagttcacctgtcaccggcgagcagccaacgaacttgccgctcaagacgccgtggctggattgatggcgctgagtaatggacaaatccaaggcgccggcgtcgacaaggatagtaacagtggcgacgtggtttgtagggcgaaacgtacggaatacagccccccgatcgaaggcgaatacgacgacactggtgatgcctgaccctagctaggttgaacaacttttgtttcaactagaaagatagcccgcgcacatgcgcgggcaccttcttatataatgagtgaaattttattatgaatatttatatgtgggtgttttttattaaaatattttttattatattataaagttaaaagtattttgtgtgatttgaaccctgattattttcttataattacccttgtaacatttaaattctaaaataaaattactcgagaacatgcggttttgaattgatgagaaaatattgtgtcgaaacaaaggaggtggttcctataagaaaattcaggatatttaactccccagtaggatatcttacaaccaaaaaatccaataatatcaattttttgattgattgtattttactttttatatattttttcattcaaacagaactcgtaaaatgtttgaatttttctatttacagtgggttttaaatctagcaacatttgctcaatttccaattgtaaaggctgcctcaaggttgtttcactgctaagattcctaggtgcaacccacatgcttattggtatgatgttcaactggccacacatttatttttaacctattgtctatattggtagatgaatacctattatgattagtgacttcatagatcatatgtgtaattgggatgctatgatcatctttcttatgaatatttatttatctcctaataagatcgttttaaaagtatcaaggtcaatttgtatgtacatagccctcataggcatgttaagagaaattaattaagttagtagaaagtcgttagacgcctgacaggatataagtaatagatggaggtccatttgtgtcttttttacatatagataattttaattttagttgataaggagataaaaaatagagagaaaataatggcgcacgctgtacgcgagccgggaggaagggagatttcggatgttctttttttaaatgattaatctaacaaactaaaattatgtgtcagatgtttaagtcgaagctgatggtcgaatattttgttttcttgtcagaatttttacgattttctcttaaaatttaagagaacgacgtaatatcttaagagagtgtattttctccgatttaagagaacgacataatatcttagaagcatttataagatgcgtactttttactgtgttacaatgtggggggctatttttttaatattactcatagatctgttcattttacttttattatatataatttaattattatcaagttatatacgatgaaaaaaatatatatatcattaatttttatagttttaaaattgcttaaatgacacgcaaaagtcagaaaatgtagccccaattaatgtgacatttctctctttacagttgaattaaagaggacatgagttttaaaatgtaaaatatctaaagacatcagcagatcaaatattagcattataatttagatgctgcatttgcttaattgtttggcatacaatttttgcttttctaaaagaatgaaaataggagaaaaaataggtgaaaaaaggggtgaaagaattaagggggggaggggttgagcagacgtaagtacgtacgtacatgcaattgccaacagggcgaggtgggcctagggataaggatatgtttttttctaataaatctaatggttacaaataatggtccacaaagtttaataaaaatcaacagttatacgttgtgtccttttaagaatttctctaatttataggatgccacgtggcggcttaggagcatttataggatgccacatggaggcttagaagcgtttgtaggaagtttagtgttgattaattttttattataaatccttatgtggaagacttttaaggaaaaagtctgaattacacccttaaacaataagaacggtacaaattgtcccggttatatataatctgatctctcaccatcgttcgcaaacatataaactaatatattttttgttttgttttttcttttattatacatctgatttacctatgtatgttcatgggtaatatacgatggaataatctatattgtcaaaattatttgtcctaattattaacattatatagatgagaatgacataattaaaaagatataatgtggttctatgcggcattttcgatgatatgtgtatatgttttttctagcaaatactaagcacatactttttccttttttttggagacaaatattttttctcttagggtaggtgtgtgtatgtgtatttatatgatggatgagcacacgtttatatatgcgctcgtgattgctttttttaaggaaacatgattgccttatacatcattagtaaaaaaatactttcaaaaaatttagcgagatggcgtgaagcggtgctgcggccgcgtgaattctttgacaaactcgccaagggtggttgctactcatatgcacaatttgaggaaaatctcaaagctacaaagaaagaaagaaaaaactactcgatggagctgatcttgtacacattctttttttttcctttatgacatctcttgcgtagatatagatataaaataatggttgaaaataatatatccacgggttacgtataaataagtagctagattttgtttttttatatatatgatgacccttatatatatacagtacgtactcctgggtgtatataaccatttttctatatattttttcttagataagcacgggatatgcaatatttgatatttaattaatcttacgctgatggcatgcttagtttcgtgtgtcctagataagctcatccaatgagatagaccgaatgaagcttaagagataaaagggcatccacatggtgtaaaaaatatatatggttgttaattttccaaaatatatatatatatatatatatatatatatatatatatatatatatatgaatatagaaacatagaatatatgaaaatacattcttgataaatttaataatgtcatttggatatatcagtattacacaatagggagtgagtaaatttttaaaatgctactcaaaatttaaattgttttttaattataagtccaatttaattgtgatatacaatcatatagtctataatgttaattattaatatttttatggatgtttcaatgagatgtgctatttagaataaaacttaaaataacatatatttttacaacttaaaacataacatatggttaacatgaactttttagtttttcatctaatctaagtatataagaaggaaaaagaaaaaggacatagaggggatatgtacgtacatcggacatacaaacgtacaggtccaggggacacggccgagtaacgtgggattttttttagatagattgatttgttttttcttaaaataaagatatagtggttaaaaataatgggtccaccagattaaataaaaaccgatggttggatgttaaagctccacgtgccgatctaggagcgtttgtaggagcgccacgtggcggctcgagagcgtttgtagaaagtttaatggacttttagtatataatagatagatagatagatacttctgttagcgtattggtggcgtagtgatggtctgactgcaccaggaaggtggacgttgtttctagtagcgtccatgtctggacgctgtttgaatgagcgtccaagtctggacgctgtttctacccccgtccatcctattttggttaatcctcctagagaattactaattatttaatttaaatattacttattattataaataaaaaaattcggagccattgatctatacttaagtattggaagctatatgtgtttgtctcacattgagaattgcaattttaagcatgacatttttcattttacttttgaaggcaaacgacatccccccaaaaaaaaaactcaatttttggttttctcaataatccgttgtaattatagtatgtaaaaaggtaagacgcatcacgttggaccactcctgtaggtagatcgagccgtattgtcattccttttgccttagctcgtcttgattcaaacatccagggcaccggcttgcacggcctcgcccagcccttgtcattgccacatcaccacgctcagcgcgcaaatgacacggataaggtgggtctctcctccaccggatcgatcgtccttgcatgtccacgctgcttgtcggtccacatggcgacacaccgacggcgcggtagcctctcgaccccggtgacctggacggccaagcggcacacgtgcaaaggcgcgaccgagtcgaattgatttcgcgccggttcgacggagatcatccggggacccgatcacccaaaggtggccgtgctcgtgatcggagcgtggattttagccgggcgcttagccgggcggg

SEQ ID NO: 2762 - DNA, 647 bp, Oryza sativa
ttcgtatgggcattttgctggcagctatggaaatagctgctctagctatagtttcggatactctgcccatttcataaagtattcgacttggtttaacaacggctacccaatattcgggggatccctttcccgaacccatacgtgtttccgtcggtcttattgtaaccggtttgtcgggaaatatacgtaccagatttttccaacacgacgtgcatatcgtgtcattgctcttcgtcctgcttctatctgcctcgccgtaatccaagtaggttcaagtgcttgaagagcatatctaccaaaacaaatacaattgcctcggtaggattttccctttattcttcctctatgttgtttacgaaatctggttcttttggggttatagtcgatggttctctcttagttccatctctactgcaaaactggacatgagagtttcttctcatccagctcctcgcgaatcaaatgagaaagtgtgcaaatttctctaattccacaatattctaaaatattacggatagatacacattaataggaaaggttagggtttttaatattaaatttattaaaatactaaaatatatagtcaagaaaagaggatctagaatatatctagatgtgtatgtttatttatctatattctatattta

SEQ ID NO: 2763 - DNA, 4322 bp, Oryza sativa
atttttttcaagaaaatcctatccagtcataggttctgtcattcccactgcttctcctttaatggttaggtttgaatctcgcaatggagcttccaaaaaatttctttccgagtcaatttctcagtttattaactcaggacgctctttgttattccttgaaatttgtatttcttgtttcaatcaaattacgatttcgaattctttgttatttttattatattgatgctttatcacattgctttttatgatgtattcatagaccatacatattggaatcctatatctttcttttttctcttccttctttctatcatccttccttttatctacatcccctttagttttgcttcacaacttagaatcctatttttttaaagaaaaaattgcagttgctacacgtatatgatagatttacttatttatgatagatgtatttattcatatagtgactgtttcttagttaggatctcgacaatacgaagcaataggttggttattagttcattttctataattacatagtagggttcattctatttttttaatcccctttttgaaccctaaaaaaaactaacgagtcacacactaaacatagcaattttattaaaagatttctcaattttcattaaatcttatagaaagaggtagaatttcttctttttttcagggattttagggaaaataaggctcttgtcattttttattctattacttaacagaatgggaagacagggttggttattcttcatctacgaatatccaaattttaactcctaatactccatagatagttcgaattggatagcagcaataatcaattttagatcgaattgtttggaggggaagtctaccttttttgatgcattcggcacgcgcaatttcttttcccgcgagacggcctgcaatttttacttttactccctttatatatgttttttagttaattcaatgacccctgtacatttgtcgataaattttctcttaaaaatttgacagatgtaattatagtacaatcgtagtgtagttacactgtaactcatatgtaattacactgtaacttgcatgtaactacagtgtaacttatatgtaagtttcacgtaattttgaatcgttagatctattacaagatttgtactattacaagatttgtactagtgaggaagaaaacaaatcatagcacacacatatgtgaaaaaatttgttcccaaggtctccattttatcgaaataacaagttacggaaagatttttgaaaattacatacaacttacattatagttacagtgtaattacatgcaagttatagtgtaattacactacgattatactgtaattacatccgtcaaatttttgagggaaaatttatcgacaaatatatagcaaaattatatctcattcatatgatcaattgaccaccatatctggttctcttacccagtttcactttcatagcacgtatgagagcacgcttgtgctttgatgctttctcgcgttgacaactcgaaaacgtgtttatccatagttccatgcccgtatctccaaaacgtatttctgatttacgctttcaaggtgtgcagcgacatcaaaatatgtatatggttcagtgccttatttgaggcaaatatttttcatggaagaaagatcaaactgcaccacatctcattcacatgatcaaattaaccatgtctgaaaacacgcttgtgctttgatacttccccgctttgacagctggaaagcgtgtttctccatgaccgaaagggtccaatgtccgtatctcggaaacgtactttcgatttacgctttcaagaaatggaccaaataggagtccgggctcgagccactcgactcgaccgattcgacaccgacgaaagagggcgaaaaccatgggctcctcctcgagcaacggccggaccgcgcccgcgccgccgcctccggctgcgcctgcgccgccgcacccactccacgtgatggacgccgacgaggaggacgagaacgtgaagcagctcagcgagtgcgccgccctctacctctccctccaggcaccgattctctcccgctccctttcccctctccctcccctgcgtgttctcttccccgcctcgttcttagtagttgaggacttgaggaggcgaaggcgattcctgtcctgctgccgcgcgcaaatctcttcctgacttaacagtctctgatcttgctgttcgcttggatcctttgcaggattgcctcgtggagtccaaccgcagctggaaggcctgccaagcacgtaagcatcgcgacaaattcgtcattcctttctctctctctatagtaggccttggcgttcatattggtgaactgaatgagttgctgaaagttgctgattgcttgctcagattggaactgatcaactgaatttgttgtcaaatggtttggaattaggcaaaaccttggatttgtagtgttgtgttgaatacccaggataactgcctcatgttacatgtgaatggtttctggtttatcaagtgttaatgtaaactcaggaatgctacgaaattttcttcttcaaaagagagtgcttatggtatagctgaagtgaggctcacttgcttatcacattacactctcagagagaaaaggaaatgtggggaatttttcttgcttctttgggaattgaattgttttgtatgaaattcttgcatatagataggttcttaatggcatgatatggccttcaatagcttaaaacgtgctagaatgggagttagaatcatccaagataaatctacatgtgaatgtggtttagcttcatgtctttcctgaaactattctaaggcttcgtgaagttatgtctttcggcgcttctttacaaccatgcgcacttgtgcgatattactgggtaattttctagtaaaagaagttgctgatccatgaggcaatttgtacacatttggcttacctaacagctcgcaggcccttaacaagtaacaacagcaggcatgcagatccaactttgccatatagcactaatgtcctaggctcctagcactgcacaaagtttggtcacacatttgcatcctagttgctttccaaaatcgaataacttacagccacattttattttgtcttttggctgtacaattgctgtgatgaggttaatgtttgctcaagtcaaggggctagacctgagttgagatgttgcaattttaagatgccttgcattgtgatccgagctaaatgtagcatttctttgaggataaaagtatggtagctatgatagttacatccatatttgtttaaagttagtgctgtcttagttttccacaagctggattctggttttattatcgtaacattatctcactttgttctaacaatatctgtgttgcttcctttttatggcagatgttcaagccttgaaagcatgtgaggcaaagagaaacaaaagtgaaacaagataaaattattttgcaatatttggcactaataccaggcaagtagaaagttaatatggtttgaagagttttgaaatcaactgacttgtttcttcaaatattgcgttatggctgttgccatcagcatcgaactgaacactatgttttttcaccagtctgcttttggaaggtttatcatattcttcattgaggatggcgacaccataggcagcgtgtttagagctgttagctgatgatggagaaggtctacagcatcataacctggagttaacttgttaaaagaacctgtagttagatttcgaccgaaaggacacaggatgagctcgccacgttaactgaacttgcttgattgtttctggtggcagtcgctgtttcttcacattttcatgaaatgagacaatatcagcattacatgcgcctttggataactgctgatatgagttcatagcttaagattatcattgttgctgagatgcctttaggcttttccaatacctgttttggctttgttttggggcgcacatggttcgccacatcgtctatacaagtgacatcgtagcgacagaatcagcgtcttcagtgacgcaactgccattgcagaccgagaacaccaactcctgccattctcccggtggctttctccatcggatagtttcttccgtgttcaattatgtacggatatgaacttctctggttatcagaaaaaagtagaactggaagtgtaaataggttacagccaaaagttttcgacaatcatcagacttggtatttcgcattattgacaaaccgcagagtataaattgctttctgaaaaatccgatacttttttaataatcacaggtttactatgactgcgcagactgttctattgcgggcttatacttccatgctc

SEQ ID NO: 2764 - DNA, 1893 bp, Oryza sativa
cttctgcctatcttaaaattaatttttaaccttaaatttagagttagattttatagttttttccatcgaagtttatttttttttgcctttgcatttagatcgccaaaaacacgtatataaaagttttattcacaaattacttctcgtttgtaaatatacagtttggcttattccgcgaataagtgaaacgatggctccgatagtttgtcatctctattggttgcctacgcttgatatatactctccgtcctaaaataaaccaacattataatagaatatagcacatcctaatacaatgaatttgatcataccatatattcaaatttgttgtattaagatgcgtttacgagaatgacttattttgggacggaacgagtacttcctatatatcccataaaaacaaatatagtacagcacatcctactactataaaatctaattaggaataaaaagcaaacatgtatgtatgtgatataagataaaatagtagtatgtgttatatcccatgatggtttttttttaagaatagaggaggtaaaccttcaacgattttataagtgatatataaaaagtaaaataaaataatttgtggaaagaaacttttacatattgtgcaatatgcttagcgacttaaaagctagtattaaaaagaaactatgttgaaaatatattaaaactaactttaaattaaaatttgatagtggtttataagtcattgggtaagtgatgaggttttatctttcctagggcggctgtttagtttaactagtttgatttggtggagtgcattagtaaaatctcacgttccaaacatgcctaactctcaattacgagtgttctcggaactctaaactgatgtccccttggaaaaaaaaatggtgagtaatcccctggtgttattttcccatttgtacgcgttaatagtgttgatcaaaccttagcaaacaaaaaaacgcacatctgtagtactccagtagcagtagtagcattgatttttagcgtacgttggtacagtaccatctttttttcagatattggtacaatatccaatcgctttttcagtgagtgtagtacgttggtagtaccatccgcttagtagcattgattcagtgaatcagtgtacgttggtagtaccctccttcagatgttggtacctggtacaatatccaaacactgaatgcactttgatagtaccatcaaacgttcttcagtcaataccacaggcacgcaaatcgatgggagaagcaagggaaacaattaacatttcttcgtaaacggaaattctttactgaatgtttatacagttatgtcacattaatccttgctagattttctttttccttaatgaaacagaaaagactgtacaaataaacaaggaacattaacaggccttggcaggaagcagtcaacaaatatggctgccaaggaagttggaccgtccaatgttccagagacgtatttcacaaaacaaatggtcttttacagtatgtacaaagcaacggaaaaggggcagtgttgcggcaggcagcagcaacttctcgacaacaccaagctccccttaacgtggatccgtggattagttaatggcccggaaggaaggatcttgatctcaattcctgagtaaaacttctcacaaatggatatcgagcacaagcttcacctttctaatatgtaccaaatagtagattatcatctcagcaccaatttattccacgaaagcctaatggaaatccaccattttctaggtaatatcacgggcactgttttccattctctatgtaaaagcagagtatattattaggttcaacctgccaccagaaagaagagagataggtcagcacaacgcaaaaatatgcaacgccctcatagaacttgcatcacagacagtacctt

SEQ ID NO: 2765 - DNA, 5180 bp, Oryza sativa
attcctgcagcccttggaaatactgggtaaactccactgagttgtgagaatcagatgcttcattctgtccagaattgatgctcgtgagacacccatttgagatgtcagtcattgtaccattgcttactgaagaattgttggttatctgaggcctgaatgatacattacttgcaggtgatggtaatccatcatcaagagatccatccaagagggagtagctgctcaatggtctgatggttgaaggtaaagtgtccactgttgtgactgatgtggttgctccagttgctgttgaaacatggttcatgctctcattatctacattgtgaagggcagtaaaatttgccactttaggagattgaacagaattgcatttttccattggttgtaaatcattagtgataggttccaacaataactgcccctctaaaccattcatgttctgcattttcctcatatctgcaaaagaaaggcttttcaattaactatgacacataactgggatgaagtattacaaatgacatcatacgctcatatgcttaccactgtaaaatccagatatagggaaccccgccttggatccatgagcaccattatccttgtcgatgtatgtcaatgcattctgaaaccgtcctattgcaagattcctgaatctttgaatattgttaacttcgcatttgaatgaagtcacattaaaaatcataattagacatgcattggttcatttgcactaaaagaaaactatcaaaatattggacagctcaattctaaaataatcaagtataggcactagcatctgctacttcaaaaaaacatgtaataacaccgatgtatatggtaccaaactaccaaaccaaggttaaaaaaggctcaattaattgcaatactactagctagtatcataccaccttctattttacttctacacacaaatgacaattaattggaatcttaaaattatgtgatactgaaattctctcgttttcaaaaattttatacattcacattgcccgcaagaagtctatccatttcctaccagaagtttattacaatatacgcaatccccagatagatccactctcgcattatttcggcaactacttaggatcatgtaaatctgttccctcaaaacaactcacaagaatgacaacttttcaacatgtagcagccaccataatgtggccaaaaagaaatctttgccagaaagtgtggcaaatccagactagatttagccaagtctgcataacaatcatcaaccttagtccatatactttttgaaatttgacatttgcagaattagtccatgcacaccatgcacctgagacaatgatgtacccaaactataaaatacacattagaccatccagattcagaaacctgtctgttactgccagtgttcagttaaaccagtccagaatgggaaatgccatataatttagattttaagctgacttaaccagcttctgttttggggaaaatattatctaaaatgaatggcattgaaagcatatctttactacagataaaagaaacaaaaatttaccagccaaaatttgctgacattacctgtcactgaagttctgttcagaatagtggaactgcttgaatacagggagcaattccctcctccgaagttcaacctcatgcagaggcagcttctcaatctcaatctctcccccactagagctaagagattcccctgattttgcaggtggttgatctatcacatagaagaaaatctacacaaacatgaaaacaatattcaatattcattgcacacaactgagcacaacgttatctcaaaaaagaagaagaaagaagctgagcacaatgttgagacaaggaggcacaacctttgatttctgccaaatgggaatcctccatgaacttatctgtacctctgcatttgagaggtaccaacttgatctttctcgagatctcatcatctctttcccagaaataccatctgatggaacggaatctgaatgctcactatcacagtcagaagcatccattgccatcatactatttcgttgattatggaagactatgtttgcaatgttttcgtccctttctggccagtttgtcctacggcatacatcccaccactgagtcggttcagcagtaacatgcaactcatcatcttggatctgcaaggaaccaggcccaactattggactgctatcagaggattcagaacctgaaggcagtagttcatgttgaataacatggccagatggtgaatacaccaatagatgctccatggcattagcctttgatggaactggcaatgaaccttcatagttggaattgtggaaaacagcagtaacagcgccagatggtacagatagtttcccacttgcagaagcagccacattactaacagtatttagccaaccagaagaactgttttttatcctactgactacagaattagttacagttgaaggagctggatgaagctgatgatccataaggaatgatggctttgaccaccatggccttgattgacatggggcaaggggtagcccatcactgtgagaattctgtggcagcagactcgcatcaccgccaaaaggagacaatgtaaaaatatggcaagtacctcgggatgaaacaatagatatccactggctaaaatggctaaaagagatatcctggatgacctgcaagcagatgcaatataatcagaaataaacccaagataacaagtttaaattgaacttttattttcttttgaacatacagctgctgtcatgccacgatacagtttgtaaaggtggacatgagatgctgtccaatcatagcgtatagagcctgagctgttagctattacggttggcatgatcctgaaaacatttatgttatggccatgaacggaggctgtgaccaacagagttccactagggtcaaaacaaagagcagatatgggacttgtgtgagccctaaactgagatatgatttctttcgagataaaatccttgatgacaacctgcaagagttcaagaggattacactattaggaaacagaaatgtgagcatgtgacaaagtgaaggcttgctcaagcctcaactaaccattccagcattgtcagcttccagcggatgcacgctagagggaagtttgccagatcttctgccaggacttgatgacaagggggagccagaaccatctggcagaaattcttggcagtactttgacagtgtcttgtatcccatatcaccaagattaataataccagcagctatctgcttacttgattccattgcataccgagcaactaaacttccactactaggggaggtagatgggctaactcctggagatggtgtaaggttctgtggacttagacggcctgtgcttgataataaagggctattggaagcataagctaaccaccttgggccaacagccattgggccatacccaatatttatcccaggtgccccttgcaaaggatatgtcaagacactgaacttattctcaagggtcacagcatcaaagcagtatacctggaatgtagttaaaacatataagtacaccgaagtaaattaaaagcatgtactcctctatgtcatttaacaataaataagagcaccaagagaaacttacttgtgctgcaagagctacagctacaatccgggggctgcagcgaactatatatacggcagaccgaaatctcagaacatgtacatatgagtgagacttcaaagagtagaagcgaacaactgttggagtagaaatgcaatttccatttggagtttcactgctattatctctgatcagtgcacttaagcgaccaccttgaaccatacccgacccatttgtctcatcaccggcaacaaccagaagcatgggatgtgatgttctgaatccttcagtaccatcagagtaaactggtgtgggttgcatttgtaaaaatgtaactggaccatcacgttttgagaccaattcgcaaacatttgcagcatcctcaacatcaagcacttggaacccatttgaataaccaacaagcaaaacatgcttgaaagatgatggatgaagctctaatttatcaaatccagcccacaatacctgtttatataatgaagcatcaagactacggttatgttcaaatttgcataatatactagagctacatgtacacattggtttaaagaacagaagtaaatggttagtgaaaattaaattggttgcacaaacaataccactaaccggtcaacagaaaaaagaaaatgctcttctgatgaatacattccaaaatggaagcatagcacacggaaaactaaattggtctatttactaaatggaagcatagcacaatgagaactgaaccaaaataacaaaagcactatttactaattggtctcaaaaacacacatcagaaaagtatgatgtaataaagcagaaagtcagcttccaggctcccaacaaagttgagatatagttacaatagtgaaaccgtggcaaagaaagaaaattttgagttatggaacagaccaattgttttttggttcttgctttacttgaaaaatattgttttgcccaccatgtagataactagaatttcaaccattgttgaattggataagagtacccattcaactcccgcatgttgtagatttaccaattctgtatatccattttagctttatggtagtcaactggcctcctccaaatgtactacttgcgcacagaattttgaatctacaagaacataagatctaccacgcgggactaaatcacaacgtactaccgcaaaatgccgtgattgaagtccacgattgcaaccatattacatcaggactaaacttagctactcccacagctagcttcaatagtgagaaaaccaacatatatttgaatagttgggaggggcggggagggcagtagcgtgtgggaggagcggacctggtccttctcgtcctcggcctggggggcgatggaggcggcgacggaggcgccggccgagcgcaccgtggacgcgacggagccggcgttggacgacaccgtcttgaggcacgacgagatgatcctcagcgagctcggcagcagcccgttcctcccgcccttcccgcgcctcatccctcctcctcctcctccccactcctcccccagcacgagcaccgccgccccctccccaaactctataaccgcccctccttctccttcacctacaacc

SEQ ID NO: 2766 - DNA, 12949 bp, Oryza sativa
cccctcctcgcttcgctttgcttgcacacatcgtgtgccattgtgccctcacaccgtaggcttggaagacacgagtgcgaccgaggaaaaccggtggatggtccgggctaacatggtattggtagccgcggcgtttgcttgcttgcctggccgtgccaaagggggacttgcttgacaagctcggtacgtagattcagatccgttgcttcggcagagggttcgttcggttgaaagcttcagaaaagaccctaggccgtggcgagggtgtgtgctcatctttgggataatctagtttttaggtttttattaaatctgaaagtgatgtcactttatagatgactagagtttttacggtcatgccttgttgccccatttggttgagctcgacagtacgggttggagcaaaagaaaaagaaaggaatgccgtttggtacaaatcctagtgtcatggacaagaacaggctagcttgtgtgaaaagaataactagtattgctctatgctagtatcataatccaagatcttgtaaaaaaatatgtctttcatcctaaaatatacttcagtaactactactactactgtatgataccattaactttgtcttattcaaaaatattatgtaatataatttattttttgagttgttttatcatttaaaactttaagcatgatttatatcttatacattatataaaatttttaaataagacgaatggtcaaacatgttttcaaaagccaacagcgttatgtattgaaaaatggagggagtagattagatataactactacaaatatgagaacaatgcgtagctgagctagcagggagctatcgggaatacaggttttttcacagttttcttctctcttaaaactgaatgctaagctcctccttagtgttccaacaaaagtactatgaatctagataggggtatgtccatattcatagtattaggttgtgtctcagtatctcaacataagtactacaatctagataagagatatgtctagattcatattattagattgtctaatataggatggagggaatatcttagaccatgcatttgcatgggttgttgatattaaatgcattgaattaaatttctgctgaaaattatatgtgaataaaaagaaaatggttagacacagggctgttcggctgcccgagctgcggctgcaccgcagccggcacgaacagtgccgcactcactgtgcgcagccgcaactgttgctatcggcctgccgaacaggcccacagttgcgtacataaaaaaaacttagaagccgtagtccctaggtactccatacttagccaagcgagcacttcgtgcagtgtaaaataggagtatgattattaccctctggaatcctaaacatgggtaattcgcgtgtgtttgtaggattgttcagagctaaagctatgcggtcatagccttataatcacttttgctgaacaccaggttccggggcccagatcttgttttgccaactgttacatgttgacagtgagataatgaatgtgtttggttgctggtcatactttgccacaactaacgttagggcaaaaatgacaagaaatttgagtctatgacatatgggacatgttattgaaaaaagtatggcaaaccacaaatgtagcagtgaaccaaacacatacctaacaaactgtaacagccaaaagtgtggccatgaaccaaacaccctcgaagtgtgtgatctgtgttaagctatagttaatacagaatgtttagcattggaaatacattgatgatccttattaagcatggaagtgatctatggttcttgttttttatatgaggtggcttgatagatgttgaactttgttttaataattgtgtacaaatactagtagataacattgcatattgaaacatgatatcgatgtatgtgaaatggcatgtgcaaaatttatatgcatagatatagatatgaccaagaatagcccccccccccccccaaaaaaaaacacacacaaagggtgtcaaagatgagaaatgacgtgatttttgtggtggcttcttaatagcaatgacgaataaaattgagttatctagtgattaatgagaagcaatagcagcatatatctaataatgtaaattagatgattgtaatttgatgaagcataggagtgattcagtctcttgtcttatggttgatgtggtttaatgcatgttcaacttttggtttttaactatataggacatatatatcgatgagctatacccatatatagtatttgtagagtatgttgatcgttaaaactagggtatacatgagatcaaagtaaaagagatggaagacaaggattattgcacaagttcgagccctttaagtaatagcactatttctgttggtcaaagccggtgttgactttatatatcagtatcacgcgagtataatatttaggaaaaagtacatattaccagacattgttcaccttaaacttctaataccggacgaattaccctctcgacccaatccagagcggtttgtcctacgtggcgtatgcatggcaatccagtcagcatttactttaaataaaacggtgggacccccatgtcattagtcctcttcccctctttctctctctcgggggagcgtggatgagcagtgggtggcagcggcggcgacgtgcggggagcgttggaggaggcgggctacaccgacgagtccgtcgccctctcgagctccgcgccaacagcgacgaggcgacggaagcggcggcgttgctgatgctcccttccccggcgcgcgcagtggggagggcaaggcgagcggcagaaggcgctgaagaccccaagggcagcggcgggcgtggcgtctcgagctccctcggcttcttccttcttctttgtggccagcggcgggcgacgagtctaaggggtgggcaaggcggacggcacgcgtggtagggagtgcgaggcaagcggcgctgaggaccccgaggccgttgcgcctgctcactgtcggtcggagtcactaccgaggaccccgaggcccgaggcgtgcttggcgtctcgaacaccctcggcttcttccttcttctccgtggctggcacgcggtggggagtgtgaggtgggcagcgggcggcgctgaggaccctgaggccgccacatcgatgtcctccgccgcgcctgcgtccgctcgcctccaagtacagagagaaagaggacgaagccacccagccatggtacccgccgccgttcgccgctgactagtcccctctccccgctgcgcttgcttgctgtcgaccggagtcaccgccgcggcccgcactcgcgtccgctcgcctctaggctccaagcacagaaagggtggtttaatatgacatgtgggccttaattttcttttatttctttttgctaattggatttccatgtcagcgccacgcgtacgccacatagcacaaaacctctctagattgagttgagggggtaattcgtccggtattaaaagttcagggtgtacaatgtttgttttttttggtttagggggataattcggttgactgtgatagttcggaggggagaggtaattcgtactttttcctaatatttaagatgtcctagtatagtatcaatcggcttggcggcatggagccctcacacgtagtcaacagctagtgtggtcttctttctcgaatataaacttgacaaaattgaatgtctagaactatattgacttgtcttccgatggtgtgtccctcttctcttagagggtattgtatttatagagaagatcattttcctctcaaagtagaactctgagaaatagaacatgatacgaagtaaggataccttatcttttctgactagaactccaacaccttctattccgggaagataatttctttctttatccaccatattttcttaatcaaaggataccttctcgtataccattaggtctatggtatctccgtgtatcgtaaacccatgtataggcggtatgccttatccttacattgacaatatggatataaagttgtatcatgcttaaactctccattaccgtgctctcataatgcacccctaacaaatttttaaagagacataaaccaatagcatatccctgatcttacaagggtgtgtttgagagaaaataaaagaagagaaaaaaagagaaatacacaaaatgagatgagtcattaacacataattaattgagtaataattattttaaacttgaaaaatatattaatatgattttacatcaacttttctatagattttttttaaaaaaaatacatcgtttagtagttcgggaagtgtgcgcgtgaaaaaaaaacaagacaaatcttctccctagctttcatacgttgtcggatgcttctttaattcctattaaaaaacacttgtttaatattcgtggacaccaatacttttaaaacctggtcatcctcactccacctctagaccatcatacgtgaagggtgggtaacgatttgtttgagcttgttaccttaatgagttaacttagagtgttaatcttaacgagccaaaacgctagctcggctcgactgactatctagcttgttaatgagttctatctcatttacatcaacctttataattttgaattcacaattttatcatatgttaacgtactaataaatagaaattaataaaggaattactaaaatagtttccacgtaattagaagactatgctagttaatacaaactaaggatatagacatatgataacgttttgtagtaacgagctaactcattaaactcagcttcgcttggcttgttatgaatgcgagttcgagccgatccgaaccatgagctttgatgtttttccttcaccccaaccggtactccattaatttgataatataaaaatttaaactttataattattaagttatgcattgatatgaactattttcatctgaaccggtacacgattcatgcacagattttccagggtgtctaattagtacatagaagactagagttatcataactaatgactaataaatataatttatttttaatggactagatctaattagatttattggttataggatatctgttgatctctaagtgcaccctagattccatccatataatttgcaatcaatatacgtacataaacatacgtcgaaaaacattaaacttttttctatataaaaaaacatggagccttactatggttgacaagcctggccgctcaccacagttagtggcgaaccacgaagtacaacgtcccagctccgttgtgtggtcacctaaatttcgtcatcaattaataatgaagaggccgattagcctaacatggctgacccattatttcggcaacctcgcgacctgcatgcagccgatcgcacgatcgggtcagtagattagcacccgagcttaaaattcataaatcgcgacgcctccgccttcgctgttacggctgttcgttcggtaggtgcccccaccacatcaacgacaagtcgacagctgcgctgtgcaagccaaccccgcgaggctgcgaccgatgcgggggcaatacgctgccccgcaacgcgcgcgacgggcgcgcgcgcggcccagatcggtgggcatctcacatctgggcctcgctcgaggttgctgccggggcgcgcgcggcggtaggtgtgggaggaatttttttatttatacatttttttattaaaatatttaaaaaataattttttgttttgaaaatttacaaatctaatcacctgccgctctttggaagggcgacttttaaaaatcgctcttacagtgggtggcaagggatctaattgcaaaatttttatttgtgttcagaccctttccactagttttaattgcttaaaaactaataatgcttattcgatactccaaatgattttaaatagaaaagtgataaactataaagttatagatctcatcaagatctacaacttttatataaattttatctccatctaatatcgtttgaaatgtagatctgagattttttttaaatgtgttttatattttgtaacaaatatttggatatctaaaacagcttaaatgaaaaagttgttaactacgaagttgtagatctccttgagctctacaattttgatataaagttttatttcatctgaatttatataatataattttaaactgtaaaatcataaagctaacaaattgtgctggaaaatttgcatttaggtccaaagggcggcaagcgattagatttgtaaattttcgaaacaaaaaattatattttaaatattttaataaaaaatgtataaataaaaaaaattcggtgtggtagcccggtgctgtggatgtcatggtggtggactggtgggccggagggcgacgggcgcctctgcgctctgcggacggtgtggtcgcgggttgggagtcgggcgacgcggaacgagacggagcacgacgtcctccgcggccggactgcactgcacgtcgccgtattgtttttttccccttttttttacttcataagttcagttttcagtaagagcaactccaacaacatcttcaaatctcactctctagatgtgcatctagccagcttgacaaaaaaaaatggatagtcaattctgcctttcactccaacaacctctctattacagttctccactccacctgtgggtcccacgtgtcagtctccttaattatttttcacccttcttctccgcccctcctctctctcttcttctcctctcatctccgctggccaaacccatgcgacggtggaggcgttgtggagcccgcgcaacggagatgggaaggcggcgacgagggaggcggttggccggcgggagcagccggtgcggcgagggaggcaatcggctggcgggagcgacgcttgcggcggaggccggcggcaatgacgacgcggcggagggacggcgctggcggcgcgcagaaggacgacgcttgaggagatggcggacggagagagaaatgggtaggcccatgtgtggggcccacgattggcaaggcaattttggctggccatctttggccagcgaggggagctgtttagccagccggatggtcaagtcatctagttggcaaggttgttggagtgtgtttttcagccaaaattgctaaattttaacttgaagagtgagatagccactctcttggagatgctctaactagaatatacttagagtaataagtaccggatcctacattaaagcaagctgaaaatttcacattttggtccttttagaaaacttattatacgaatagacccctaaaaaaacttattctataaatgatccttttcgcgactccaatgtctttggcgccgtagtccaacatgacggtgccaatgatgttggcgccgctcccctagtctctcaggtgaaagttaagttacaaatgtgaaggggacatcgccaatatcattgacgccgaggaccaaattgtatttttttaaaaaaaaaatttgacctatttgtgaatgaaaaatatttacaaatgggttctcagcgccagcttcattagcatcgagaacttatttgtaaatatttttcatttacaaataggtccttttcaaatttttttataaactggtcctcggtgccaatgtcattgccgctgtcctccttcacatttgtgacttaactttcacctgggggcggaggggacgacgctaacttcattggcgccatcatgttggaccacggcgccaacgtcattggtgtcgtcatgttggaccacggtgccaacgacattggcaccgcgaaaaagattatttctagaataagtttttttaggagtctatttgtaggataagttttttaaaaacactaaaatgtgaaaaagccagtcagcggctaatttgttatcaaccttatatatattggctacttggctaggacgccatgtcgccaggaagaattcttttttctgtactgcttgcattattcaaaaccgtggtcaactagtcattcaaaatttagttaaaacagcaagcaactacaaatgacacgatgccatggaagaaaatagttgacctacacaaggaaataaacaaaagatattatcgcggaaaaatgaatagtcaagaatgacatgagttgctgggtagtttaggctctgttctttgtatagctagtactagtattattgtgggcacgtttttcaagcctttttgaaatacaaatttgtatgtatattttgttaggaaactataggcaaataaacgataaaaaacaatagattaatcacagaagatgcgagatttaacgtggaaaaccctcccaaagtaggagagaaaaaaccacgaacaccagccagcaaaatatcttctatatatcggggtgaggttacaacgccaaacggcggcttacaagaggtgtatatatatatgaggtggaaccctaaaagggataacaaagttggcctttattaagtgcaaataaatttggatcacaactcaacatatgtttcttaaacaaaactcaaataaatctatttttaaatttataatagttaatactaaattgtggctttctttggtaagcaaacatggaccatgtgtaactgcagtgcagttagtggactgtaatttcttctcagggccgcttatttcctgggctttttttatttgttgtgttatgggctgcttctttgtaggtcattcactttgggagtaagttcactagacgtccctcaactttacgtcgagtttgtttcacatccttccatctcttgccagacagaccgtaagagagggggtgggggtgggttggggggggggggggggaatgacgggggctctggcctctggctcacgatggtcgtcctaagcctcagggtcgcaatctcatcagagcaaaggtaaacggtgatggagcttgttgggcctttgaacaaaattttcggcacagctgtagttgccaaactcgaacgaattatgtagggatatttaactttttatcactttcaagatggcgatagctaagaatttacactccagtatatgatatatggatcattatgtgtctatgatgtttgggttcaataataaatactccatccgtttcagcttataagacgttttgactttagtcaaactcaaattattttaaatttgactaagtttatagataaatataataatattcataatactaaattaggtttatcaaatcaataattgaatatattttcataataaatttattttgggttgaaaatgttactacttttttctataaatttgatcaaattaaagcaaatttgatttttactaagtcaaaacagccttaaagtcaaaaccgctctattgctgcttataagagtagcaaatatagttaaatacctcagttatgtcacgcggttcagcactgggcattggcagcaaccgagggaaatcaaaagttccggcgtcgaagctgcgcggctcacggatctgcttatatctgcggcctctgctgtaaaaatactcagaaaactcggcgaatccacgagcagaagcgcgggcagaacgtgctaaacaatggtcgcctcacctcacctgctccaattgtcaacgccactccccttcttccgcccgagctcaagtcccaatccgagagagtcgatcagcggcagctagagcagagcgatggccgcgctgctgggcatcctcctcgcggccttcctcgccgccgccgccgtcctttttgcgctccgcctgctccactccttcctgtgggtcccgcgccgcctggagcgccggttccgccggcagggcatccggggcccgccgcgccgcccgctctccggcaacgccgccggctaccgcgacctgctcgccgccgcccagtccgcgccgctcgcgtccttccaccacgccgtcgtggcccgcgtcgcgccgcaccaccgcgagtggcccgagcggtacggccgcccgttcgtgttctggctcgggccccgcccgcggctggtggtctccgacccggaggtcgtgaaggccgtgctgaccgacaccacggggaccttcggaaaggctggccccggcggcaacaacccgctcgcgcggcagctcttcagcgaggggctggtggggctcaccggggaggcgtgggcgcgccaccgccgtgtgatcgcgccggcgttcaacatggagagggtcaaggtaagaaggtgtagattgtgttagaaaaacgtgtcattaatcgtgatgcttatacatcatgttggcaacttatcgatctcgataaattacaatggatagattctcaaacataagtccatatgtaattatgtcagccttgctaaaatgttcattactcatttcttatatgtaagttgtgtcatatgtgaactcagctactctccaaggctaggatcctgtatagaactgccaaatttgctttctaacttctttctacaattctactaactttgatctaaatttctatggatgtatttacaatggaatggaatttatccctttctttacaaatacgatgtgcttacgtattgatttattttggaaatgaaaccgttttcttatacttatttatttacgacgcttaaatggcactacctgtcaacctgtcatttgtaaatggtagttttttttttaaacgaatacgatgtgttgtagactgttatcttggcgaataaaccttccctttctacgggtaatattctgatgtgatcaatacttcaagagttgcaatatgaataatgcattaataaaatggtttcccactaagataaaatttttattcttttcaggcttggattccagaaataacatctatcacctcatccatgctggataaatgggaactacaagatgaagtacgcactgagtttgagattgatgtaaacaaagaattccacactttgattgcagatgtaatttcctgtgtggcatttggaagtagctatgaggaaggaaagcgagttttccaattgcaagaggagcagctaaaacttgttattcttgcaatgaggactgtgtatatccctggcttcaggtgaggtacctctgtctcttagcatgcttttcaaacaccatgattgagggagaaaattgcgacatctttctctaataggtttgtcccaactaagaagaaccagagaaggaagatcgtaaaccaggaaatccggaattcgttgcgcaaattgattgagatcaatggaaggaagtgtgaggattccaacaatttgcttgggatgatgttatccgctagtaaaattgacagtgaattcaaaatgggaattgaagaaataattgatgaatgcaagactttttactttgcggggaaagaaacaacagctaccttgttgacatgggcaactcttcttctagctttacatcaagaatggcaaaacaaggctcgcgatgaagtccttcaagtgtgcggcaagtatgagcacccaaaagcagaaaacctgagtgaacttaaaattgtgagtccatctattttatacttcttatgttatctcatttattgaatgcagcaagtaatactttgtttaatgtttgaatgcaaccaggtaaatatggtgttaaaagaaaccctgaggttgtatcctccggccgtgtttctcaataagatagccaaccgggatgtcaaactgggcaaacttgacattccggctggcacgcagctccagttgcctattcttgacattcatcatgatgttagcatatggggtgccgatgcagatgagtttgatccatcaaggtttgcagagggcaagagctatcaccttggcgcatacttccccttcgggattggccctaccatctgtgtcggccagaatcttgcaatggttgaagcaaaggtggcccttgcaatgatccttcagcgcttcgcgcttgttgtctcaccatcttatgttcatgcaccaatgcttgtagtcacactccaaccccagtatggtgctcaagttcttgtccataagatttgagacttcgatggacctgtgtgtggatttctgggtttttgcagtaagtatggtgaacgatttggaaggatgtttccagctcgtctgaactttctatcagaagtggaatctgctggagccatgggagcattttccgtgtacaaacaacacttagtacctgcagaaatgtacagaaaataaaatggtttgcaactcttcatgtttttgccatgtacaaataggtcttacttgctgaaatgtagtaatacacaaaataaaatggttcggaattgttagtattccagtttttctctgccttatttttggatcatctactgcatatgttgtacattttagttgttgggaattgtttgtccggctgatcaggcatccccactatttgggctggtgaaatccatatatcttagtttttttagaactatatatctttagttaaaaccatttatccataagctccacctcatcctagtttccaagacaaatcaaaccaaaggatcttaagagttaatcaagcttttaaaagggaagggaagggaggatattacattcattcaagcatctaaataattagcacgaaccagcagcacataagcacatctaaagaattttccttcgaagtcagattcgattaaccacatctagatcacatcaaatcttccggacaatggtcttgtttggatcctccgggctaataattagccctctaaaatcttactatttagaattattaaacgtagagtactaacaaaacccattccataacctcttggctaatttacgagacgaatctaacgaggtatattaatccatgattaacggatgattactgtagcatcactgtagcaaatcatagattaatatacctcgttagattcgtcttgcaaattagcccgggggttatggaatgagttttctcattaatctacgtttaatactcctaaataacaagattacagagagcccggaggatccaaacaaggccaatgtcattctctctttgattgatctcctctcttacgaccggctccagatcacgggcacg

SEQ ID NO: 2767 - DNA, 1931 bp, Oryza sativa
ggtgcggtgcggtctacaacgcatgaaggctgctggccggggggggggggggagccggtgcagtggtccacgtgtcggcagaggtttaacagtggtggagcatcggatcgtcaaccatagactcgcaggtcgtgagcggcgggtgaaaacctagcctggccttagctgggccggcaacgacggcgctacgagcgtcctcccctcctaagggcgttgtcgagctgtttcaccttctctagtagaactgtcgggtaaaaacctagtcttggctctgtttgagaccttgacggatggcggcggcggcattttgtcgtttctctccctacagacgccatctaggcagtcctggctaaatcctcccagacttttggtgcaagatcgctctctagacacacatcctcttgtgtcagtgccctagcttatgcaagttggccacgtcggagggcctctctctcagtgccaaagaggtggctagagttggggtttggtgtcatttgttagggatagattcgggcgacctcggttgtagttcttttgttggcctagcggtggccggttcggtggtagccttctcctaggtttgtgtttggtgctgtcggtgcgtgggggggggtggaaattctttgtttttttcctggttacaacatcccagggttgtaatgttgtaattttttcctactctatcactatgaacttcgccctgtctggtgcgagtcgttcaaaaaaatattagcccggcttgttacgatgtatttttgttatttttttctagtccattggatactaatccaagggtatagaaaaatctgggtgattttaggtgaaaatccacccgaaaaatgcatagacagttcagccaaaacaaggcctgtttagttggtgaaatgaaaatttttgggtgtcacatcagatgtttgatcggatattagaaggggttttcggacacgaatgaaaaaactaatttcataacttgcctgaaaaccgcgagacgaatcgtttgagcctagtaatccgtcattagcacatatgggttactgtagcacttatgcctaatcatgacctaattagacttaaaagattcgtctcgtgatttacatacaaattatgcaattagtttttctttttatctatatttaatgatatatatatgtgtccaaagatttgatgtgatgtttttggaaactaaacggggcccaacccttcatgctaccatatgatctgatttttggatggctttaccaagatgaagggtgaaaatttctggtacttgaagtttaggaatgtcaattaaactcaacttaaagatgagggatgacaagtagacttaatcccatgggagcacctcgcatctggtcctcgctcgcagttatgtggcctaagggaaacacgttcactttgactcctttaacaagtcaccgaatatgcttcgtatcccagaaccataatatcagatatcttaaccttccaactattaaaatcggtgcaatttaactccctctatggttttggagggtggttttgttgacgtggtggtattgacctgtggcattgatatgtggcgttgatgtagaacgaagactaggtcaataccgctacgtagacgccacatcagtgaaaccactctccaaaaccatcgaggatgtcaaattatactggttttaatagttgaggggtcgatatatccggtattgtagtttagggatataaattatattcggtcactagataaggagtcaaagtgaacctatttcggcctggggcacgtgctgtgtcacggtagtgaactggtgggccaaagggcgacagacgcttgtggccgttgccgtcgtgggtttgggaaccgcgtgacgcggaacgagatggagcacgataattttttttatttatacattttttattaaaatatttgaaaaataatttttcattttgaa

SEQ ID NO: 2768 - DNA, 18501 bp, Oryza sativa
tttttttttaaaaaaattgccctttcagagaacgttaaaggacgtaaatgtaagtttttccatataaattattaactttatgattttgcaattttaaaatatatcatataaaatcggatgaaatcgaaatctatattaaaattgtagaaatcaatgatatatacaattttatagttgataacttttttatttaaagtcttttaggtgttcaaatattcgttacaaaatttataacctattttaacaaaacctcataactatatttcaaacgacatcggatgaagagaaactttatataaaagttgagatctacaaaactgtagtttattacttttccatctaaaataatttagagtgccaaataagcattactaatttttgtgcaattaaaactaacggaaatgatttgaatacgaataaaacatttacatttagatccgctaacactctctggaaggaagatttttaaaaatgccctcatgtaaagcgtgaggcgtctagatttataaattggcgtctagatttataaattttaaataaaaaatttaataaaaaataaaaataaaaaaatccgaagcgcgacgtttttcgcagccagatggactgcacgtcgtcgtcttgttcttttttttccctttcaaggtccgactgatgcagtattgaagctggttcaaccaccaacattttagaaagatcctaggcgaactccataacataggctctcaaaactaagtataaacttgtacttgtattatatacttatataaatcatatatcgttgaaaatgatatgaatacacattgtaaacacctaaagttacgatgtaaatttatcaacaagaacaaaacaaactcatagctcaatttccagactaaatagatgcaaatgagaagatcataagacctcactctaaaccctagccacaataaaataagatgtggccacatgagagtcagacgtgagaacacagccagccggtttaggcactaagcaatcacacaaccagctggtttgggcactaagcgatcacacagctagccggtttgggcactaagcgatcacacaaccagcctaaggccctaagacgatcctgccaacccgttcataaggatcagatcctacataaaaacaagagtaaactgcactcacgatacacgaacttacgtggtgggtgtaaatagatataataacttgtaaattattagatcctacataaaaacaagagtaaattgcactcacgatacacgaaattatgtggtgggtgtaaatagatacaataacttgtaaattatgtattttagtataacaacttgtctagtccgtgagaaccaggccaaaacaatccatgcattcaaaataatttgatgtggcgttgacacggatgccatgtcgctttccttcttggctcgtttcagttcatgtttgcatctttttgcacaaaagttataaaatcgtaagcatggaaattttgtttcgtgcactctattacactcacccatccctgaaatagttcaatgcaacatggacctaaatcgctgactagctacaagtgctcagagatattggtggagggtcgattggccattacactaccgttttaatacgtggcaattagtatgagatattgctaacaacttgtatgagatgaagctggcagctacacttctgtcgttgatcagtctgatcaccagccactctagttgtttcagtcttagaaactactactccacggggtattacaggatatgtgcttcttccactactgcaacctccatcttcttgccattacagcggcgtgcaactaattgtctcctcaaccgcatagttccggtgccacatcatgttattttcaaatacacggactattttggccttaatttatatggactacacgagttgttgtactgaaatacacattttgtaagttgttgtatctatttgcacccactatacaagttcatgtaccatgaatacaaatatacaatttactctaaaaacaaggataatctgttgcgtggttgtccccgatgttaaatcgactacgatctaacgccggggctcgctctgtcttcttctgtataaatcatgcttgtttacggtttacataatgccctgacatttacatctgctcgttatatcctgataatactagaagatccatgcagttttttgagtacatactcgatattatctgctatatgtcttgccttctagaaaatatttttcaggaacaattatgcactcgagtaggttgtggtcgagtacactctattatcaagaacattctcgacaaatgcggagttatcgcacccgacctaccaacgaagaccgacgacctatctcatagcaccgaccctggctggactactcgagaaaaggttgttaacggatagttcctcgcaaacgccgtcggtttgatcacccgacatgattgcgagcggacatccggatatgctataagttgggtgtgtgagtcatgctggccacatgatatgcacatgtaataaaccaactttagcacccctataggtgattaaaagactcctacttctggttctcgaaccagtaaaacgtagtgatctctctcgcctcacttttaagtggtcgagttacaactactgcttggtcctcgaccagcgatgcagcgtttctcccactacttccactttaagtggtcgagttacgactactgcctggtcctcgaccagtgatgtagtgtttcttccactactttcacttcaagtggtcgagttacgactactgcctggtccttgaccagcgatgtaacgtttctcccactacttccacttcaagtggtcgaattacgactactacctggtcctcgactagcaatatagcgtttctcccactatttccacttaagtggtcgagttacgactcgaccactgcctggtcctcgaccacgatatagcgtttctcccactacttccactttaagtggtcgagtcacgactactgtctggtcctcgaccagcgatgtagcgtttctcccactacttccacttcaagtggtcaagttacgactactgcctggtcctcgaccagcgatgtagcgattctctcattacccctgcttcaacaaagttgatatcaggtgcacaagatcgccaagtgttttacccagagatcccttacccagatgactcctagcgttgaaacctatcctactgtccctttacgccgtcttgacaaggcctccgaggaacccgagagaacttcggctggggacgcccagagccgataaggccttgtcggatccttcagagatgaaagaccatgtaagatctggtcatgtaagagttctcgccgtgcgtattaaccaagccgtataatcggaaatggattttccaacttcacggctgggggctaggatcagtgcttgttcaatcgaggcaggtcaaaggtccaagagccttatcttctgagaacgattctccgacgacaaggctgggagctagggagagtgtatgactctacaaactgactgatcggagtcggtaagagagaggacgctcatatacaaagcaatggtctgtacattcaattcactagtctgtcatattataacatgtcaccctttgagcattcgctcgggggctatttctatctaatattttttatgagtattgatttcaggaaaattctatttgacattatcgaagactccatgtctctatggttctgcaccaagattgactaaggcgagtacgacaaatgtcgacaaggctccgttgcagactctacgctttctcgatcactcgagaacggttgctggatcttgacaaggaatacggaatgaagagatggtgtacccgccgagataaaatttcttgacttcaatccaaattctcaattacagcaagacaggagacttagtcgacgctctgtactttctcggttgacatcagagattgacttagacaaaccctttcggtgcccacacgaggctgataaaggaagtctaacgttatctctaaactcaccgagaacggtcacgtgagctcgataacagttcctccaaagtctgcggttgagaatatgaactcgttcatttgcatcgaagtcgggggctactgtcagggttatggataccacatacctaatagtagttgactaaatctcggcaggatccaccacataccatgttttatatggaaactgacctcgagggagttccggataaggaaagacaaccagagttctacatggaaacgacaaggactactcggattgcatccatattggtttccctagttctacttggacaaggggacacctatgggtataaatacagggccccctgggaggagaggggacaacaatcatgggacaagacaatcaacacctaacgggatcaacacccaacacaatcaacatagaagcctatatacaccaagacacgccgccggatatcgacttcagggataagcaaggctaataccctacggtgcctccggatactgtcaggagaaacgaaagcgctatctctgatctcgccggacacggattcgaggaggaaggctaccctgttgtcgactacgagtcaaatcgtcagaccgccatgtcgacaacagttagattggctaccccaaatattgtactcgtgtgattatggtgaataagagcaataccggcctcggccaacaggatgtagagttattacctgacaattcaggggcccgaacttgtataaaaatcactgtctccatctcttttacctcagtcttgcgtatatcctaacaccgacgatccccataccatgcaaataccaaaattgcgacatcaaacgtcgatagctataagtcagctgcaaacatattttaagataaatgaggagagagaaaagcagcgggctacagatttgtatccagctgtagcacagactctaagacacagcgtgtgtatgacaggtgggaccatgtattaatagtgtagtatataactattgtataaataagctattagattagctatagataaattggagctagtagttgactatattattaaacttgctcttatggcagctgtattaccttcgtctgacttccggctcacggatctgtccatatctggagccgcctctgctgtaaagatactcagataactcgccgaatccacgagcagaagcgccggcggaacgagctgaacaacatattgccgcctcaccagtcactagctcctattgtgaacgccatgccctttcttccgctcgagctgaagtcccaatccgaggagaaaaaaaaaacaaattaatttttagagatgcaggcaaagatggaacccgggcaatcacctcaatgaatgcgctgaaaaatccttcatccaacgcttaaaaacagggccagtatgggtggaggagctacatgtgttcacaaagaaactattgccaacgttctaaaatacttatcactttgagtttttattagtaactagctgggtggcccgcgcaattgcacggctagcatctatataaaattatatattttttaagtatgattttacttaaaatttattaaatagttatctcgttgttttaagattttgaaaaaccaaaccttatcatcgtcgtgtttctaattttgtagtttttaaaagacacatcagttgctaccccttacttatgtcatattattttttattagcttgctcgatctaccgctgtttctatttattctccttggaacttttaaaaattggatctaaaaactattagagttcattgtcctgttgggcttatttttaataatttctagaagtctcgtcaaacgctgctattatattcctctacaactgtccactgcatcttctctttattatcattgctattttaaaaattgaacataagtatcatttaggttctttttttactttctagaagttccgccaaaatatcaactcctttgtcactgtactcctctacggctcgcccgctgtcgcccttctttattgtcattgagattttaaaatcaaacatgattatcattggggattttttttactttttagaagcccgtacatttgaaaattgaaccttatagtttttagagttttgttgtctcgttgggttttatgttttttataatttttagaaatcctatcaaacactaccatatactcctctacgacccgtccgccgcataatctttattgtcattgggattgtaaaaatcgaacataactatcgttggaattcattttttactttctataagaccgaccaaccatcaacggctctaccattgcactcttatacgacccgtccgttgcctcttatttttattgtaattgagattttaaaaatcaaatataattatcatagaagtttatttttttactttctagaagtccccgccaaccgccttgactgattacttcacgacctgcccgtcatatttccttttaatcatcaataggattctatttggtgttttattagtagtttttagatgtctcatcaaccgccaccactctgctcctctataagcatattacttaattaatctcatcatgtgttttagatggtcttttcttttaatagtcttatttttttatcaccaatttcagttatttataaattgtattcctagttgaaatcttttttttcctaatttcagaatttattttatttattattatgttattttgatttttgattttttattttcaattcagttgtttcaaaattatattcctattttttattccgaatattatttaatctactattgggttcttatatgtacttttatttcaatattgcttaaatttaattcctaatttaagttaattttaaattgtattcctacgtgaactcttattttcttttattttttctaattttgattttttatttttttattatgaattttaattaatcttgtattggattcttatatggactcttctttcaatattttttatttttaattccgaattttaattatttataaattttattcgtactccaactcttcttttttctttttctaattttgaaatttattttattattatttcgaattttaattaatttctatatggactcctctttccatattacatatttttaattccgaatttcagctatttttagattgtatttctacttgaagtcttcttttctttttctccgattaatgtgggaatttttagcccctaaacgaacgtggtgcctccttttaaagctgttttaataatataatagatgtttcatcattagttttattcagaaaactataaaattattatttattttctttgtggcttattattattaaaattactttaagtataatttgttttatatactccctccgtttttaatagatgacaccattgattttttctcacatgtttgaccattcgtcttattcaaaaattctatacaaatgtgtaagatataaatcacacttaaagtactatgagtgataaaacaactcataataaaataaattataattacgtaaattttttaaataagacgaatggtcaaacgcgtgagaaaaagtcaactgcgacatatattaaaaaacggaggtagtatttgtactaatttttataagatgaatggtgatacttcctccatactcataaagaaagttattttggacagcgacacggtctccaaaatataattttgacttcttgtttctataaaaaaatatatttattgaaaagtgatatatgtattgaaaagtttatatattttttttatactagagggagtacgataaaaaaaaagcgataactaatttatgaggaggtagttcaatccaactttttgaagaatttaatccgagagagtcagcggcagcctgcagcagctagagcagagcgatggccgcgcttctgggcatcctcctcgtggccttcctcgccgccgccgtccctttcgcgctccgcctgctccactccttcctgtgggtcccgcgccgcctggagcgccggttccgccggcagggcatccggggcccgccgcgccgcccgctctccggcaacgccgccggctaccgcgacctgctcgccgccgcccagtccgcgccgctcgcgtccttccatcacgccgtcgtggcccgcgtcgcgccgcactaccgcgagtggcccgagcggtacggccgcccgttcgtgttctggctcgggccccgcccgcggctggtggtctccgacccggaggtcgtgaaggccgtgctgaccgaccccacggggaccttcgataaggctggctccggcggcggcaacccgctcgcccggcagctttttggcgagggtttggtggggctcaccggggagaagtgggcgcgccaccgtcgcgtgatcgcgccggcgttcaacatggagaggatcaaggtaaagaggcgttttcttgaaaatgaccttagaaacatgaaaatggatgattatcgtgcttgtagatcatgttgggtacttcccgctctcaaaacaaacgacttgaaattattgtaactctaaaacatatgtatgtaagccttgctaaaatgttcattatttcagttcttagatgtaagttgtgtcacatgtgaaatcagggagtcagggactcctaggctttgtgtctgttacttcttttctactgacgttgatttaaaattttatttacacatctacaatggaatgggattcagactttcttatataacaatacgatgtgtattggttgatttttgaaaaattaacctttttatgcatcttttgtaagacataaattgtaagactctcggagtaagttcatcaccttcctgtagactatattcatggtgaattaacctttctttctgttagtaataatatatatatgatgatgtgatcaaaagttgtgctctggatatttctactaatcaaatgaattgccaataagaccaaagttttgttcctttcagggttggatttcagaaataacagctatcacctcatccatgctggataaatgggaagttcaagatgaagcacgcgctgagtttgagatcgatgtacataaagaatttcacactttgattgcagatgtcatttccagtgtggcatttggaagtagctatgaggaaggaaagcgcgttttcgaattgcaggaggaacagctaaaacttgcaattcttgcaatgacgacagtctatattcctggcttcaggtgaggttgcctctgcctcttagcttgcttggaacccataattttcaaatgccacagttaagggagaaaattgtgacgtctttctctcataggtttgtgccaacaaagaagaaccgacgacggcatatgctaaaccaggaagtcaggaattccttgcgcaaattgattgagatcaatggaaggaagtgtgaggattcgaacaatctgcttgggatgatgttatcggccagtaaacttggtagtgaattcagaatgggaattgaagaaataattgatgagtgcaagacattttactttaccgggaaagaaacaacagctaacttattgacatgggcaactcttctcctagctttacatcaagagtggcaaaacaaagctcgcgatgaagtccttcaagcttgtggcaagtctgagcacccaaacgcggaaaacctgagtaatctcaaaattgtgagtccaagttttgtatactttggttttcatctcttttataattttattgaatacaggcatacagcaagtgacacttttttaatgtttgaatgcaatcaggtaaatatggtgctaaaagaaaccctcaggttgtatcctcctgctatgtttctcaataggatggtcaacagggatgtcaagctgggcaaactcgacattccagctggcacgcagctccattttcccattcttgacattcaccatgatgttaacatatggggcaccaatgcagatgagtttgatccatcaaggtttgcagagggcaagagctatcaccttggtgcatactttccctttgggattggccctactatctgtgtcggccagaatcttacgatggttgaagaaaaggtggcccttgcaatgatccttcagcgtttcgcgcttgttgtctcgcgtcctatgttcatgcgccaatgcatggagtcacactccaaccccagtacggtgctcaagttcttgcccataagatttgagacttcgatggatttgtgtgtggatttctgggtctttgcagtaaatatggtgaatgcagcagacgtacatcgtgtattatatatctttgtgaacaattttggaaggatgtttccagctcgtctgaactttctatcaaaagtggaatttgctggagccatgggagcattttccatgtacaaacaactcttaatacctgcagaaatgtacagaaaataaaatggtttgcgattgtaaatattccagttctctcctttttatttttggatatccactgcatttgttgacatatttagtttacccgtttgataaggcacccatttttgctggtgaaatctatatatcttaaaaccatttgtgcatgagctccatctcatcctagcttaaaggatacagcacctctggtttacgcgatggcaaaaaagaagagtgcaaacctgcagcaagcatcgcattccgaccaatgattggcggaccttgacttgcctgctgtctcagggtggacgacggatctaattagccaactcgtcgacgtctggggtgttgttcatagcttacaattaatggagaacaaagaagacaagatcacatggaagctaaccagccacgacgaatacacggcgagatcggcttacaaagcgcaacttcttggcacaacaacgtccaatttcaatgccatcatctggaagtcctgggggccgcgcaaatgtaaaacttttgcttggctcgtcatccaaaatagaatttagacctccgacagattagcgatccgtgggtggccgaataactccatttgcctcctatgtcgaaggaatccagaaacaaccctccacctcctggcgggatgcagatatgtgagaagagtttgggcggcacttgcggactggacgctatgtgaacagataaaatcaacacagtggcatcaagcctcaacactcttcgagtggtgggaggtcaccgcatgctcaaatgaagcaccaaagaaccccctatgccgaaggaatccggaaacaacccttcacctcctggcgggatgcagatatgtgagaatagtttgggcggcacttgcggactggacggcatgtgaatagataaaaccaacacaatggcatcaagcctcaacactctccgagtggtgggaggtcaccacatgctcaaatgaagcgccaaagaagaccttgcattcgctaatgctgctagttgcctaggagatttggaatgaaaggaaccgcaaagtcttcccgcatcaggagctcccggcgaacagtctagtagccaaaattaaggagaagaccagaacatgggtcttggcagatggcttgcattctaggccgtgtttagttgcaaagtttgaaccccaaaaagtcacatcgaacttttctacacacataaacttccaacttttacgtcacatcgttccaattttcttcaaactttcaattttggcgtggaactaaacacacccctagctttttcgggccaaaggccttgaatctgtattttttttcttttgcgcttgcgcatgtacagttttacttcttctctatttaatgaaattggcagctcgccggttcgttcaaaaaaaattctcatcctagcttccaacacaaatcaaaccaaaggatcttaagacttaaccgagcttttaaaagggaagggaggatattacattcattcaagcatctaattaattagcacgaaccagcagcacacgagcacatctaaagaattttcctttgaagtcaagattcgattaacaacatctagatcacatcaaatcttcccgacaatgccattctctccctctccgacgaccggctccagatcacgggcacgcgccctcgcttcgcgccaagctttgcccttacaaaaacggcagggaaggcaggcggatcgaagcagaggtatgtacgtgcgcgggccatggccttgacggcgccattggagagggagggagagctagaggacgagatgaatcgatggaagagtcgtagagagacagccgcacatgctaatccccttcttgctgaatgcgtcgcgcgatcgcttcttgctcgaatggtgttcttttggctcctcgtcgtcgatcagtggaggcccagcaggcgccggagctcccgcgtcgccgagtcgtccacccctgccgccgccgcagcggcagccctagaggacgacgaggaggaggagaaccgcggcaacggaagcgcccgcggcgacggcgacatggacccgaacgccggccccgcgtacgcgtccgcgcccgcgcccgccgccgccaccttgacccggaccacccgcgtcacggctggcgccgcctgcccgccccgcggccgcgcgtcgcgccgccgggccgcctgctggcgcggagaccgcctggtggcgtggggacgggcgcggacgcggtcgaggcagtcgtgcaggcggagcacctccgtccccatggcgcgcgcgacgcgatcgcgagctcgcttgggtttgggttgggtcgtagcctacgaagcggttaaacggtggtggaggaggagggtggggttgggtgaagcgtggtggcttccaccctctctcccggcggcgtccccgcgcgctgatcggtcgcttcctctacgatcgcctggtttccacggcgtgcaacggtggcccccgcttttaagtcaccccccgctttcttcccgcacaaggcggccgccctacccccgaacggacgaaggcgcgggcgtcgtggaggcagccatgggaagaaaataaacgcggttgcgtcggacgcggggagatcatgcccggctgcccgcgtctcgtcgcaggtcgcaactcccgtgcgcgtgcgggccgcgagcgcgaggtccagactgttcggcgcgaaccgggccgtgtttcactgtttcccaatgtctgtgaagttcaatttaagtctctaaatttcatatctagtttaaattgtgtcgttgagaatcgaaatactactagatatacctcgtccgtaaacttgcaaaaccggtgtactcgacgccctaagctgtatagtgctcggttctagtcaacgtggcgagttgactacggtcaaccatgctaagctagcatgggatccacatgggggcatgttagtagccagctcttcttcctcctctttccccccttccttctaggctgggaggctggcggtggccgagaggagaatggcagcggtcgcgacgccctggaaggatggcggacgacagggagaggggcggtggctgcggcggactagaaaggctcaagcttgaactggagccatgcctaccctcgcggagctcatcggcaagccgcatcatctttctctccttgtcgagctcctcctacgcaatcttagcctcccgtatcatcttcaccgcctcgccacccctgccatccatgccgccggtggcaacgaggccgctcctcacaagctcgtcggacagttgctgcgaccctactagtccgccatgaccgttgcccctctcctcgtggggttaggtcacttaggagtatgtctctctccctgtccggcttgcagcatacacgtatccgcgctttgctcgcctgcgtgcactcgccaagcgatgactcgccctccctcgttgaggccacgggtgctaaagcatatggtgacgccttcttcgcacacctatgtcaccaccattttcgtctccacctcaccactaagcacatccacctctgttggttgcatcgacgtcgcttccctagctcccgtctctagtccggatcctattcctccttggagaccgaagctaccgcaaccattgctcggtggttagcgagcgtggagctgtcctccccactttcgcgtcctcgttcgccaccacagccatacttcgcatggtgatgtcttctccttcactcaccgctaaactcagtgcaaccgtttctaccctagccccggccgccgctctcatagaggtgaaagttcatttacatgtaggtcccacatgttttatgttttttatttttcttttactgattagcatgccacgtaaatcaaaacaacaatccatagtgttttaagtatttttatttaatacgtgagatggagtacaaaaacgagagatgcaaagtgaacttgctaaaacacattttctggttgattacagtcgcttgttgagccattggatcggtcataggattcgtgctagcatacttaattacgcgtaactagttgtgctttataggttacaggtcgctaattagcggtctactggagaactttgctactatttttttcttcactgcatgcactcgatcaagtatgagtatttgtaccgaccagcgaaacacatatgtaattaaagtataaatatgtaattagtatatattagtagtatatttagacagtagttacaccctacatacacaccacttacatatataattagtatgtaattttgtaacttacatatgtaattttagtacttacatatgtaattttgagacttacattgtaaatacactaaaattacatatgtaatttagtaacctacaatgtaaatacatgccgactaacttttgatgaaaaatatggtgttataaatatagctactcccgaactttattccttctctgtgagatatcagtggaaacgctcggtggaatcgggggagtatttgggagcacgcgccgacgcgcgcgtcgtgcgtgccgtcgtctttgtcgcggtggagcggagcgcgcccacttgcgcgcctgggccggaggcgggcgcgccgggggttcgggaatcccctggagccacacgtaaaggcgcgggcgggagggagggaggggccagctaggataaggcacgcgcggccgctgcgattggggcgcttgtgaacaccggggcgccacgtggagaggacgttacactccagccgccaaatttccactcccacacccgcgctcccctcccctctcttttccgtgatcgcacctcgcccacgcgccccccgccacacacaatctctgcagctctccagcttcgttggaactcgcgaatctctctccgatcccaggtaaagcagcgaacgacgtcacgcacgacgctgctcggtggatttcgttccttgctggggaaaaccatgcagagacgaaggtgaatgatctgcttttgtgtacttgcgtttaccaggtgaagcgcgagcttggagttggaggggagatcgatcagggccaggatgccgtcggtttcgagggccgtgtgcgtgcagagggcgagcgggaataacggcaggaggtgcagagatggggcggccgccgccggccgccgatccgtcgtggcgcagagagcgcggcacggcaagccggaggtcgccatccgctcggggtccggcggctcggcgcggggcgggcattgctcgcctctcagggcagtggcggcgccgatcccgactaccaaaaaggtaaaccgtgcatgccgcagctcctcgttcgttcgttggctcgcgcgcgcgattgctgtgtttgacacaccgttgactctcgatcgtgcgagcatctatcactcactggttcgactcgcatgcgtattgacgtataggagctcggaacacaccatcgtatagctcacgaggtagcactgtagcggggatatgcgtggttggccagcccattgagccacataaggcccatttttttctacacacttgaattcaatccggccctatggttggcactgtctctcatttatttatttactcctttatttagaggatgcgcagatgcatgcgttcaacatcttttagggacggagtacatatttagattcacacgtgtgatattggaagtgcgggcttgtgtgacgctgtatccttgcactataaaaaaacatctctgctactagtaggtcataaccggcatcattgttggtttttaaactggcagtgtgctaccgacaatgatacgattggtttagggtgtgaaccaatagtgatatatggagcataactgttaattctacttacaaacaaacatacagtgattttgaacgctccaaaaatatatatgcaatgccaatagatttgttgatttgcattcaccgatccaacaaacaacttcatttcattcatcaatctaacaatcaaaagtttgtaacaaattcacttcatttcaccaatccaacaatgtggtttcattgattgatcaacaatagaataaagtgtaactttggtgtgatgaacaacagctagcagaacaatttctttccagaaaatttttattgcatcatgcagcttctaaaaatagataaaagattgctcatgcatctcttctcctcatcaccttcaaagatgtagaaggtagcagaggagcacatcggttgataataatgtagatggcactgttagttgatgttgttgagcttgtgtccctgttggcaaatcaagtaagcacaacccccctcccccccaccctccataggatttggtccaagcttgggatgaccagatataattccacatagcctcatctctatcgcatgttgttgttaaacataccatgcgacgtccgcctccattgctttgtaggtatttgccgcgttggacagggaccgatgtcatcgagatccactcttaatcctgagagtatgaaggcatggaagggggcctccaccaccacctgcctaacgagattgaggtggtggcctatgggctagatccccctccccccttccaagcagcaagctcgtggcatgctatccgatcaaaggggagcaaggcggtggccccttgttcggagagtaaggaagtgacggcacatcagttggagggtagagagacggcacactgtgcatgaggagagagggagggaaaataccaacagtggtactatcattatcaatttatatcctaaattatttgtaaaaagagtacaactacatgttctaaatgagataaacctgcagatattggaaatgatgcatttaggtccacatgatgtgatgatagttgttctttgttcagtttggttagcatacagatagatatcgacaatatttttttaaagataatgaaagctacagccaattatacatacagaagttgctagtcaaatcaccgcaaattacaagatcacagcttgacaaaaacaagaaagcaacttagaatatcaacctaaggacatacacataaaacacctattgctaaaattcatttatgattaacaagaatctgtataaccaagggtagagatgggagaagactgctagggctgcaaccctactcttaagtctaaatatccattagaattgcactataaaattaaaaaaaaaatgggacaaagttatgtaaattatattagctgagccctaagcttagaagaattctggttctaccatagcataaccatttgttttggctaccaatgactgtttataaagattatcatcgattagggaaaaaggaaacaaaagtatgcaaataaatgataataaatcaactctctagttgagtagctaggctcataggtgcaaactgctgaaagcttaatcattccatcatttggaatcttgggggtaagacaaactgtaatgactctatctatatagagctagtgactcccaatcaatttggtaggctttctagttaccttagatatttctactttttatcatgcacttcacagaggcatctcagattctggattgccaagcccatggtttcaccaaaaccagaaaaacagatacagttatatgcaaagattttttttttcatcagtcccagactcccagtacatcaagaatgtgaacggaatcgagcctggaatccatggtgagacagggaccgaattcatcttagcaatctagcaacttgattaagcatttaagccggtaagctcgaccattaggcaagtggacaaggttgtgatcacgcaagtaaataaaaactataggatttaagtacttttcgccgcggctaaatccaagtgatcacgggccctttgacagcaatctagccaattagcacggaggtgtatcaacacatgcatgaatggaatatatttctccctggtgcagagaggttcatttcacttggcatcatcacggacctaagcaaacattaggggcatatgctacgaaattcttgtctgtccatcaaatgtttggtagcaataatattcccatgttcactcgtgcatattgctaattttgttgttttgttgacgtttaactcaaatcatggtttctataagttacttcatggtattttgaggaactaccaaatcatggtgaatcatatatgatcgaactaccaaatcggccgacagtgcaatatacatggttctgttctctggttttgcccctagttcagcccatttctagttagggcataaggtgttttcttttaaaagaactaggtgattctccg

SEQ ID NO: 2769 - DNA, 678 bp, Oryza sativa
tcctgcagcccagaagcattaaaaaaaaaggaggccatacggcggcatgctgttgcctgttggtgcactgcataatcccagtttcctcgcctgttcagtgtccccggcccggaaagacggagcctcgcgccgcccagatccacacacatatgcctctgctgctgccttgcgaggcgcgatcaagcctagccacacgccgaggcgactcgacgcgaggcctcatccgggaggaacacgtacgggtccgcatccccttccgcgcgctcgcgctgcacagcacagcgcgtgcgccgagagcgacgagggaggaagccctccccacctcaccaccacacaaaacccgcgctaatccccccgtggcggatagcggataaccagaagaaagacaggaggactcgaggagaggagagcgtgcgcgggctgcgatgatggagggggaagtggtggaggaggaggaggaggaggaggtgacggcggcaccagcgccggcggcgatggtggcggcggcggagttcgggctgaccgcggaggtgatggcggtgctgccggaggacccgttcgagcagctggacgtggcgcggaagatcacctccatcgcgctggcgtcgcgcctcgggcggctcgaggccgagggcgcgcggctccgcgcgcagctcgccgagcgcgacgccgcggcgg

SEQ ID NO: 2770 - DNA, 7672 bp, Oryza sativa
taatacgctatgacgacaatgcagcggttatcattgatcaaaaaggaaatccaaaaggaactcgcgtttttggcacgatcgtcgaggaattgagagaattgaattttactaaactagtttcattagctcctgaagtattataaatactagtagacaagatatagatcaaataaaaattagtagattgtgtttcacgtatatgctttagaatccaaaacgaaaagaaaaaagagaacatgttgattatagaaaaattaggaggaacctagaattagagtcttatgggcaaggacactattgttgatttactaacctctataagaaacacagacatgaataaaaaaggaactattcgggtagtatctacaaatattaccgaaaacattgttaaaatacttctacgagagggttttattgaaagtgttcggaaacatcaggaaagtaatagatatttcttggtttcaactttgcgacatcaaaagagaaagactagaaagggaatatatagaactagaacctttttaaagcgtatcagccgacctggcttatgaatttatgccaactatcaaggaattcctaaggttttggctggaatgggaattgctattctttctacttctcgaggtataatgacagatcgagaagctcgactaaacaaaattggaggagaagtcttatgttatatatggtaatcgccccacctatagttatagtacccaaattctatcttgaacttcctatttttcaaacaaaaatacaacatttttttatttgaaaataaaaaaagaaaaataggagaaaaaaatatgacagaaaagaaaaataggagagaaaaaaaaaccccgagagaagcaaaaattactttcgagggtttagttatggaagccctacccaacggaatgttccgcgttcgcctagagaatgacaccatcatcctgggctatatttcaggaaagatccggtctagttctatgcgaatactgatgggggatagagtcaaaattgaagtaagtcgttatgattcaagcaaggggcgtataatttatagacttccccataaggattcgaagcgtaccgaagactcgaaggataccgaagatttgaaggataccaaagatttaaatggttaggtttttcttttttttttcagggtaaaaaattcaaagttctaaaattcaaacaaagagacttattttttccaaaagagtaaattcatagtttaagaaaggaatactccctatacatttgtcgacaaattttctttttgacaaattttctttttgacagatgtaattataatacaaccgtagtgtagttatactgtaactcatatgtaattacactgtaacttgcatgtaactacagtgtaacttatatgtaagtttcacgtaattttgaatcgttagatctattataagatttgttctggtgaggaagaaaaaaaatcacatcatacacatatgtgaaagaatttgttctcacaacctccattttaccgaaataaatgttatggagagatttttaaaagttacatacatgttacattataattacagtgtaattacatgcaagttacagtgtaattacactacgattgtactataattacatctgttaaatttttggtggaaaatttgtcgacaaatatatagcaaattcagttgcgaattgtagccccaagaacgaagcagatgcaattggcaaccgtttcatgccagcgcgcagacatatatgatctactgggaaaccataacaggttgagagatgcccagttcctagtcaacactaatgttgacaatttaaggtacatctacatagcaagcttctttacactccatggatgtacacgaaactaaatctaggaaaaattcatcgcatgtagcgtgccctccaaaattcacttaggcaaaatttgcagttcaaatgctccttcgttcaggaaattgttcactctgaccgttgcagccatccaagctgtgtagaaatgaatcttgttaaacatttgacaacaaaactggctgaatattgaaggagcagacaacatttgacatgaggaaataccttccaagcatacatcacaaagaatgcaaccgtatctgctgaccagacaacagcgaaggatttcacgaagaacgggataatgacgttgattagagggaccagtagaaacaagtagttgagagcctctttctccttacttgagcagtcacgggcccgaagagaaggtatagctgcagaagtaggtagttgatcagttacagcatcacagaaaatgtatctaattcattgcatccattgaatcttattaacctcaacagcgacacagcatctagagatcaaattatgttcattttatcgacagcctcagattaataattaatattgagagacagattcactgttaattactacttgatatgacaacctcaaggatttttgttaaaggttggcaaagagaaggatatttcatcatgtttttccagtcagcatatatgcatatatagaacagctaaacagacaccgtgctagaaagaaaataaattctcagttgctcttagaactattctttatctagaactggatgaactgcactataaagtttatggctagtgaagcacgaattaaccccttgtgccagttgattcaaaatgttgtagcacaagagcactttcaatacatttttagccattgctgcttacgaaaaaagagcaagggcttggttgatgcatggatagatcataatccttgctgctgatgggaacaatttacaaacgtataaacttactgcacaacgacaagtaccacaaatcaaattcttacttactgaacatccagatggaccacattcccatcagcctccaaatgtccggctcattcgacgggaacacgagattgaaggaaagggctccacccaacagcatggaggcatatccctggacctcaaagatagtgtacagagctgttccaggcactgcagggttctttgtggcagtggacgcccttggtgcaaacgttgctgcggtcttctgaactgcctgctcaagaacacagcatagttatttggtggtgacctcatgaagtcatgttgtttgctgtatcagcaaaaatctttagcatttctaccctttaaaataacattttgagtttctttgtgcatatgggcctacgaccaaaaactagatgtatgctaagagcaggtacaataccaggctataagccagctatacacatattttaaagagataaaagaggagagataagagtagcaggctacagatttgtagccagttacaatacggactccaagatacatatgtatatgacaggtgggactaaacattaatgatgtagtacatataggtaactattgtatgaattggctattaaattgactatatataatttggagccgatagttggctatactattaaacttgctctaaagttaaatcacctattagaagactacaacatttctgatggctcaaattagtttcttcctgcaattcattgtactaggtttctatcgaattgtgaagttttcaagtgtttcgaattcttacagttgcctagtattatttgcaacaacttatgaattatatcgaacaagctgaatgggaaactgttttaaacactcgggtggacgtccacccgagagattagataccatctcctgagctgaatgcttagttcttagaccaagggacaaagaaaagagccgaccttcttgagctccttctcaatcttgggatcaacaggagccggcttcttctccgccgacgactcagcggaagaacctccgccactggccacctccccttctttgctctctcccacagcggaagcctcggccgccactgcaccagcggcggcaccaccaccgtccgagccatccgagctcgcccacgcaagaaccagcctcgccggcctcctcctcctcctccccgcgaatatcccgccggggacggtggccggcgggaacgcggagctggccgcggccgcgaacgcgcagccgctgccgagagggctgtacattgttcgcgcgaggtttttcttgtggggagggagaggagagatggtggaagagatggggaatggagggtcgtcgtccgtcctcccgccttcggtttgtgccgacgtggccgcggctgcagcttccgtgtttcgcagagaagcgtggacgttggttggtcgcttcctatagcagatagtatctcagccgtccaatttatttagcggctcccttcttgtctcattaccgttagcacattttacgaactattaagctatatgttttgttttgtgtgaaaaaattctatataaaagttactttaaaatatcaaatatatatatttgttaagtttataataattaaaacttaattaatcatgtgcatgtaatgagaaagtttttgtacaaattaatttagctattagcacatgattatttaagttttaattattacaacattaacaaatggataaatttgatagtttaaatcaacttacatagaaaattttcgtatgaaacacaccatctagtagtttgaaaaacatgctatcgaaatcgagataaaatatgaatcttaatgagaaaataacatgtgaaaatatatcctctcttatgtccgcctctctcatattgtcatacatgagaacactctcattcaagttgtcacccttgtaagcttgttccacaaggaccacactctggttcaatttccgcttattctctcttcccccgcgcctctccttccctattctggacaaggcaacgctccatctatatatattgtccctatcgaccgcctctacattggcggcgcttcggattaatcccattctatcacacccagaaatttagcccaaatttctagactattttgtgtattaaatccctatccaggaccagccagggtacacaaaacgacaagtaataaacagttccaaacgtaaataaagcgtaaaatacttacaggagaggcacttagtcctcacaccgaaacaaaagcaacggcagcagaaaagacgatcctagcggggcttcagctccactccacaggcaaaactcaactggggtctgagtcttggtcctctaacttcgtcttcagctcagaagcactacacttctgaaaagggggaataatagcaaaggctgagtacaaccaccgtactcagcaagccacaccaatgatgcaaacgtgcaaggggaacacaaggacggtttgtggctatttgcataaaggcggttgtaaaacattttattgagcaaaaccgtaaaactattgagtaattaaagtaacattaaatcttcactgatcaacactacaccacgttgaacaggcccaaccaacccatctgaactacagtgcattgagtcgatttattaaggtgggactaatcacggtgaatctggtcgactgcccataaccgcaggcacggctactcgaatagttttactctgatcagaggtgtacaactgtacctacaagatacagccccacgacacgtttccgtgcgccgacatgccaccacgacataccggaaagaggtcgtgacaggacccttcacataaccccctctaaccaagcacaccacacctcaggtttcacccccactcctcgcaagatagcgggcagtcccctctcgtgcctaggtgaatccggaagccgcataggccgtcgcaggacccatccaaactccatcacgcccacccttgcctggatgcgtcagctagaggaaagctacactacaagcccagccgttgcccacgctggcttatggtaagcatgataaattcttccagggtttcccgcgaaccggtccttaatcgccatgggcacgactagcaaaaccatgcacccacagcccaccatgtagtcgcattttagttggataattacgaccatgaagtatggctagatgtcttgagcacgcagctcattctgatactaaaaagatctaatactgtaattatcccatcaactgagctagtggtaattaagcatgactaagtatatagttctagctaggtcacataagtaacatgagctagtctatttattacccaaggttgacaaatgacagatatcaagtaaatatggcacaagcaaacagataggtaatacccggatcccatgtaattagcaagacatgcaattttatttgcaaacaataaaacatttgtaaattaggatcaaaatgttcaaggggaatgtgtgacttgccttgcttcttcacttggatcttctgaactcttttcctcgtgaccgcgatcttccgaaacgacggattctacacgctggcacacaaaacgaggaaaaaatctaataaaaaccaaggaaacagtacataaaaagtaaacaaacatgtagatctcaattttagatgaattttgtaagttgaatggcccaatttggagttcgaatgaattagatatgaattttagaagttttgagccatttaaatgaatttctataattaataccaatttattgcacaattattaaatatttttccaaaggaaatgataagcgctaacgtcagcaagaggaagggcgccgacaggtgggccccacacgtcagcgggtcaaagggggtggctcatggtggactcggtccaccgcagcacaggcgcgcgggcacaccacgtggaagaccacgtggcggccacgacggcacggcggggcgaggtggcaaaggcatggcgccgaggtggcgccacatgggacaccggcgcggggcggcgccagagccacgtagacggcccggatcaccccaaaggggatcgggcggccacagctagcgggagcggcaaaactcgccggccgaccggccggggagcgacggcgagcagcccagaggtcgccggcgacgaccaccggcgcgacggcacgcgcgggaggcagcggagggaggcagaggagggagatggggagctcaccgagcgcacaaggcacggaggcggcgcgggagagcgaccgacgacgaggagaggcgacgacgcttcctcggggaggcacggctacggcggttcaatggcagtccgcgagcgaggagtggcggatgacgaccggaagagcctgaggaggacgaaggggagattagaagagggagaggacgggcttggcgaagggcaacagtggccaaaggccgaccgtgagtagaggagctcaccttgcgcggggaagatggggttcgagcgacgattgatggaggcggaggggtggccgggctgcgggcgacggccgcggtgccggggaggacacaagcgcagcatggggtggaccggagaggtggcgcgacgcggccggaggcagcaaaagcggtgccagcctcgggcttgcggtggaggtgatgattcggcggtggatcgaaggagcggtatggtggccgggcttgcccgcgcgacggcgaagctagcggtggcggcgacgcggcgcggtgacggctagagcggcgagaggcggcggctggaggcggtacaggcggcggtggctcggcctcgcggtgggacggcgtttcgggggtggaagagggaagggaaatggatgccggggtgaagcgtggggcggcgatgccgatggtggtgacggcgcagtgcggcgatggcgagagcggcggctagaggaggccggagctcgccggagagtggcgacggctcggttttgcgt

SEQ ID NO: 2771 - DNA, 22780 bp, Oryza sativa
atttgggccgagcccgaaagggaggaaggggaagattattttcttttctttttatttaaattgattaaatgaactttgtattattataattatttcttgagctccgaaaattcgcggaaaaatccggagagtattttagggcacaaagaatattacaaaatattctcggccaatgatttttaaaggaaaatttcaaattctcccattatttcacttgattgaattgacttaacttttatttaatttctagaaaatgcattatttaatgatttttaatcccgaacgaaaatcggggcgttacacattcccttcatcccttccttaataacccatccgttgttctccatgttgatagcgcaacgacccaattcccttttctctttctctctctctccctacgttcttccatgatatgttgtatcgtggtgattagatcaacaaaactaaccatatatgtaccagcaatgatatatgtgggtatcaactccgatacttatggaacaatactctaatagtaccacacattatacttgtaagggcagtaacagtgcaaggcacgcatagcgcgcttctagcccatttgtgcgataaaattggcccgaaggccagtaggccacacaccccacagtgctcgtgacccacaatacgctatcaagtcggaactcccagtcgaacgaaaacagagttaattttccccacctgccccttcatgcttatcctctacacagaaaaaaatcccgtcacttctccccatctccgcgccgctcccccgccccacccacccccctccgctaaaaaaaatccgcagcttctcctcctcattcaccacaccacgcgcttctcctcccagatctgccgcttctctccccaaatttgacacttctcctcccaaatccaccgcaccgtttctcccaatctgcgccacttctcctcgcccatccactgcaccgcttctcccccaaatccaagcgcgggaggcaagaatcggtggggtgggagggtgattttggggattcacttttcggggcggcgcgaggaagcgacgaatcggagcgacgacctccacgttgcaggggcggagggggtttcttgcgctgcgcgccctcgttgcaacgaagaaactcgtctcccagataaggggcgagcggctaagcagaggcgcgagcctcgtcgacacgtaagcgagtccaatatggcaggtgaaggtaacatgccatgtacacgcactgggaagggcctaaaggggctagcaataatacgtgagtactagggattgatgaaccatggtgaagactccaataaggtacaaaggtggaattttggaaatgatggcgccgacaaggtaccacctacccaaactcccaaaacgactgaggctgtgtttagatctaggggtaaaagtttttgtcgtgtcacatcggatatacggacacacatttgaagtattaaacatagtctaataacaaaacaaattacagaatccgtctgtaaactatgagacgaatttattaagtctaattaatccgtcattagtaaatatttactgtagcactacattgtcaaatcatggagcaattaggcttaaaagatttgtctcgcaaattaatcgcaatatgtgcaattagttattttttagcctatatttaatatttcatgcaggtgttcaaatgttcgatgtgatatggtgaaaatttttggagtgggacctaacaaggcctgagctgataaagtatcgaggtaacatcgtggatgaggctatgccaacaagataccaaggatgaattgagagggcaacaacgtcgacaaggtatcacatacttgaaccatggatacttgattgggacgaagacacgaggatctggtatgcatgctcgtggcagatgaggcaaagtaaaggtgtctcaaggaagccgcgaatacggatcgatctcctataatttataccatcccaaaattgatatgccttacattagcagttcttaaaataaaccgaacacaaaagacagaaacatatatattcatccaaatatttggacacgatatgaaacaaacatgaacatttacatgatactaatttgagaacatctctgttttatactgtgcagtgatttttttccccgatggttggtgcgaagcaatttttctcaaaaggaaatgaaacgattgaaagctttccttcctgacgcgtgtggcacgattttatccgccggtttattttcccaggaaagaattcaacatttcaacttctggaggactccgaccgccgtgcctcttcatcgtcggtgccctaggttctccacgcccattgcccattactaatccggcactgctagctcaggtatacgccacgaaacccactcctacgccaaggtatccaccactcgcgcgcggcgcgcgcacgctcgccggcgacggcagcgcggggtgctccttgtgttgggcgcgctcggcgaaggtgtggcggtgtggcgcatggaggttcagcgggagaccgggcgttcctggcacacgcggccgtgtttggcggagctcgcgcgcgctcatggcgttgtcatgggggtggttttctcgtgttcaggttcaggcacgaagggggcgccgcgtaactcgccgtgaaggtgttcgatcagatgcccctctcagggcgaaggtggctactctggcaacttatcaattcaactgtcgcaacaaacaactggttttttttttttacagaagatcgcataaattcttctggagaccaacctgtctactacttagatttgcattgtcgatgtttctacgactacgactcactgataacttttgctttttgaagttttgtgaagttgacacttcggcagatttgattaataacaagacaaatgcagctgttagaaggccacggttcatcagagttctgctccctggatccttcgcaaagatggtccacagatgcttgtatactactacatgttctgccgttctgaatttcgtagcgaattcttaacaagtttgcaaggacagtgccggtcaaattggccatggttttcagcctcgttggcaatttttggcacgttaagctgtattgaggatttgagatctactcttctttttaagagctattgagatctactttagggagtggcagaacagggtttgtgagggctcgtgatttttctgagggcaaacttctgctgctgttcagatacgaagatatcgtcaaatgctcgaccaaaaacagaagataattcagatgacgaactacctcaactctgaataaaatttggccgccttccttctttagcccggcgagaaaaaggatggaaagggcctgaatgacaggctatggaaggtaagcagttttcagagacctggtatttgagtcattgtccgtgaaaattggtcttgatcattgacaggattgtgcgttttatgacagagaaaaaagttgggaagtaggataagtcggaggaacagtgcagattgcactgcaagtctttgagatgagaatgacccaagagacaggccactgaaaagtatgatgttcatctgacctgaatacctgatggttttgaatcgattgacctggaatgatttctgctaacttttggaaccgtgcatatgattatgtttgattgtgcagagatgaagaagcggctttgaagttttgtggatcagtcaaaatgggaattgcgagaacggaactgcaagtcatgcaggagacaagaatccaaaaaaagccacattcaaagtctgatcacgatgagtgaagtgcttatgggcttagccacagatttgagcactccgtttcatgtaagacagcactatctgattccactgcttcttacacattgtattttttgatttgctgctaaagcctcatgcaataccatctcacaatgcaaaccaggacttgatgcatgcgcttccacgggcttcccacaagctgcacaatcacactaaaaacgaagagccatttcacaacatggaagaaggcgattttggtcacaggtatgtcagcacacctgctatcctttatatgttgttactgaacattcctgatctggaattagtttatgctaatgcttggtttctaatcttaaatggaaacctaacatattacatcaaatcaaatctcaaatgattattctggtagcaatacccatgtatagaaatctcaaatagaaacagctctcacatgatagcagctgacccaacttgtattagtactttgttgttgaattttcctatctggaaaatgaggatcaaggaattaccattttgtgccactgacatgtgtgggtcaggtgggtaaatcctagtttcaatctaaagggaggttatatgatcaaatttcacaacgtagaagtatgaaaagtaaacatgtgagatgtaacaaaagagcatgcctataactaaggttagttatggccaacatacccacaacccttctcaaccatctcaaagtttgccaagagttaatacataatgaagaagaaagaaaaggttcagcgcatcataacacacagatcacagagaccgaacagactaagtgcaaatataaacagatttgaccagcccacaaagtagatgagggtagcaccacaacctgagatgagcatcacctaagcataatataaagtcttttgaaagaaattaattgttattgctcaaagcatttatcttgtcctgcttcttagcctttccagacttccacacggagttgtgagaaacagtttcctcgacaatctttggtgttgtaaagctgaagctttcaactgaaaagcgatctttgtactgcgggttggcctcaaggaacttatccacctctgcagtgcatcttacacgcttcccatttggcatgacatagtaggtatccattttagacaaatcacctctcataatcactagtctctcagttcctgctggaggctttggtatgttaggcttgtcaaggacccatatacggctgctatcatattcgatgtcagcagggtcttcacacgagcagtcaggtcttctactgcagtgccatggctcctcagtgaaattctcacgaattgtctcaaattcatccttcgtcggaaccttgcgccatttgtgacactcacaacattgaactgcatacatgccaatggagtctgtggaggagcctcgttttctctattgaaataagaacgttaccattcattactattgtatatcaagcaaaataatttttctgatcctaaaatatgcatttggaatgtaaattttaattctatcaggcacaaactaatggaaaatggatgttaatgacatgatgtatacttctagtggataggataacagaacaacttcccaacgcacaaatagaaataataaagaccgctacattgtttttttctttacagtccataaaagctgcttcttagaagttggaagttatattttgcatagagtccatatggtaaggccacttttggtataatgcagatgccatgtagtataaggcacacttatgtttggctgcacaaaagcaaccatagaaaaagattctgcattcagtttttagaaggggcagaaatttaaaaaaatcgcgcagcattttgtgaagaaatctaaaattgtttcatagacccagtgatgtgaagaaatggttcagacagctctaagtagaaaagtcctcattttcctctttctcttataaccctctacagtctccattccctgcagccccccttcgctaatgtataaaatgtcatcagaacttaagaactgcaaaagtattaaatagtgtaatacattaactcttatgttctcaatctaaagtatatgcattttttgttattggacggattccattatccttcatgcttctaaattcctcttggatctcaaacaaaattttgagaaaccaatgcaagctgatcttttttatttctttacagcccataaactcccgttgctgacaaacaaacttcaggcttcatgtattcacagcagtacaaagcaacacgcctacaatttctatccaaaatggcacaatttcagctcatcagattaagttaaggctctaaatcgatccttccctcacctgttcttggcattgacgatactatttgattaaagatttcatcctacggaataacctagtggaataaccaaacccctattctgaactctgaaaccgcatccacgcatatagtcgcaacatgcaggcgccaccatttggcacaatttctcaagccaaacaaccagatgaaaccaacaaccgagcatgctatggccaccaccagatacaccaaaccggatcggggattcggaggaacagaccaaagaagctgcggggggaaataccagtacgaggaaacgtagatggcgacgtacgatcgaggaggcgaaagggcgagaggcggacctgtgtggagggcgccgaggggggcgagaccggtgacggggatgaggccatactcgacggtggggcggttggccgcccgtcgtcgtcggcggcggcggaggttgggcggagcggtcgcgaggcgaggagaggaagcctcgggccgcgttgctgggccggtgtgtggggggcggaaacgaggacggacagcgggagtgaatcccgagagtagagggacggcacggcaaagcgggccttttcacggggatagaccgacagggttttgacccttgcgggatgcgggccttgcccagccatccaaacggcatcacacggcaatcatatcaccggcacacatacggtgatgtgcagtgtgcacctaccttggaggttgtgttcgggacactttcccaactttactctcattttacacacacgcttcctaaactgtgaaaaatatgttttttcaaaaaaaaaatacaaaagttactttaaaagttatattaattcacttttaaatttttttaagctaatatttaattaattatcgttaatatgtatagttattaaaatagggacctacaacgagaagttccggatacatgcgaaacaaagcatatgtagaaaatatccaaaatcaccacatgaaaatagctccagaactttgcaggattcgacatgaggtagaatgaaaaggttcaacacacaaaagcacatgtagtgcaaaacataacataacttctggaggtaaacaaggaaggagaagtataggtttttaaggtggctgctccatattgtcttaagtttttggcatcacctaaagtaacgcgtatgtagattcagaggtcacaatggtaactacttgctgctggaacttggaacttcttttgcgtctagttgcatacactgctcttccctctcagacttcgccatcacccactttgcactatcggaaacagtctccttaactatcttaggtgttgagaagttgaagctcgaaagtggtaaagtagcagcatactctgggttttccttcagaaacctatctatatcaggtttgccctttgcacgcttcccatttggcaagacataataggcatccattttagatagatcattcctcatgatcagtagcctctctgtcttcggcggaggcttagggatgttgggcctatcaatggcccaaatacggctggtgtcatactggatatcttcagggtgctcacatgagcagtcgcgctttttgctgcagaaccatggcttcgcggggtagttctcacggattacctcgaactcttcttttgttggaatcgtacgccatttctcgcatttgcagcatgtgatggcgtacatggtaatgaaacctggtttcccctgtcaaatataaatttattgttgttgtcaataatatcatgcaagacataattggaacatcttcagtaaacattgaaaacatgaaatttaagtactttaaataaacaaagggatgctagttacaaatatgtgtgcttctatgaaataaagtaaccaaatatcttcacaattctacaagcaaatataaaaaatccaacattttgttcaaaactactccaggaaaaaatatttgacattgggaaaactaaactattaagtttgactggaaggagaacttagaagaaaaatattagttatatttcagaaaagaaaattgaagtagaacataaagtttatgatgtatatggaagctatccagggaaacctagtagagaataatttgttgaaatagtgcattttcttccttgcaataactctcctcaatcaaagatataagtataaatagggtgttcaattctatattgttgttatacagtatatcacggctcctagagaaccccctccccccccctcttatgtagctaatacatcatagctaatatatgtacgcacgcgcgtgcgtgtgtgtttgtgtgtgtcggtcttataatataaggtatttcgcccatgtaaccatggtagggttctaggatatgacactcaaaacattttacgacacgatttgccgctcgctatgtctcactgacacaagtaagttgtgctaccaatgaagaacgtgcatatcataggactaatgccaagagggacctcataaaaaatccctatcatggccactctgcctcctatgatttggataagttacatgttaaggaagtgatgattattagttgacatgaatgatcagaacagacggcatcaacactcttgatctgtgtcacctggacatggaaacttgttctgaattcgagtcggatttgtaatgtcataccccctatcacatagaagaaattatacatggaaatactacttggaattcgaaagggagttagaatccaaatccggctaaggacatggacacatgttaagaattggactcaaatttctcatgtcctatcccataaaagaaattttataaggggaaatactacttagagtttgaaagagggtcggaatccaaatcggacttagggtgtctgattcaagaaaggaaaaaggcgtggatgtatgaataacactacacacatcactaatccatgagagcgaaagcgaaacaaagtagaaattaaaaatcagatcacataattacctcaagagccatgatggtcacctctagggtcaggagggcagattgataaggtgggggaaagtgatggctgatgatagtttggagtactttctagaggttctcagtatttatagagatcgctggggcaagattttcatactatagacaaaataatatgctttgtttgcaacaacgtaaccatttcacgtcacgaaaaataaaaagtatggtggtatttgaggtgcttctaaggattcgctggtatttcttaaacggttttgctggtattacatttgagaggtttagctgctattacctgtgaattcatttgtttttttaaagcataatcgtattcgaaaactatgtgcgaaggctctagacagttttccaagttttcttttttttttccttctccatcgaatatgacaaattcacctactcccttcgtcctagatttagatttttttttatcttggatggagtatgtgacataaaaccctaaatttggcacctaaagcgaaaataggaaaatatagccaaatttgaaaaggacctagcttgctacgcgcgacaagtctgactatcgtcatagagccggtcagacagacagtgtggggccggtctaactgacggcatgtggccagatagactggcagagtctgactccgtgcctgattttgtcgtttctcaagttcccttgcttgggctaaggttttctttagtcctatttggtttgtacacctagtgggacgtggagagatacctatggaaggcaagaccaaccccaaaataagagccaactacaagaaaaatgctttgtggagacactttttaaatgtttttacaatactgtagaggcattttaaaataaaatacctaagaagtgttttatggtgaattgtgtctacaaacaagacattttataaaatgtctataagttggtagaggcacttatagtgaattgtctctacaagcaacgagacattttataaaatgtctataagatggtagaggcatgtactagagatacttatggtgaattgtctgtgtaaacaaagaggcattttataaaatgtctacaagatggtggagacatttttcacaacaaacaatgggaattttataaaatgtctataagtcggtagaggtattttccagaggcacttatggtgaattgtctttacaaacaaagaggcattttacaaaatgtctataagatagtagaggcatttttcaccacaaataagaggtattttataaaatgtccataagttggtagaggcattctatagagacacttatggtgaattgtctctacaaacaaagagacattttataaaatatataagatggtagaggcatttttcaccacagacaagaggtattttataaattgtctataagttggtagaggcgttttctatagacacttatggtgaattgtctctacaaacaaagaggtattttataaaatatctataagatggtagaggcattttctagtgacacttacggtgaattgtctgtacaaacaaagaggtattttataaaatatctataaaatggtatgggcattttctagagacattaaattattaaattataccacaaccatatgaaacgcaaagagacattttataaaatgtctataaaatggtagaggcattaaattattaaattgtaccacaaccctatgaaaccaatgtaaaaaaggagtaaaatatttttcccttgctattgcaaatccttgagctcaagatctcttggacaaatcatttttatcttcaatgcactagcgaactcaaccttatgtcgttacttgtatgtttgtgctttgagttatttatatttagttcttcagtttacattatcattctaaaaagtaagtgtttgtacaaagtttaaaatatctcaagaaatgcatttacatatcaggtacattttaaagtgtcgaaagaatacttctacaagatataatttaataaaatgtgctgaaaatatctctaaagtgtctctaaagtaaaagttttctacgcaattttcaaagtgtctgtgtaaagtgtctctacactacaaaacaccagatcttagaggcaatttgcagaacacctctacaaaagtgtctttatatgaggtttttgttgtagtcgccatggccagttcaattgaggcacacaatctacaacagcgcaattagccaattgaatcgttctttcaatatcacatatactttttgcctagttttcagcctagttcatccatcttcgttggtttgctttgaaagttgtccgtcttcgtcgcgagagtgcgagtcatctgtgtaggtttgtccctaaaacattcggttccgcccacaagacgggtgtttatccctatttgtctaaatcggctccgttagttgcttttgatctataaacccatcttgatcaggggcttctcaagatcaaggtggttggagactccatacgctgcaaaactttaggtggattccgatcgtgttgtggcgtgactaaaaaggtgtcaacaactagttgtacgcttgtctggtttttatctggcaacgtcatgccttaagcgatgtgcaaaggtccagtgtccagtcggtcttccttttttacactaggtaagtaagaattggcctattcatgtggcattggttggcattcgttgtccatttgtatggctttattggaaagtgcttagatgttgtagtcttgtaggggaaaggtggagttagttttcctcttttgtattgctagtaatcgtgcacatgcgatgcatgtttcgcgatatatatccgagaaatcaaagtttggtgaccatatttagaaacaacaagtaaaaatccagttgagatcttttaggccacatcgatcggcgaatagccctcgcgtcgccctcccccgggcggctcgggaggcgacgcgcgcgccgccgctttcctcctccccccgccccctcctccacctcgccgccgcccgagcgggtgccggcaaagccgcggagccgcaaggacggcggcggcggggtctcgcctcgcccttcccacgctcggcggctggcggagctgtccggggcggcggtggtggtggccagatccgcgccgtttccggccagatctgaagggggggtggccggcggcggggactgacggtgacggtggcgacgacggcggcggaccacggcgactgaaggcaacgtcggcggcggaccgcggcgcgtccaggccacctgtagacccccgtttttataacaggaatcattcgtgtaaacagtaccatttccctggatcaagtagtctggtacacacgagttcatagctgaaataccaaaagcacatacacgagagtctagtgctaattattacatcataagcccgcaggcattgtcttaaatcatcggaccgagcggtccggaatacatccaaaagcagaaatagataaggcagcggaattcaggcagcggcatgccattgccacaggcaacgaccgtactaagacctactgagcgccatcgtcttcatctccctcctggtagtaggcatagggatcctctgaagcttcatctcccgcttctgattaattttatatttgcaagggtgagtaccaaccgtactcagcaagccatcacagcaacaatgcacatgataggtgtatttaaaggatggctatggttcctttgcacaaagccagttttgtaattcttttcacaagcctaagatctagcacagactgatcaaattttagtaccagtgttcatattaaacaatgacggttctgtccaccatccattgtgatcccaagaatagcttcccgccattgagtcgttatggttttctgaggacgtccacattcccgcctctcaggaagtggctccatcagcataaaaaaaatcatcatgcaatatcccatcccacacaagttaaagaatttaaagtctagccaagtgtaatacatgtcccggtgctcaataaccgcgagcacgactattcgaatagatttggtttactcacactgcagtggatgcacactttacccgcactccgcgactgcccaacacatgagcctcgtcccaacacatgagacgcgtcacggcaaagcttttcgataacctcgcattggcagtacccgctccatgaacttaaatcctcatgcaatctaggcgtccatgtttctagcagtgagaggagttctggcgctcccgggaaagagaagtctcacacacatattaaattatggttcaagttaagttctctctcacacacactcatggtagtcctaccaatggcgacaccgatgtagggcacgcctctcggccctacctcaacggctgtcccaccgtagcgcacctgcctcactcaggggtgaaccatctatgcagggatactgcctccgctcggctatctaatccgctaggtctatacccatacgagaagtgcggttgtacgggggtcgtttcatgcttaacttcatggctcagtccttaattgaccggggacgatactagccttttccagataccacccaaatcctccgtccgccccagtcgaaaacagttgtttaattttatttctcctttcacaaattatgtcatcaacatcatggcaatgtggcgctcatgtctccacatgccgcatctcaattaccttcccaaaggtaattgcccaagcatatagcatttgataaatatgagtatgcatgattctagaatagcatttctaagcaattgtcatagttgactagggactcatacgtaaacatggttacaaagatttaagggtaaacaataatcaaggcatggcataatcacaagtaggatgttcatcattgcatgcaattttatttgtaaacaaaacaatttcgcaattgggatcaacatattcaaggaatagtgatgacttgccttgctcaaagtcttgggggtcttggccttcacttggatccgcaactccctcgggctctatagttacgtgcgaaaattgatttggattcgattagaattcaaataaaaatccaaataaatccaaatggaagtcgaacgcgaaagtcgattcttttgtattaactttactattcgcgtactagggcaaacccaatttcgattcaaactattttgcaggtataaatgttttgttctcataagtttttaatttaatctacccgagcattatatccatataataggttagagatttctatcgcgagctaaatatcggacgaaatcctagaaatattatatgatttaatttagtctatgactaaatgattaaatataatacacggctaaaatccctagtaattaaatccgaatttctaccgtgaatcgattacttatagggattacccaaaaataatctataataatctataagaattcctctatttgtttagttattaattacatctaaattactaccgcgaattgatttcttatagaaattaccaagaataatccataatttatattaaatttcgcaattctacgactataactaatctataactaaattctaattattttaaattttctaaacttccctaatctccctctaatttcctatttatttccttttcctttttctttcctttctttttctttcctttttctctttttccctcttttccttttcttttttttctctcctccctcccggcttctttctctcttcctcggcttctccctttctctctctctcggctccctgctacccggggtggcgacggcgaccgaggaaggggagaaggcggcggcttaccaacggcggtggcggcgacggcggcgcgacgatggcgcacggcgcacagcgcggcggcacgaaggcggcggtgcggcggcgcaagggcggcgcgacggcgacggcggcgcaaggcggcgacgcacggcgcggcggctccggggcgacggcgcggcggcttcgaaggtggcggcgcggcggcacgacaacggcggcgcgtggagaaggggaagagggagaggaagggggagatggagtggggaaaatggggagggggtggagttttataggggagaggaggggaaaagaaagggaagggaaggggcgacgcgacggcggcgcggggcgcgaggcggcgatgggacgcgcggcgacgggatgtcgacggcggcggcgacagcggtggcgcgcggctcggggcgggacgcgacgggcggcaacgcgacggtagtgcgacgcgacggcgacggggcgagacgacgggcgagcggcgatgggacgggcggcggctcggggcgcgaggcagcgcggcacggggcgcgtcgcggggcgacggggcggcgcgcggcgcggggcgcaaggccggctagggcggcgcggcagcgatagcgacggcgacaggcggcgatggcgacgtcggcgcggcggcaggcgatggcgcgacgggacggtgacggcgaccgcgcggcagcggcggcgcggggctcggggcatggccgggcgcgtggcagagaagggtctagggctagggaccgaaatcgaacacctatgaggcaatgaacagtgacttttcctatttatcccgattttagtgtattttccatataaatttgattccacaattcctaattttgcatatatgcattttactcaatatttgtcttatcttaactaatgaattcaccctagattaatattactcatattttatttttatataatttatttgagttttaattagggttaattcttattccatcgtatttaaatttaattgatccaaatatggtcgcgataatattttatttatttctatccacacctaatctttattttaatttgtatttattttaccaatttgtttttaaggtttattcctaattaactattctttactcacgattaataatcttcgagatcaaatccagataaaatagacgaataagatcggcatgatgcaattaatttaaaaagtttttgaaaatccgtatttttagagttttgattttgtcggtcgaattttcagggtgttacaccaccacaacagggacctctgccgtgccgtcatggttgtctcgctccagcctggtgctgagtggcgcgctccgtcccccggacccgcgccaccccggccggatctggatgggcggcggctgctagcggcgaccggtgatagtggcggctggcggcggcggctggtgatggtggcgtggagatgaccggcggaccacggcggctgacggccgtggtggtgatggctggcgatggtggcgccgtgcagcagacgacgcgtcgacgccagcggcagcatatgaaggcggggaaggagttgggcggcaggaaaggaggagaccgggagcgggcgtggcgtgggcggcggttgcgtgtagcggtgttgcatggctcgggagggctccggcgagctcggtggctatgcggagtcgaggcgggctccagcagggttgctcgctggtggtgagcctcctgctcgcgatgtgtggatgtggatgcgctgacgtgtttggtcacgtcgaggtatgattgcttgtgagacgtcacggtctattccatggtcgtcgacgtggggtgcttgtctgagtaatgtgaagacgctggcaaaagccttgccgtgcctttggccggttcgaccacgacgacgctcttgggcgccgttaaccttcttgaaggcgtcgtcatggcgttctttcatattccccacaaatctccgggtgaaaaccttgttccgatttcggacgagcagcgacgacgttacgcgtcgtgtcctccttgggggcgtcgcttcggagaagttcctatgcatcaacgaccgtggatggtctttttcggttctaaagctttcataccttgacgttcggcgaggccttcgcctccttgggtccgcttcgttcttgtggtgggcgacaggctcttcggttgcttctgctgatgaagtcggagctgctcgctgatggggtgcggcgatgcttggcaacgatgacaagttgtagtctcttccaaggagttggtgctgaccgtgtgaaggaagtgtctctttggtggcttggctgatgtccattgttggatgtcggagctgcttttcgctctggcgactttcgcggattcagtgtcgctgcggttgtgaagtcggcgctgctgggtcgtttgggcagctagctcggcaacgataacacctcttctgtgatgttggagctgtttgggccacttttgtgttttagcttggcaatggtgttctacatttggactccgctgttgtttgctagttgtgtagctagatctcttgctttcttctgtgtggtgggttttagccggtttcccgtaattaaccgtgcagttgtatggttttcgggtccggtttttcttataaactgggtcaattctcttcttctaaatataaaagtgaaacaaagttccgccttaggtttcaaaaaaaaatccagttgagacaatacttcaataaaaaaaaactccaaaatgcatataacaatggccttctttccaagaaagaaacaaagagccaacaatgtggaatcaacagaggcgatagaaagaggaattggcagctttgcccgtctagtttggtcttatatcttatccgtgcctacacctgcaacctttgagttctgcatgccatgcacatcggtgccacttcggagttttgcatgctattgctctgcagcatttgttactgatcagtccatcactcgatcactcgcccaccacaccccactgccaatgcagggaagagaaaaagtgcatgataagtgcctactccatctgtcccgaaataaacggatttctaaaatgccatacaaatttagggcccctttgaatcgtagggtagaaaaaacggaggaataggaaaaacacatgattctgacaggaattgaagtataaaacagaggattgcaaaacacaggaaaaacacaggaatggtcgtttgattggagcgcataaaaaacgcaaggatcggatgagagagatagactcaaaggaaattttccaataggttagagctcttgctaaatttcctccaaaatccacatgcaagatgccattccataggaatttcataggatttggaaagcttcaatcctttaaatcaaagagacaaataggaaaatttcctataggatttgaatcctatgaaattcctatataaatcctttgattcaaaggggccctaagtagtgagagaaaattactaaaagtgttctaggtagtattagtgactggtgagtgggcaggtaagaggtggtgagtgtgccagtaagaggtattactgggataaaacccttttagatgatggtaggttataagaggaaaaaaattgatttattttgaaacaaagtttgaactctaggtgagtaggaagttgcaagtttaatggggatgggtcaaagcactctacagagaagtctgtagtatatgtggtacgtacgatcactgaagggagaaagttccatgggtgggtccaccttttttttttaaaaaaaaacaagaatacagtcttgaactgatctctctataaaggggacacaccagcagcaaacacgtacaatcctttgaaattcctatggaatggacaatcctatggagattttggaggaaacttagcaagagctcaaagctcttggaaaatttccttttaagtctatttctctcatatgattcctacgtttttcctacggtccaattaaacggtcatttctgtgtttttcctgtgttatttcaatcctctgttttacacttccattcctgttacaatcttatgttttccctattccttcgtttttcattcctgtgattcaaaggggccctaaatttcctccaaaacttgtatgggaaaatgcattctataggaattttgtaagatttattccttttattcaaatggttatataggaaaaaaatcctataggaaggaaatccttttgaaattcctatgaatttcctttgaatcaaaggggccttaagagcctgtttggttggtgctctcacctccgtgcctgagaaatttgtaagcctgagtggcattcaagtttgtaatgtaggttgcctggtcaggcagcctgagcctgtgcttgtttggttgtcacttgtgcctgagaaaaaaattcaattagatgtttgattattatgccgctaagtcaagtattaatatccgacacaattttttgcatttaattgcatctgacctacaaccaaattcatctagcgcaacagatccctacacaaatcaatcataaagcaaacaaaggaaaaaataatctaaaaacaaggggaacaaacaagggaaaaaaggaaaaaaagaaagcaaagattgcacccagattgtaaagtcaatctgcttactcaaccacgggcggaagaaatccttgcctggcgacacgacggcggcgctactttgcgtagacaccaggatcaacaaggaaatcatcaagaagagaaaaaagagagaagaacaggagcaaagagatccccagatccatgtcgcatccatcagaatagaattgcaaaatccatgcatccatcatagaagagcatttgcatgtgaagcatgacgcagcactccggaggggtcttcgtgtggctgcgatggcttcgcacgacggcaacggcggcagcctcggcggctttgtgtggagttatcatggcggggatgaggggattatggtgctaatgtgtaacgcgctgctgcgcctggagcccaggcgaccaggctaattccgcgcctgagttacatcaggccaggcaaggtggaaggagcctcagggtagcaaccaaacactcacaaattagtctcaggcatgtcttcggccaggcaacttgttgtcagggcagcaaccaaacaagctctaagtgactcataggaattattccattggattggattcctctgcttttcctccaaaaattccttcaatcctaaggaccagccagtcagctagctttgattgaagtgtccttcctccttcaatgaagatggatgtgatctatctttgactcatgtcattcctctccagtatgaagatgatgatgatctagctttcaactcgtgattaattcaccaaggacacacacctgagcatctccattggatatgatcaatcaactgctggttttcaacaacttggcttactatgttgtaggatgaaatgctaccatttcacatttcaactcaggagaagagcgatcgaaagaagaagatgcagggacttggattataggtaatcaccacctttattcgattcttcgtcgtcatcgctgtttggtacattaccatggcagttcaagcgaaattttcagaaaactaccaccacataggcttacatgcgaacatgcatactacatacaacggcgcctttgacaggcagcagagtttccaccattccatggctatgtatttattattcttcaccaggtgcaccaacagcaggcgatctggttgccggtaaagagaagggcgtcatcatcagaggagcacctgagctgcagctagcctagcaattgggaccctgccaaagagagttaataacagttagtgattgttctgtgaatttatgagtagagttctcgattttcatcactcaaccgacctgaaaggcgaacaagaaacatagtccagcccagccttcgcaaagaaagcgactgacagaggctctccaccatgttcaccacagatgcccacctgtttacaaaaaaagaaaaacatttcaatataagaaaccatggattctatacaaggtgatgtcctcagctccagtgaaaggctaaccttcaagttaggcctagctttgcggcctctctctgtagccagcttaaccagctccccaactcccctctgatcaagcacctaatatattcatcaacaggtatgttacatgatagaaattggtcagattgcaccaaatcagaagtcaggactcgagagttgggaaaagaatatgcagatgagttgctcacatctgtaaatgttgggaaataggggtgtttatcaagggaggccattttggctgtacaaatttacctcaaaggggtcatgctggaggataccctgagacagatagatgggaaggaacttccccacatcatccctactgtaaccaaatgtcatctgtgttaggtcgtttgttccaaaggagaagaactcagcctgctctgctatctgtcaataaatgtgcagccaacacagcactgtcagcttataggtttaaagaaaacataaactcatcatttgaactttgaatatttttataatcattcactatttcaagatcaaaatatcctttagggtaatatccaagattctattactagccatgttgcatgtacagttctgtctacatgttgaatgacaataaccatactgaagattttcaaaaaagaagggagctatcagttgtttcttacctcatcagccactaaagctgccctgggaatttcaatcatagttccaactttgtagccaatagtttttcccatgtctgtgaacaccttgttggcaatttgacggataacatccacttgatgccccaattcctgtcacagcaaaatactcaaatgtcaattgtttgaaaaccaaccgaaaagaacaatgtaatcaaatatattagaacatcaaagaaggtaaatatgaagaaatggaatgaaccatttcccggatgaagtcaatgttccattcacacgtgatttaatacttgcatgattctagaaattggaattcatgtaaatataagttatcatctaaattgcagcaccttcacagacagtcaattacacaagtcaggtactatgaatgaaaagaagaaagcaaacacatacctgaggagttccaacaaggggaaccattatctccggaaagacttgaataccctggttggtcatggttatagcagcttcaaagatggcacgggcttgcatttcagtcaattcagggtatgatataccaagcctgaaattgagtggtcccagcattagtaaaggaaaatgatgcaaatgtagattgttgctgcaacctcaaataaagtaggacaataaccaagtaaatgctctggaaaaggaaagacctaattcaacactgaatagcaaagtgcaaaaaccaacctgcacccacggaaaccaagcattggatttacttcggaaagtttttctactcttgcaaggacatcatcctgagctgctccagtttcagagcatagctcacgcaccatatcctcaacatggccttctggaaggaactcatgaagtggaggatccaagagtctaatagttaccggaagccctggaatgcaacaaaaaaccatttttaaacgcctgtatgaccaagcatgttgtgtgcaagatgcaatgaattaagactatgttgaatgaatcatacatccatcaatgtacccctttccataaaagaagaatcatagcagaatcgtgcccattaacttacatgatgcataatatgttaagataatataggcaatcttctaaaagtatattgcatcccttttgcaaatttataacgttgcatctacactagaacaatcaattaacttatatttaagaaagcaaaactgtttttgtttccttcaattaaacactagtgcatctaaattcattaagacatatatattattatggtaaaaatttcgcataccatccattgcacggaagatgccttcaaagtcagacctctgataaggcaaaaggcgatctagtgctttctgcctcagttcaagacttgaagccataatcatctgcctgacagccttaatcctctcgtctgaagcgaagaactatgaagagaagaaaaagagaagagggcatgaaattatctgcattgactagaagagaa

SEQ ID NO: 2772 - DNA, 10506 bp, Oryza sativa
acctagaacatggaacatactcacaataagcatttttgattgatgctggtgcaacagaactaggtagccttgaccttagtgagtaaataaaactaatgtccctttttcagctgacttcaacttgaaacatattttgcttaccttgagtttcctaacttcatccacccaagacatgaaagtttccaaatcaccactaagggctggtgggcagagtggctgcttgccaatgatcacttcaccagttgatccattcaacgatagccactcaccttcatgcagcgccttgtcttcaatcactacaatctgtagagacacagcaaattaagcaactatctgcagtataaaatggtaattgcaaactcgatgtgtgaaaggcagcctttgtacataagagaactcttaaatgtttgtgtggtgcaagaatctagtataatcaccttggacgcatcatttacacggacgcttgagcatcctgacacacaacatttgccccatccgcgcgcaacaacagcagcgtgagaggtcataccacctcttgctgtaagaattccaacagctgcatgcatgccaccaacatcctctgggctggtctctgtcctcacctttacattcataatggacaggaaaatgtcaagatacaccaaatgcaacgatgcaatgtggagttttcaagtgcagcttgaataaagctgtgataaatctattttttttcctataagcagctgtttaatattctaacatggacgaaacaaacaaatttgtcctagaaagacagatgatcaggacgtaccagaataacatctttcccttgggcatgccatgcttcagcatcctcggcagtgaatacaatttggcccacagcagccccaggtgatgcaggtaagcccgtggcaataactttgtctttataccctgatgggttctcaaactggttttcataacaaaagattaaaagtgagatatcaataactgccattaatttagttgtgaactgaaactcaagtacgcaatgtccaagacctgtgcagaaactagcaggcaacaaaattttaaaacaacagttaccaacatcaatacttgtgtgattatgtttgatatttgttagttatgataatagtattatactttactacacaagacgtaatgagataatctctgttgtttgctaaaactcattccaaataattcaaaatgctcagagttcaagtaacaaacactctacctattttgtggaaaaatataacataaagattttgatgttcagaattaaagcagacatgcgtatcaaatttcactaatagatcgcaaacacacatttaatctttgattattctagcttactattaagtattaactgatttattctaagcacgcaatcgatgtggtaacttctatgacatcaatacaccaacccaacaaaattgttctaaaagagcaacacggcattttgggataacagaggtattatgaaattgtacgtgtccatttatgtggtgcatgagtttatagaccattagagcctcttagttatacaatacctgaggatgaagaagctgatccaggtgacctggttctaccatcttaagtgctgtgcggcgctcaacaaggccctcgttaaccatgtctacagcaatctttacagcaccttttcctgtgcgctttcctgttctgcactgaagcatccaaagcctattttcctgaacagtaaattcaatatcctgcattatacatgaaaattaagttagtctcccaaaaaaaaataatggaggcacattacctagttgctaaaccaagagcatgatcaagacgtttcaaatcacttatttctgtgtgcaagctattggaggtaatgagatatcaccaagacaatgctcgagtatatgatcagacgatcgtgcttccttttaagtttcagtttgagggaaaagtaggacacttatgcctctagaactgccttaatcccattatctaataaggtattgatgcataaagcaaattagaatattgtaccatcatttctttatagtgactctccaaaattttgcagttctcaacgagctcttcataaggctccggcatgtggtccctcatagcatcaagatcctctggagttctgattccagcaaccacatcttcaccctgcagaagaaataatattgcattataagaaatcgttcgggtatatatgaattatcgccgcttgcataacccaatacgatcagcaggaaacatattgctcatacattgattcatacacacaaaccacaggtgtgcaacagttagcagctagatgcaaataggagcaacagggtgtgagccatacctgagcattcacaaggaattcgccgtaaagcttcttctctccagtgcttgggttcctagtgaagagcacacccgtgccagaggtgttccccatgtttccaaacaccatggtctgcacgtttacagcagtgcccttcagcccagtgatcttgtttatgcttctgtacttgattgctcttgggctatcccatgagttgaacacggccaacacggccagctgcagttgcttcttgggatctatggcaagcaaacaacacagtacattagcattcagacgccaaaagaaaaggctcagtttcatcaaaacactaattaatttcagatatcacgaagagtgaaactttatgggcataccagagggaaatggctctcccttagcttcaacatagacatccttgtactgtgccactagttctttgaggtcagtggcagtcaggtcagtgtcgttgtgcagccccttgactgctttcatggcttcgagcttctcctcgaacagtgcatgaggaatgtccatgacctggaaaagagagagaaaaaaattctaagaactgatctctgtagcattcaagaaccaggaagcattcatgacctgtaaccaatttttgggctgaataaaggcaaaattcccctctattgagtaacaactaacacccatcacaaattcacgattctgcggctcatccttgcgacatcctaccgaaaccctctggccttatcttaccagcgaatcgcggccaaggcaatcgaagctggtataggtctagcatccatgatgggctcaggcgcggtccgcagggcgctctcctccgcgccgccgtcgccgccgccgccgccgccgcggcggcgcttgtgatgagtcgaaccatggctgggattggtaggaggagggaggtggtcgagggctcgggacgcagtggagttcgaaccacttcgactccagcgaccggaccggtccggtccggtgcaaggtgaccgaccgaccggttgcgcaccccaagcaaagggcaaaagttgtgcagaccgccgagaccggtgtggtgaacggtgcgcttgaaaaatataataaaacttactgttttttactctaaattaaatttgctaaaaaagaataaaattaagaacattttttccaaaaaaaataagctttgatgaatataggtgaaaaaaaagtaattggttgtatgactggagtagcaaccaacttgtctttgaacttctaggaagacagatatttccatattgcagatgttatcaggtactatgttggaggaccctgtactgattaatttaattattacatgaaataggagtatatgtgagctgagctagtaaggagtgtcaaattgtactgctaaccacccatcgccttcaccagtcatcctttccaataaaattaaagaactatggtcaaaatacggcaatagtgccgtacaggtctcctaagaaaacatcttgtattctttgtacgaggagatcaaatattgacagcaagttccatgttaatcccttgctagcacataatcgcatatacgatcgagagggacatactatctcttgtttttttttccttttttttcttgacacaatactaaaatattctccttgtaacttttctaaagtcaaatactactaaaattattccctattttctaatagtaaaatagagccacaaaagaacaataagctttgggaagttggagtgactctagtgcggacaaattccccccacataggatgagacggaagaaccgggccccacccaacgcacaaaagtatgcgcatccgcagccaccaccgtcgcgtcgctgacgcagcataaataacttacccaccacgtcgatgcagccgtggcagtgttgacgcacacgaaagtagcagagaaaaagtaaaattaagctcgtgagctccgacgagctaggcagctagctgccgagtcagcgagccgggcgagtgtgatctgatgaggagtacgtaccacgttgccgaacatgtcgaggaaacggcggtaggagtcgtacgcgaagcggtcgccgctcttggccgccagtcccgccgccacctcgtcgttcagccccaggttcagcaccgtgtccatcatccccggcatcgacacctgcacacacacgcacgcacggatcgatcagcaacggagatcaatcgatctgtcacatcgccggcgtggcagagaggaagagagagagagagtaaatataagtaagtgatacgcacggcggcgccggagcggacggagaggaggagagggcgggcggggtcgccgaggcgcgccgccatgtactcctccacccactggagcccctcgacgatctcctcccacagccccgccggcagcgtcttccccgccgcctggtactgctggcacgcctccgtcgacaccgtgaaccccggcggcaccgacagcccgatgctcgccatctccgccaagttcgcccccttccctcccagctgtacacccccccccccccccaaccaaccaaaaccagtgtaaaaaacaatcaaaattccaagttcataacatcatcatctcgtatcaacagcgattatttttaccaggtccttcatggccttgttgccctcgctcttgcccttgccgaagtggaacaccctctgcacacgagcacattgagccggagccattagtgaccggtgcaagtgcagtgaggcactgaggctttgtgcaaagcgaagctggtgaagtgtggtgctcatggcggagaggccaagcccccctatttatagcacggtgtgtgacggtgtgacccaccgggagacgtcatcgcacgggcggctcatgcggggggaggaggaccagcccggcaaaaaattggttgggtaggtggatttttgtgttaaaaaaaggtctaataatgtaatgtaaaagtagtataaaaagtctaatactgcaatgtaaagtacagcatggatagcttcttctgtggatgtgaacaagaaatttgttagacgtgtggtgattaaaatgggagcttttttgagcttttaagtgtgagtgaattttggatacgcctgtatcaaaaccaggggaatatgtgcagtgcccacaagaaattagacgtgttatagataaaatgcaagctttgttagttttaagcgggaataaaattggacttgtctgtatcaaaaccaggggagtttgtgcagagcccatcgttaattagcactagagagaaattaacatgtacaggaggtgtgcacgaaattgagcagatcatgaaaatgtaaaatggttagtgtgacttataataggtcgaaaatgcaacgtaatgtgctccaacaaactagagaagagccaaatatctttacaccaaagttacttttgctcgtgtgagcaacgtacgcttcatcggttgtatgtttctggtgctcaccgcttaagcagtgtacatatgacatgggcacatagtaacactagtgttgacacaaacatttttgtccttaaaaaaagttggggtcaacaacaaattatgtcaccaaaggcatccaagaataccactaccacgcataatatcccagataaaactccaaaattggtttgatggtgttgttttgtttagcttcgaccactgcttttacggctcaaacttatcaccacaaaacacacgcatcaaggatcagtagcaatgtactggacagtaacgtatccattattctgattcactgttcattattgctcgagtgatctctcttagctcgatttgagccagtcacgccacttcatcactgatgtattctttatactcaaatttgttatataaatctttgcaaatgcaaatggaaaatcaactcgaaaaggaaagcactatacaataagtaccaggttgtcttgccaccacggaaactctctagaaattggtgtcgccaaattggcattcaaatattcagaaacaaataaagagagcttttgcagcagaaatggccaaataaaatggcgctgggcagtagcctttctgtttcctttgctcagcgattgcgttatgtacactgtctgatagcggtgcaggttcagttgagaaccaacacgtccagcccaaaataaagtagttgtgcatttacatcatttcatcatttgccacttgttgaggtgtttggtgccatgaacttcatgagactagggaaggggactaaaaggcttattaaagcaaaaaagcacaggccatataagccttgcttgcttgcattaggatggccccaaaaaagtgctaatctgtttttccttggagttttatcactctttatatgagaaaggtgtgtacaaactatagcatcgatccagctcacgtttgtcacaacatatctcacctagcctatcctagtaaaagatgctttgcgaaagatttgaagattgctttagttcattcaaatgtaaggttaaccatgtaatatgtttctaatttgaaataaatttggtgagttaaaaaaacagaaaataatcagggatcacatggccggtttgattaagctaaaaataatagttctgccggtgtgaacgcgcaaaattctccaagcaagcggacactttgggctacctgcaagagagataagacgagtccgaggcgagcacacgccatggccacgcacgacacggatagccacgtccgccgtggcaggatgggtttcccgacccgtcttgcttgtgccgttgtgcgtgtgactgcgcgtatcgcgggatggatttgcagctcagctacacgtctggtccgtccctgctggtcgccgtgaggatatgattctctactactcctgtaaccctcttgcgacagtgaacgatcgtttcgtgaccgtgacaccacattcgagcgtgccttttgggggaaaaggagttggcaattcgctgtgctgcaggtgcctcgtttttcagagtgacaggtagactatactacgccgcacatacttaggatcgtgttacacgtagtactcaacaggcaaatatcgtagataattgtgtcaccgaaaatatatccatggctagcatcggttgtccaattagtgataattcgtcaaatagcgtattagcgtataaaaaaattatggttaaaactttgagtgatgtttcggtgctctttattggtattgtactaccggtagaaatgtttggatagttcgttattaagagtaaattagtattttactaatatagtgattaggtaactttgtcatttatgttttttggtctagatggatatgtggtcatccattgcattgacatcgcttatattccatcaaaaagcaaagaaaaaaagagaaaaaaaggtttagtcattactaaataatgattataccccatcatacctattgttttacaataatgcccctccgtattaaatctgaatcacttcaattaaaagaaatcaacgattctgattgtttttgactatcagtagagagcgccgtagtagggctttaaaacttttataaatgtgcttttagtgatttaaatattaatgtaaaaatacaataaaatacctcaaaatcaactataaaagtaaattttaagatttaaattttggcatcggtatgttgtagggtaaaagatgcagtccatgtatgtataattttctcgacgaggagttgtgcttctcccaaaggccttgatgcaaacgtaaggtgaaaattgcgggcgtcgtcagagtatgtgcgtaggttgccgctcgtcaaacggcgacgatgaggctgctgctgggtgaggtcgtggaacaccgcgagacgacaagccggagccgagctagtgccgtgtgccgagaggcgccggccacctgcatctggtggcctttttgatagtacgttgttcagttctgccgcgcggccgggctggctcgacgcgtggccgcgcgcgacggcatcaccaccgttcacccactgcaccatcgatcaacgcgcgcccggcccggcgcggctgcgcgcaacgcatcgcgtcgcgtcgcggccccgcgcgcgcgtcatgggctttggacggacgcagcgcggaaggggaaaaaaagtggaaaacccgcgggcgcggaggctggtattccgcttccactccacggcggcggcgcagctagcgcacgcacgcgcgcgcacggcgttagcgcgacagggcaccgcgcggcgcggcacgtgcaaccgcacgagtgcgcgagccggcctcacgcagccacgctagctatagccgctatatcgtggcgcagcatgtgcgggtagtgaaaactaaagacgatcggcgcgacaaagaaagaagaaaaaatagcacaagcagtaaattcttttttttaagactcaaacacaaacagtaaattttttttaacgactaacacaagcagtaaattcgttctacgtagtagagctggaagatatgtcaacgacataggctgcgtttgagcgcaggagaaagagagaaagatagttttgtttttcgcgcgcacgttttctgaactactaaacggtgtgttttttataaaaaatttctatagaaaagttgctttaaataatcatattaatccatttttgaagtttaaaataattaatactcaattaatcatgtgttaatggctcacctcgttttacgtatcttcccaatcttctcaatccactccttctcaaacacacccataatctcttcttacaaatgaacaatgaaaaagacgcttgtttgttgaaaattaagctatcggatcatgtcaaaattttgccaaggggaaaatttccataagaaacgtgttgcatgtttttcattacctgggcaactccaagtgcacttctaggttagaagatggtaagggataggatcataggattatccattgcctcagccacagccagtttgcattgccacgtttgaaccacccatttccccccattattggaatttagtagtataactaaagcaaaatcaaactagactactttttatataaaaaaaatcaattgcctagccttttgtactcctaactcgtattgtttgctaatacctttttcctaagtcagcaggaaacctagagtaatcaaactttaacatttacttttacgaatttgctatatatttattgataaattttcctccaaaaaattaactgatgtaattacagtacattcgtagtgtaattacactgtaacttacatgtaacttgtatataactttcaaaaatctctcagtaacatgttatttcgataaaatagaggtcgtgggaacaaatcctttcacacatgtgtgtgctgtgatttttttcttcctcaccagaacaaatcttgtaatagatctaaccattcaaaattacatgaaacttacataaaagttacactgtagttacatgcaagttacagtgtaattacatacaagttacagtgtaatcacactacggttgtactataattatatctgtcaaatttttaggagaaaatttatcgacaaatgtataggtagtcccttacttttaaagcaacataaaaacgactaccttaattaaactaggtgggaggcccacgtaattatacggctaacacccatataaaattatctaaattggtttacacattatttttttagaaaaattgttagaattttaaaaaattgaaccttactatcatcgggttcctaattttatatttttttaaaagtcacaccaaccatcacctccttactcctttgtctgctcgatctgtcatgacttctttaaaaatcttgattaccttgtaatttttaagtttattatcttattgagttttgttttatagtttatagaagtcacatcaaacactatctatgtactctttacagcccgttcattgttccttctctttattctcactagtatttgaaaagctaaaccaattcattgttggattattcttttacatcctagaagtcatgtcagccgctgtgatcctaactatctgccacaactcttaatcattattaggattctaaaaatcaaatataatcattattggggctttgttttataatttttatattatatgtcccattagacgatatcatcctactcctttacggttcacctgctatctcttatttattgtcatttgccaccgttgtattttagatggaatgtttttcaatatttctttttaatttcaattttataaattatattcctacttaaacttaaattttattttctaattttggaatttattttattaattttgaat

SEQ ID NO: 2773 - DNA, 559 bp, Oryza sativa
catgagaggctgccagagcaagtagtactcgaatcgtgatcaagcgagcaactggtgagtatgtgtcaaaaaagtcctcgccttccttttgggtataacccttggccacaagtcttgccttgtacttttcaattgtaccatcaggcctaagctttttcttgaaaacccatttgcatcctacgggcttgcacccatatggacgctcaacgacttcccaagtaccattagacatcatcgagtccatttcactgtgtactgcttccttccagtagtcagcgtcaggagatgaatatgtctcttctatggttcttggggtgtcatccacgaggtatacaatgtagtcatctccaaaggattttgcaaccctttgtctcttactcttgcgagtatctacaatgttgtcctcctcaggattttcctcaggcgtttgatcattgtgttctatcggtgcaaagtgctcatgggcatgacagtttcttgactagaggtgctaggtgtatgtttcatgggaaattcattctcaaagaatggagcatctttgaactcaaaaattggccca

SEQ ID NO: 2774 - DNA, 1156 bp, Oryza sativa
agaagatccaaagtttgttgttcatacctgctttgctttggtatctgcatcctcatccacacacattgaattcctctcgttctcataccttcatgtcaatggattaagtaagaagaaaaacctagcagagggcagtgatatctttgtaccaactattaatcaataataaaaaaaaattttcagtttcacctttcaatcttctcctcgagatctctatatcttgttatatcctcctgatgattttgtctttcatcatcaagttcagctgtcaaaacttctattttggactgcagcacttttatttcgttttctaattcagctttccttgactcaagtgacttgtaggattcagccatacacttcaactgtgtctcagccaagctgtttgatttctcactggcaaccaacttggatgtcaactcttcaaggctcttctccaactccttaaacctaaattttgtctcttctataacttcattgcactttgataattctgcctccaaattcaacttctcagatttaagttgctcgaattcctctgatgagcatatctgcacagcagtcttgacatcacatccagagtcagtaggaccttcaatctccggatcagaagatgaacgaggaaggcaaggaccagaaatgctgtcctttagtggctcaagctgcactttattttcaagtaaagtcactttatcaacataatccaaattattattgtcagcttctttggtgttctctttcaacatcatgaacttaatctcactggttcctgacaagataagagacagcgtcataacaatgtcatttagaacattctcatttgatagagctttctctactagtgcagagaactgctgtattttgtcacataaaccatcacaatctgaagactgcccttggaacttggacacttcttggtcaagtgacttaacgaagtcttgaatctttaaaatggcattgactagttcttgatccatagcatgcttgctcccgctgcttgaatgcttcattagtgatccattgtcagctacttcaaccatgtcaccatgatgagtcttgctatcatttgatgaatctgcctcatcttcaatatcctttagaatatttctgatactatctagtatatttccagcattgttctgtggtgattcagaat

SEQ ID NO: 2775 - DNA, 16555 bp, Oryza sativa
  unsure (1)..(16555): unsure at all n locations
atatatcggcgtggtnaattaatggagcgggtaaataaantacgtctctactttgatgctgattaatatataaatttgntgtaattatcatggcttttttatatnnnnnnnnnnnnnnaaaagggtttgatttcgatntccactngcnannnacnaaaaaaatataaaaaattaaaaagataagtcacgcataaaatattaatcatattttcttatctaacaataacgaaaatacgaactataaaaaatatttatataagacagtcaaagttagacataggaacctagggtttgactttttttttttttgaaacggagggagcaggcgcagtacgaggcacgcggaggcacgcacgccactgtgctcgcgcacggctgacacctgccctgccgagtggcagtgtggcacaactcacaaggcctgcctctgccagtagtcccctgacctctcactctccccctcactgtctcggctgctagcctgaaacggtgcaaacctactgctgttactgacgcgtgattgcgtgtatggctctttaagctgcccccgtgagatgagatggtgtggagcagcttgccttgccgtgacgcgaggctacaattcaatggttgacgagaacggtagcgcacgcacgtacacgttgggggaattacactagcaaccggaatgttgtgtcagaagtattgccggttccacggcacacatttggtcgtgcaacacgtccataccataccggtataccagaaggcgtgacaagctgacggcgcgtgcaggtgatggttgtagcatagcccatcgccttggcagcacaatgcctactctctttttttaacacgcatatcacccgtacccatgcccattgttaccgcgcgatgcatccagtgttcctaactgtgcatatgtggatatgccaaagttcatcaatgtttagcacaggcacgcaaacactttataattgggtgaatgattgttacagtagcatgtgatgcatgtgataagttcagggatcaggaccactgacaaacagtgcattttaggacaaaaggcagtgttttcccgtcagatgctaccttccaattgatggagcaaaaactggctctgaaactcgccatattcaccaatacgtcttcaccggtttggaacttgttcctgtcgcgcatggatatttactgccacaaggatcaggtgagccctatctccacgctcaagaaccacgcggagcaaatactagttgtcagaacctgagttactatcacattgatattagtgataggaacattttgggaccaaaaaatggggattaaggcagggaaagcaataagggtttaccatgcgggaagcttgatcacctcaaaagggcacgaaatacaggtatgattttaagcaaaataacttgcagtcaatcccagctagtcctgttccttctaaattcctttttctgcgaaagcactttcttcttcttgagtctcttcctttcagcggctgcagcactgaaatgaaatacacagcagcaactgaataaacgagtgtaattcgacaatttatagttctcaagtgtgagctagagatatgactacaaagattcagagttcgcatatgcaaaaatgtttctttgatctcctaaaaactaacattgcacaagttcaaaggttggctaatctcaaccgctactaactgtttgcactttggagagtaatgcggtatcttttatagaagcgtatgtagctacttgcacacacttgttacatttttttaagaaagcagatctatacacacttggtgcattcaattacacaaatagtattattaatctacaactggataataaaatatcaaacatcatcagcacattgcagaagtaatgatgactgcattggactttctaaagaaataaaataactgaaaacaacggaaattgaagggagcagatgggagaaaaatagcagcttacatttttcaaccctcctctttggctcttctgagggggtggaggtacataggatgcagcatcaatgattgcctgtaagaagatacttgtttagttaaaaagctaggggagcacaataacatgaaagcctctgcaaattacttcctgacaaagaactgaaatgagtaaagcatacctgtattttctgcaaagcatcttcaatgtttcccctaaaaggataaattgtgtcagttgctgtccaaacaagacaatcaaaagaactgagtaacatttacttttgtgtcctagtttttgtagaagatatcacaagctccccatctttatttatccggttcttttcctgtgtataccaagcaaatataaacaacctcttgagacaatacagaaaaaatgacaatgaagatttgcaaaagaggaagattttttttataccgtttgtaatatccgttctttgattctctcaccaagccactgagcctcttttacattgaaccgcatgtcgacctttgtgttaactgaaaatcgatatcaagtattttagaacaaagaggcgaacataaatgggggaaaacacggaacattgattggatagcagggcattatggtcattatttgaaaattctgaagacaaggtgtatgctttagaaccaaaaaacaatcatgtaatcatgctgagtagcaaataaaatatgctactaaatttttgaacattttaaaaataccagaccaatcccttggtcaatgctgaagtaaggctaagttcttttcagaaaaatcgaacgagcaaccttcttttttttttccgttagcatatgtttcccaaactgctaaacggtgagttttgtgcaaaaatttctatataaaagttttttaaaaaatcaaatggatccatttttttttcaaatttatattagttattacgtaattaatcatgtgctgatgagctttctcgtttcacgcgtgactgaaaacctcatcctaactgcccaagtgaacacacccaatattaataaaaaaatgttgtgcaaaaggaaaaccaatgttatagtattacgaaaagaggaagtatgaaaacaatgattcacgcaaacaaacagattaggaagtgaaagcaagaaacctttattgacattctgaccaccagcccccccacttcttgcaaagttaagagtaacatgatctgcaaccataaacagggtagatctcaaaacaggttgacaaataatgcaagtattaacacaatctattaataagcttgcagcttatcaattcctcatatctttatttcatcctttcaagtctatgtacattaaatacacgtcaatcaggaatagaaaatgtactatgtgaggagatgtgtacaaaaccatttacattgaaacatcttgatcaacatataacaaaatgtgcattcaacttttactatcacatagcaacagttagacaagatgttccaatacctgttagatcaatttatagagatattcctttcaaaaatttacagagacatgctactgctagatagagagtattgtacagagtctttcttattattagtagcgccaattttgctacagtacacccgaaatttgtgtaatttgctgatagacatcgaaaaaatgtgtcacggatgaaaaacatcctaaaaaactggtaattttctagaggacattttcggctcaattggatagatacattcttaagaaagacgataatgcccctaggaccacatgcttcaaacatggtgttagagtaaaaatttagaaattatgcaactctaaatttgccatcaccccaagtacattacttgcatacattatattccatcctcgctccagtcttagctcaaaaggttttgatcctaggggcattctcggctttttgaggaatttcaatctccaattgaaccgaaagtgtcctccactaaattagagtgtcgttcggacataacacgtttttacgatgtctaccaacaaacaacataaattttgagtgttctctaacagattttgtcttagtatgtatagccatacagcagcaaacctaggtgcttcttaagctaatttagctattagcatgcttttcaaactattggttactgtcaacaaacaggattaacaaaatgcaagtcaaatcttgttcatagctagaattcaccacattgtcacctctaaccaacatataccgttaagctgtcaaaattatccttagcacgaaatggatgtaggaagtagaatatacacctgagtcacgaagtataactcgataggggctactggctaggcagagataatgatgagatatgagatccccaattctcaccgagcagactcatcgaccgtttacacatagtacttcggagtagagatattagcctaagctactgaattttccgtttgaccaatacaatatgaataccaacaccagctgtttgttaggatttgacgtttcaattcttcatatgtaggacatcgattgagcatcattaccaagcatatgtgtaacacaaattaggggcaatagtggagttgcagattattacccaaagtgatcttgggggcggggtcggagccggccgaagcggcgcgctcctcggcgtcgcgaagcacctgctgggtcagcgccaggcgcgccgacaccttcctgcccccgtcgtcgccggcctcagccgccgagcaccggaggcggaccagcgcgccccggcccacgccgagggcgagacccacggtgggggcaggcgacgaggggccatggaacaggagggaggagacctggcggaagccgagtcgcaggaaggtggtgctccgcatggcggtcgccattagccttcgtgtggaggacgccgagcgacggaaattgggggccacggctccacggcgaagctcgaagcaaggcaaggagagaggccgaggggaggtggagattgatttgggcctatgtgggctttccgctgtcatgtgtgttcgctaatgggcctacacaattcgaatgtgtgggccacaaggaatagaagagaaagcaaaaccaaagcaagtgcagggccaggaatgctgatgggcaatcgatcgctatagggatggggtagcaatagatctactcccctctctctccctccacccctccacatggtttcttttttttttggcaccgcattactttcctattttagtaaatttatacacctcaagtttacacatataaagtttagagaccaaaagtttataagtcaaaagtttatatatccgattcaaatttgaatttgaattcaaatatttttttatatatagtatttctatacatctaaagtttatacacctaaagtttattgacctaaagtttataagtcaaaagtttacatacccgtttcaaatttgaatttgaattatatcctattcaaatttgaatttgaattatatcctattcaaatttgaatttgaattcaaatattatatatatagtatttctatacatctaaaatttatacacctacagtttatggacccaaagtttataaattaaaagtttacatacccgattcaaatttgaattcaaatattttctatatatagtatttctatacatctaaaaggtgtattatacacctaaagtttatagacccaaagtttataagtcaaaagtttacgtacccgattcaaatttaaatttgaattcaatttttttatatatagtatttctatatataaatttttctaaccttttatttttttaaaaaaaattgtgtggtgtataagagaagaaggggaggaggaaggagggagaagagggaggagtatagggggagggggaaggggagccgaactgattacccagcgcgatcactgacgatcgatcgcccattagaaggcccgtgcagggcggttaagatcgttcgagtgtccaatcaaagagttggatatttaatcaggcatgctgcatgcactcctacaggttgagtaacgtccaaggttaaccacaaaaaggcgagatctcgcttttgtatagtaatggaaaaaaggcaatttgcataggttgctcgtgccaaacaaaaactgtctttactcaacaaatcaaagctacaaacacgaacgaaatcaacataaagttgggacaaagtcccccgtattcacacaaaagtaaaaatgcaggtcctgttttaaccacacaaatacagtaaaaaaaatggtcgtgtttgttttacctatgtaactacgctactgctctgattattacaaccatccaccgcgtctgtagcactcccattcacatcgctacagctactccccaaccccacagacccgttggcgatgctcccgccatctctgtggccgccggtgcggctgctgctgctgctgctgtagaagcacaccaccttgcacttcaccacgccggcgcaggcgacgtacacgtggaaccccggcgccaccatcatcttcacgcttgccggctccagcttcccggcgcgcccggcggccgcgtcctccatgaaccgcgagtcgaagcgcgcgccgcggtcgacgcgcaccacgggcagcggcgggtggacggaccgcgcgaggaggcgcaccccccacacgcccttggcggccaggaagaacgcctgcagcagcggctccggccaggcgcgggcgcgcgcccaaccgagggaggaaaccacctcgctcatcttggcgtcgcagaaccggctcaggccctcgctgtagtgcttggtaccgtggaggaggacctcctcccacgtcagcgccgcgatggagtggtacgccgcgaggttggcctcgcagcggcccgccgggtccgccgtgtgcacgtcgccctcggtgtcgagctcgaagtcggcgtggaacgcgcggttcaggaagctctcgaggttcgggccggggttcaccgggctgcggaggtgattggagagagcccgcgtgaggctccgcacggcggctcgcgctgtcgacaccgcccggaggaacgactcgacggggaaggcggcggccgtgggagtggggagcacgcgggcctcgaggcgcgcgagcttcatctccagctcggtgagggagtgcttcagccgcgtggtctcctccagcgcctcgtcccgcgtgcgcgtcgccgccgcgagccgccgcgagaggtcggccgcggccaggcgccactgctcgctctcccctccgtccccaccggacgccgacgtcggcgacggcgacgaccacggcgtggatcgtcgggtgagtgacacgaacagcgagcggatgaccgccccagggccaggcgacgccggcgcgtggagccgctgcttgaagcggcagtcagagcaggacaccgccgcgacgtacgccgcggggtccgctccgcctcctccttcgctcttcgctcgccgcggcgtattcttggcacccccgctccccccgcggtggttgtggagtggcgtcgcgacgtgcgcgtacttttcgtccaccttcgaggccgtcgtcttgccaccgacggcccgcctcgcgtcggatacctgattattacgccgcattgttgaagcgcaatccttgaaaaaacggagatgctaactagcgaggaagaggacgcttactgctgcggcggggaagggagaggaaggcgagggagaggagaccatggctggcgggcgatggatcgagctcgagctcggcgagctcgctctaccccctgcctgggcgcgctggccaactacaccaaggacaactccgtctggttgcgattagcggggagcgtggcgagtcaagtaggggttttctcgggttcagaggggcggtggtgcctgtgcctgccgtgtgctggtggcgacaggcgaggcgatggcgctgtggggcgcgatgcggggcggggcgatggtggtggtgtactggtgcggtggtgcctgcccgcgtgtgtgacgacgtccatttttttttgggttaacttcacgccctcacgggggtggaaggagtggcgggagtgggacactgcggacgcgggacatgaatgccggtcagttcggtcgctactgcgtttaatgccatgacccatctccatctctcgcccccttctttctttctcgtctattttttctccgcgacactcaaaaaagttctccatttttgcgagaagccgagagaatcaggctgtgatccaaagtttagatctaaatttcagtccttttttatcacatcaaactgtcatacacatataatttttcagtcacatcatctttaattttaataaaaatccaaactttacgctgaattaaacacagcctcagagaagaagttatgggattctggaaggagggaaaggtttgcacatcaactcgtgcttcatttgtctcgcgctagctaccgtatgtcgtttgtactgcgtgtcaaagaagtcaaccaaaagcccaatcaattctctagacataattatcttaaaaaaaattctctagacataaggctgtttagttggtgaaataaaaatttttgggtatcatattggacgtttgactggatgttggaaggggttttcggacatgaatgaaaaaattaatttcataactcgtctggaaaacgcgagaaaaatcttttgagcctaattaaatcgtcattattacatgtgagttaccgtagtacttatggctaatcatagactaattaggctcaaaaaattcatctcgcaatttacatggaaactgtgtaattagtttttatttttatctatatttaatgctatatatatatgtccaaaatttgatgtgatgtttttgcgaaaagtttttgggaactaaaccagagccataatagtactaagtactaaaactttttcctcgtagctaatcacaggagtagtattacagacgaatactgttttagaagctgtactcctagctaaattgagtacttgagacatgcgaagacgggatctataaactggccagccgtgatcctataggactatagtcacggtgagacattgctactacgtaccatcccagtggcatgagcaagaaaacaagcgtcatgagttcgtggagggacacattaagagcggttggcgagtcggttacatgcatcataaatccggagctccatcggtctggaccggccggccggccagccggcgctgtccgcttcaaccgctgaatgaattgaacgcgatccgtattccgcgtgacaagtgcgtggctcttcgttgtctctcctagtgaccgcgaacattgcaaggcgccggtcgaggtttaccgttctccatttgtcggttaattgtaccggagtcagcagcggtaacgacgtcaccggtgacaacggactatggtggtgacttcgcctcggcagatttcacgctcctcctgggagtccatcggcatcagatttgttcagacttctcacccaaataaaaaggaactcgttcagactttcaggctgccccagtgtgcagtggaaggagctcctctaacttagggtgtgtttagttcacgccaaaattagaagtttgattgaaattgaaacgatgtgatgaaaaagttgaaagtttatatgtgtaggaaagttttgatgtgatagaaaagttataaatttgcagaaaaagttagaaactaacctaggccttaaagttagagggacatgtgtccctgacaggtgagacccacacccacgagcccatatgtcagtgactgatgtcccactaacttaagtgagagaagcctcatccgtgtgcagtgcagttcaattcaagaccagagctctggcaaactgctgtcgagatgaaatcacccgtagactgctgttttcagcggttgttaccatgccagcaaacgagcgcacagttgaccaagtcaccgagaattaggactcgggaggatcttaaattggatattttaggacttgttagctttattccagtttttaatttcactaaattttaataaagtaacaaattaaataagacattatcattactatcttatcgaatttggtagttctaagagtttcatcttgaaataaacactgccaaaaatctagttaacgccaaaattttgaaaaggttaatcagagcaacgaagtaagcaagtccttataatttctggatatcgtttaatgttttattgtttccagtcaatcgttatactaactcttactccaataaaaaacactactatatagatagagtatactgtataaatagcatttgcatggctgatatacgtacaagaaaaagatcaacactggaatgaactagtatttaaaattgtcaaaaagttatccttgactagtggtctcatactacgatcaagccactcacagaatattacgcctacagtcactggaacggatacccttatctcaatcgggcggtaagccccatctcaatcgggcacagcgtccgtcacaggctagaagtcactgatgtgaagagttatctcaatcggacaaacggccgtcacggatgaatctatctcaatcggaccctaagtaaagcccgtcaccgataactctgacccagacgaccggtcaaactatagcccgtcacagatgacttacctcaatcgggccacaattagagcccgtcacagatgactactaacatttatcgggcctaaactagagcccgtcacagatgatactcatctcaatcggggctaaactagagcccgtcacagatgactgctgaccttaatctggcctaaattagagcccgtcacagatgactatcatctcaatcgggcatttagttatggcccgtcacagatgactataatcacaaaaaaaataaaatttgttttttggctagcctcaggcctttgctagccatgcccgctgcataaataacagaaacaaacacagatatccaatatccccagctccccagcatcacccattcatatacatatgcattcacatacacagacatcaatatatttcacacaaccacacatttacagccatctcatatttcacatccattcacatatttcacatccattcaaatatttatcatatttcacctgcaaaaccgagttaattagatcaaatatttatttagtaagtcttaacataaacatatgaaatatatacataaatataagcatcacatttacatcatcacagttgcataataagtgttcatcattgcctaaacataaaagttcaacattgttcatcattttagtttaagcctaaacatttatttggggttaattatttcgcagaggatgaagctggctatctcctcgcgaacctcctcaaagctggtaggcagagacttgattattgtgccctacattgtcataattccagattagttgatcgatcatatataagtgctaaaatgtagttagtctatcacaattgagaccaccgacctcaaactcagccaaagtcttcaccttatctctatacagaaggcgcatgttgtggcacacatagaatctgcactggtcacctatttgttgcttcaccgggaagtcctttttgtggatgagggtgtcatgtcctatcttcctgaggcctcctctttgcacgtattgggcccacgcttcatctatcactagttgaattggggtccaatcatatgtgttcttatcaattctggagttcaggtagtgacatgtactccacttaggtgctatgatcagaaggatccaatgggcactgcggcattaatatagtgaaagttaattaagtactgaaggaatgtgtcatgctgttgtgtatatttagataacacacttactattgattataggcgcacataatgtactccttgtcttggcgggaccacaaggtgtcgtagatgtagttgaccattccttgacggtcattctgaagatttgtgacagtgaccacttgtggatcaaggaaggcaacttccggtgcattcttctgacaccattgccaacttaacctacacacaggataaacgatcttgtaagcgagttaatccgattgttattaccagattgagttgggtgacaatacttacaaggagtagcacttaaggaggcttgtgtccaccgctcggagcatgtagaggtcgaatagatccttgaagtcgacgacgatatcatttgttggaccaaggaatggctttccatcatgctctccaaggatatcggtagctttattcggcttcctggcgttagatttctccatgtagtatgcgtgaaggtccttgcaagcggtgcccattgcggcaagcacgtcatctctaaccaatggcatgcctagatggaactcctgtggagcagcgtatttcttcttgacctctttgcccttagtctcttcctggcccatgcccagatctagcttccttggagctagaagcgaggactgcacctttcctccccttcctctcccctttgctttgggtttatcgagagtaattctctgaggggaagagtgtgccttcctgctctttttcattggtaggggttcatgaattgccttgctgtcagcctccgttcggtcctccccaaaatccgtgtcgtactgcaactgcacatcgtaagattgtgcatgacgatcttgagcaggaggggctgaaagagcaaaggcgggtctctttggtggacgaccgcctggtgcagtggttggcctcgctgtaaccctgatctcaatgaggtccttgggccattggatgaaggtaccacaggcatttcctagtgagaggacctcgtcgtttggtggatactttagtgggaataactcgtattccggcttcaccgagtcgacttgaacttttgcacagtcgcccctgagttgcgctccatgcactcttgtctttggggtcggcttgtacgcaagtcccttggctgctggaaccgtgaaggttggcatcaccataactgtgagggtgtagctcgttggttcctgcgatagattaatcattttttttagaatattatatatcatatggattcgttaagtctttcatgcattgtggatgaaacttttaccgttatgtggtcgacggcgctgtcgaccgatgttgctcttcgtgcgcagcagcagcggcggcctgggggttctgttgctcttctcggatctcttgcctaatcttggccctcatcgactcgagcttttcgtagaattcagatgtcagctcaactcttatcgacacctggatcttggcttcaaggcgtgcatctttcttcgccttgttggaagtccgcttcttgtactgccacgcatagtctggaaatccatacttccagggaacagaagacccaacgccccatgtccatccacggtgttccttgttgcccaacgctttcatgaggaggtcgtcctcgcgtctttgagagcaggcctcttgcgaggcttgttgatcggcaaccaactcctttgcattacaatttagtggggttaaataaactgcatgatcagaaacaatgcgaacatctagttggactacacacttactatagcttcgtatactcgttgatcttctggatttggcatgatgattgtgccatcatccttcttctggtacctggtcctggcccagttcctagcccgagggtgtgggatatcgccaaacacaagtggtgtgttcgattcctccgcttcttcatcctcacgctgccattcctctttcttaccggcatattcagcggtgccaaaccgatgcggatgctggttcttggtctagagcaagcgatatgcctcgctactagctctggactcgggggtcgacttcttcacatggaattcctcccagacctgttccgtgatccaaggaaatttctctcttggatctggattcgtcgggttgtagacgaactcgccgactagcttagtcttgaaattcttccaagcattgcccataaccttgaaagcagcccgcctaagacggtcctcatgctccgcagaataatcgaagctctccttgaacgttagccaagcaatgtccttctctgcggccggcacgagcttgatgtcatcttgcagaatactgaatttctgcctacctatgaccccgcagatagacctaaatcggctcaatattttctttggagatgtcggcaaccctacggcgtccatcgctgttatgcggaaccgttccttagggattttgttcccagtcctaggagtacgtgtccttgaggacccactagttgtcgtcgacattggttcgccttgctgagacatcgtctactttttttcaaaataacaaaaatacacaattcaatgctacaatctattacaatgaattgaatgtaacttataaataaatgaagcatataaataaactaaattgcacatctcacagtaatagaatgaattgaatgtcacatataaataaattaaacatataatcaaatcctaaaatcataaattcacctcataccatctattcatccacatatcatgcatctatcactaaattcattaatgcaccacattccatctattcatcaacatgtcatcaatcaaaaaaaccattcgttcaccacatatcatcaatccctaaaatcatctatcactaaaatcatctatcactaaattcattaatgcaccacatttcatctattcatcatcatgtcatcaatcaactaaaatcatctatcactaaattcatcccaacatccacattttatcccaacatccacatttcatcattcaccacatgcaggtagcagagggcggcgcgatggaggactcacctgaggtcggccgggggggctcagtggtggcggcgccgggctcggtgaagacggcgggctcggtgacggcggcggcgggctcggcgaaggaggagttcgcggcggcggcgccgggctcggtggagggcgtcgccggtctgtggagacgacgccgggctcggtggagacggcgccgggctcggtggcggcggcagcggtgacggtctcggtgccggtgccggtaagggaggacggcggcggcgaagtacgagttggcggcggcgctagggttctaaggaggcgggaaattgtagcgggacttagaaaaatttttgatccgatctgagaaaccctagttatagtagagtgatgagtcatctctatcgggcttggccgtagggcccgtcacagatgactcatcggtgacgggctccatactaatgcccgattgagatgacattcaggcccgtcacggatgactcatctgtgacgggccataagataatgcccgatagagatatctctatcgggctttaactaaggcccgtcaccgatgactatttttccatttttccaaacaagtctttatatttgtgcgtacaaaatatatagctgctgtataataattcattttatcagtcataatatattttcatattctaaatgatttcaaatcgaaatatggtgaacaacaaaattgtagaggttatcaagatctacaacttttattttagtcatttttctatataacttttttcccaacaacttgaaattgattttgaatatatgacaaatctaaacagcatttgtaaatactaaatgatttcaaatgggaatatggtcaaaaacaaagttgatcctctcatcaagatctacaacttttattttggtcatttgtctatataactttgtttccaacagcttgaaattgattttgaaaatatgacaaatctaaacagcatttgtaaatactaactgatttcaaatgggaaagccataaaaagcaaagttgtacgacttatcaagatctacaacttttattttggtcacttcttcatccgacaaagtgatagtatcaatgtttataaaattgacatatatgtgttgatgtttatgaaccagatgagagaaatgtgatttttgtgaataatataattatcactttgtcggatgaaaaagtgaccaaaagaaaagttgtagatcttgatgagaggatcaactttgttgttgaccatattcccatgtaaaatcatttcgtatttacaaatgctgtttagatttgtcatatattcaaaatcaatattaagctgttgggaaaaaaagttatatagaaaaatgacctaaataaaagttgtagatcttgatgagaggcgggcgctctgttcatggcgatatttacgttctaaatcatttggcaccctcaaattgtttatgacttatttagtcaattattctacctcagctcttttttttgttcgcacattttttatgacttggttggaaaaatggaaacttagtcatcggggattggtccttgttaaaccctcttagtgatttttcaattttttttgggcattattttattgctcggtacctgtggttttatccgtaacgggccgggggtcctttcttttggtcatttgtctttcgaaccctgcttcttctgtctttcgtgacatgccttttctcttggacgaatggcacatgcccattccccttttttttgaaaattttcagttatctacgttttaaaaattaatctccatgtgattttttcatcgcacgttaaaacgaaaaaaactctttagcataggattaatnccccctttccctttctttaaaatgcgacaatctatttttttttttggttttttaaaacctccctcttcccatttaaattttttttgtccaaaaccattatattttattcgcttattccttgttgccttttttccaaaactttaaatttttcccccctcttaatttgggc

SEQ ID NO: 2776 - DNA, 3263 bp, Oryza sativa
cgcatttttgaattaggccagaacggtattaaaaataaggatgggccggcaacccgctgccggacttcgtttacctaagggggttggtggaaaaagtaaaatggttggcagcacctcgtagtacttcgaaattttgtgtgcggttgggaaaaaacaaatttattgggcagggtgtggggcactcgtgtttaaagggcttttcgcttccgtttccacaagaaaatggttttgatttgttccgccgtcttcgtttgctgggatttggttttcgggccgctacatttggggacaaatacggctcccttcctttttactactactccttttcattctttttcattttcattttagtagatctactgcagtatccggtgctgtgcgtacagcgtgcttcgtgcttggaactcgcactttcaccgaatatttcctctcttttttttatatatctctcgcaaaaacaaattagcaatgtttttctttttgaaaaggttaaaaacagggttgtacagcgagtacgatcctaggatcacgctggatgtaacgagacaaaggccactccacgcgaaacaattgcagatacatctgttcaaacagtgcgcagaagtttcgaaatccaaactagtagtacgtgcaggtgcagttgcgaacttgccgttgcggttgccgtggcactcgagtcgacttaccagtcgcgagattttggtgtagtttgggttgttgggggagctcttccctcccctccccctcccctcccctcgctcggttcagctgtggccacgggctcatttgctcataatcttaggctaatcgttatcgtttggtgagatttcacaaactgggaagacacgagatggtcctctcccctgaaggctgaggagataaggatcggattttgatttcggccccaaaaccggatgaagcacactgtcggcgatcggcaatcaggttcccgtgccgtgcctgcctatctcccgttgtcaccaactcaccacacgcgtcatgagcgcgagctcctctgaaatgcatgattctaaacatacatggatagaaaaaacatacaattggtatgtcatgtgctaccgaatcttctaagaatcataaatacaggaatatgaaacatgccttctttgggtggttcaaagggaaacttggtggcttattgagagagtagagagaaagagataagttgtacaagacttctcataggataaaaaagtgtttagttcacgctaaaattagaagtttagttgaaattggaacgatgtgatggaaaagttgaaaatttatgtgtataggaaagttttgatgtgatggaaaagttgaaagtttgaaaaaaaagtttgcaactaaacacggtgaaagtggtttgagctcattacctagtttcctatgaaattagtgtgtagaaactcaattcatgggaattttgtgggttcaattcctttgttccaaatggcatgcgtagaaaaaattcctaggggttgcaatccaaaggaaacattattgtcttcatcgatcaaatgcattggtcaaaaacactgctgtttacttactgacgggaagaagtaaacgggggcttaaaaaaattgtccatgcaaccgggggaaatcagatggaatatgcgtcacgtatggagtacagtgcaaggttaagtaaaagccctttttattctgtcttgagcatcaagcgtcgtcgatgtgcaatggacagcacagcaagttgaacaccaagttccacgatagatcagatcgttctcccaagatcttgtcggtcaagccggaggcgtggttccttccttttctccttggcaacacatctcgatgctcccaagaaaggaagccggtactgcgtatgtggccccagacgacctccacggcgagagaaagtgacacaggttgacgatcaccgagtatttttactgatggaagttcggacgagtggacatattcgccgtggcgacgtcaatggctgcaacagcaacaggcagagaagatttttttgccatggcgacgccaatggcagcaactgcaatgtcacatttgtcaatggcaattgggaaaagccacgcagtggcatcagtggccagcttactgcaggggctttgtagggatttcagttttagccaaaataaatactgcagttgtgttatgtagcactctgttgcaatggcctatttcctagttttatgtcgtgtcacacgtaacctccaaaatatatcctatgtacataggccatatatcctatgtacataggccatgtttggttctatgggctaatgtttagccctcaccttttagcctcaaattagctctcaaggatccaaacagatggctaattttgggttaatatgaattagcccccctcaaaacattagctcctcccctccaagaggtgctaatgaggctaattttgtgtggggaccataaaaaagcagctctctctctctctccttctctcccatctctttaaactctctctccaccttttagccttgaattagcctatgaatccaaacatccaccataggataatgtttagcctagcaattcatgactaaacattagctctcaaaattagctctgggcacgttcttcaaatagtaatgtgtccaagaaataggatatgttccctaacctccaaccacacattgcatagaatcatctccacatcgaaaactttggtgcaagtaacaatcaagaaatcctgcgtgacacacatttggggccaaagaataaaagtgaaaatgatatgtaaacgaccaaacagctatagatgacagcacaggacggaagctgagccagagtgtcaccctccatcgaggtgtgttgagaaacaacatagattactcctgaacaaagaaggtgccattgcacaaggaccaatttaacacgcgacacacaacaacaaacattctagcgcacaaaactagaaggtaaataatctcggcattgcatcattacacatctgctattgtcacctcaacctcaacaccaggttcaattgttatggaggttatctgcttcaccacatcaggggagctgataaggtcaatcaccctcttgtggatgcggaactcaaaccgatcccaggtgtttgttcctgataacacagagaatgtgatttggtgaagttaatctcatgacacaagaatattcaaaatgggcaggtgtacaatattagcattcacaagaaggataaatcaagttagacatggcattactagctcaagcactccttaaattagaagacaggctacagtttga

SEQ ID NO: 2777 - DNA, 1964 bp, Oryza sativa
  unsure (1)..(1964): unsure at all n locations
gtagataataaaagtaagtcaagggagtggatgtgagcaatacaaagagagagcaacgtacagctgatacgggacctaagaagacttggatgaaaacttatggaagggttagcgaggtgtgctaaataacagcgagatgaagaaaattaattggaaaagatataaactaaggcgagtcgcaatagagtaatgcgtaagaaacgtgaatgtcatctcaatggggcattagaatggagcccgtcgcaaatgagtcatctgtagcgggccatcggggaaagccgaatttaaaatagattattctgnatgggacataaantaaggnnnatcaccgatgactcattttccatctttcatttgaagtttttgtatttgtgagtgcaaaatatatagctgctgtgtaataattcattttattagctataatacattttcggatactaaatgatttcaaatggaaatatggtcaacaacaaagttgatcctctcatcaagatctacaacttttcttttgttttggtcatttgtaataaaacaaaattagccatattaatgactacacatatcaagtctttgcaataaaacaataaaataaaatacttctttcattacaatagataagtacaaatgcatcggtcacaaggttatgccttccgtatgatctgaacgagtatatgccacaggctcttggggatcatcgtcaaggtcaatgtgaggtcttacatgaagattatggttgtattcttcttcatcgacgacgttgtcaactcctacaattcggcgctttccatccctcatgatgtgcatcctcttgtttgaagggtcttttatgtagaatatctgctcgacctgtttcgcaagtacaaatggttcatcggcgtatcccacctttgatagatctactaaagtgaaaccttccttgtcggctttgacaccagtgcgtagattcacccaacggcagcggaacaatggaaccttgaacttgacgtagtttagctcccagatctcctcaatgcggccgtagtatgtgtttgacccaacttaatcctggaacgcatctatacggacgccgctgttttgcactgtgcttttgtcatcttgtttgacggtgtaaaatgtgtatccatttatatcgtatccttgccatgtgtctacggtccaagacggttccatccccaacaactgtactgtctcatttgggacatccgtggacattgtcacatgattcttgaaccattcgttgaaccgagaattatgttctctgttaatccatgcatcattttgccccaagttctcatctcggattttcgctaagtgctcctcaaagtatgggccaacttctgccatatgctggagcacagcgtaatgagcctgcgcatacgacacttgatctggcctaattcttttccttccgattgtgccaacacctgacaaccttcccccgtgatgagacgcaggaactccgataggatcggcatcggacatgtaattgacacagaactcaatagcctcctcagtcgtgtaaccttcaatgatgctcccctcaggtttagctctagtacgaacgtatgacttcagaactcccatgtatctttcaaacggccacatttcccttagaaaagttgggccacatagttttgtttgcttcactagatgaacaaggagatgaaccattatatcaaagaaagacagtgggaaaaacatctccaggtgacagagggtattcacaatatcggtctgcaacccatctagatcttctggatctataaccttctgtccaattgcattgaagaaggagcacagacgttggatcgtgtgacgcactttcggtggtagaatgcctctgatagcaactggcaagatttgtgtgattagcacgtggcaatcgtgagacttcattccaacaagttttagatcgtccaatttaacatgggtnccgagntcggttatgcagtcaacaatgacac

SEQ ID NO: 2778 - DNA, 771 bp, Oryza sativa
  unsure (1)..(771): unsure at all n locations
cgggcccnttagangtacantctancttggnacccccccgagcgggcgaggagcgcggcgcggccccgcttgagggcggggtcgtagtagtcgttgaagttgtccagcccaagcacgccgtccccccgccggcggagggcggcggccgcgtgcagccgacgaagcccgcggcgcccgtgacgaggacggtgagcccccgcccgttggcccgcctgacgcgcgcggacgcccgcaccttcttctcccatgcggcgccgccccacgtggcggcggcggacggggaggacgtgtggagggagcggcgcggggagtcgggcgccgcccgcggggccggcgcggtggagggggagaggaggaggaaggcgaggaggagcgagagggagcatacggaccataaggcgagcttggagaggagcgaggtcggcgaggggtggtggtggctcgtggcgaggcggtggtggtggaagtggtggaactgcgggttgacggactccgtgccgcccgccgtccccggcgtgtcgggcgcgccggtcagcttgtgcgccatctgccgatctgccgtaatgtggattgagcttctcgtcggatcttgctaatttgggtggggttggggagagagatatgtgggcggggggggcttttctttccttttttaacctctttatttaaattaaaccccatcccttcttctgggttaacaaggccggtgctctttttgttggttttcctatctgacccgtaacaattttatggtcccggttctatttttct

SEQ ID NO: 2779 - DNA, 2296 bp, Oryza sativa
ttcaagcatgataacactgcgatcttctcatcattcgacaatgtgtggcaggctggagggaggtacactctacctgtctctgcatctcgtatgggttggagttcactgcgaatattcatgtcctgtagatcaaggcgcgcgttcaacccgtcctttgtcttcctgggaatattcaacatcaggccaaccaaactctcacacacattcttttctacatgcatgagatcaatgcaatgtcagacatcaagatctttccagtaaggtagccgccaaaatatggattttttcttccacatacccttctcctttgtcttgctacgttttcttttcttcccaaactcattgcttatgtccttgaccatattgtggacctcatctccggacaaatctttgggagcaggctgaagttctctcttaccgttaaaaattttcttctttcttctaaatgcgtgacgtagcgggagccacctccgatgacccatgtataccatctttcgtgatttcttcagccaccggcttcatgtatgttccttgcaatcggagcatgccttctttccttttatagtttgtccggaaagattaccgagtgcagggtagtcattaatggtgcagaacaatagaactcttagcttgaagttttcctgaccatatgcatcccatgtttccacaccttctttccaaagaatctccagatcgtcgttaacaggctccaggaatacatcgatatcattgtcgggttgcctcggaccttgcattaacaagcacaacataatatatttccgtttaaagcataaccatggcgggaagttatagttcgcaataagaactggccaagtgctgtgaatactactcatgtcaccgaaaggatttatgccatccgtacacggacatatctcatgtttctagggtcgacagcaaagtctttgtgttttcgatcggtattcctccattcaatcgaatccgctgggtgtctaagcataccgtcattcgttctctccggggcgtgccaacgtactaacttcgcttcattggggttggcaaagattctcttgaaacgatcaatgataggtagataccacacaacctttgccggaccacccctctttgacttctttccttcgtcagcacttttctttcacttgtatcgagaagccttgcagacaggacaagcatccaagtccgcatattgcttgtggtacaatatgcagtcgtttggacaagcgtgaattctacggacctctaaccccagtggacacagaacatgctttgcttcgtatgtcttctcgggcaatgtattctcaacaggaagcatagccttcaaaattcctaaaagatctgtgaaactcttgtctgtccatacactacttgcctttagcttcattaggtccaaggtaactgacaacttagtgtgttttgctttgcatccagcgtatagaggcgtctcggaatcactgaccaacctgatgaacttcattccatctctctcattttgggctaggtcctcaacgtcacgtaacatgtcttgcagcagatcgtgatccacatcaaccatttcaccgcccaatggagaaggtataaacatgtcatgctcatcttcatcttcctgattatgcgcaccacttctgtctgctgctgctccacttcctgattcttgctctccatgcttcacccaacatgtatagccctccatgaatcctcgttgtatcagatgaccgtgtacgtcctctccgctatcaaacatattctcattcttgcaatctgcacatggagaacacatgtaatcactgtttcttcttttccgatcctcctccacggcgttcataaaatttattacgccctttctgtactccgtagaatgacgtttcaaatttttcgcatacatccaacttcaatcaattgctacaaaataaaaaaaacaaattacatgcacatcttataagatcagtattgcaaaagtaagacgttatgaaattgctcaattaatgattaatattactcacttgattgatccattttgatcacttttgggaattttctgttttccttggaaaaaagacaaaaaatcgccccctacagcctcccaccaaaatagtgaacagtgggatacaactacagtaggtggtggggggtatttatactgtgcaacaaatatctgtaacggccctaaaacaatcaactgtgacgggcatacaagtaatctctatcgggccttaataaaagcccctcaaaaagagtgtcatctgggacgggcattaaacttatctcaatcgggtctttagttggagccccgcaccgg

SEQ ID NO: 2780 - DNA, 2894 bp, Oryza sativa
tatggaggagtacattgacttggtcgcagttgccacgattaacaacgttcagggtgagtccccaacacgatgaggaacccgatgtgagattgaattcacggtaagcttggagattcgtgcttgtccgcaagcacaaaaacgacagcggtagatttggcgtttactgtgccagttggggccaccgagaaagggtggttgcgttctgggtttccctggatgatgcgacccgtatccaagtcctcgtgccgtacgccggctaagcatgagtaggccactgtttacgtgggcgtgcagaggcgaactgcatttgctacgactgcctactgctattgctgtgctatcgtgcaccagaacaagtactagctacagtgctactgctaggcgtgttagtttagggggtgtttgggagagaggggctaaactcagaaccgtaagtctctaggagatggacttatattttttagagaggggctaaagtttatctcctctctcccaaacactcttttactgcactactcaaaaatactcagcatgtactatgagcatctaatcctaaatacttaccctaagatgccaggtagactcatatataatgaggtgaaatagagaggaaaagagagagaggatgagccactcccatacaagacgtaacttttacataacctataagagaaaaaggagaaatgtgaagagaagattgggtaaacaaataaatttaaactattatggtcagtgtactagaattatcgtagatgtgatttattgcgcatgttacctttttattgatgaatagtctacatggataaatttaagggtggcatctacgtacctcttctataaaggtggcatcctttagagaaagataatagtggctataagccaactataaatttatgtggaagataaagataaaaaaaattgatgagttatcatgtactaaaagttagttatacgtacatatgtttcaagttaattgcattgaatatatagtgagagaaatagagaggccggaggaaaaaatagagtaaaccttataagtaactattatatatgttagttttaatataaattaattgttaatagttatctacatattaaacttgctcttaaccagccaacctgtcatgctccttgacttggtttcactttcgcactttcgcatgccttttcgccgtgctgtgattgagtacgggacaatcccggatcagcggatcgtcccaatcatttgtgcgatcaatttggctcagctcccttattgatctatgcgtgcactgcgtcgtttggatgtgtatcatcggctaactggtgcaccaaccggtcgaaaattaagagaattggcgtgtgattaaccagtcgatcaacagctccgattcagcaaaaattgatcaatatatagtacgtatattagttgtttactatggtggcaacaaaaacaacaatttcagccgcaaccacagcttcaacaagagcatatgatgagaaaaaaaaaataattatcggcaggaagaaccgcactaatatcagccagaagggcaatatcaatatcaacaaggcgaaggacaatatcaactttaaagaaatcaatatgaacaacagccgatacaacatcaacatatgggtaatagaaacaaagagtgggtcagaaccgcatcagttccccaccacgaaccgattcaggggatgtctttccaagacgatccgcgatcctaaaatgggtggaattcattgtcggcctcttgtgcaaccagcgttcactcctcctccacagcatccagaaatcaggtcaagtataattcctaatctcgtactcctaatttcgtagtattaatgataattatgggtattttcttattaagattagattaagctcctgttctcctaatttcgtaggttatcgatttccctgcatcggccaaatggccacgcgtgcatacgtacggaaacctcccacggtccgtgcgtcggtcaatgcatgggtgtggtgtccggctgtccgctgcagcgtttgtcggacgcagacggaaaactgtttcgttcttcactgggcgaggccgagatcgagtgcatggagttcagttcgccatttcgccgcggccggagaccggtcgatcctcctcctggcgcgtgtgcgtccgcgcatggagacgacggaacgtttgtgcgcactaccgcgctacgtccataaaacacccctgttcgccaacgtccagctcggctttttacgtggtcccctcgacggacgctggccccgtacttacgtctgcaagatggaagaaaaagttggcgttgcttgatctagtgtgtggttggaggagagtactgcacttctctggtccatcgcgatgtctcgatctgaacaaggagaggatataatttggaaaacattttctacacatagatgtatacatgtagtttaaatagttatataaaaatttataaaattcgattagatagattataataatataagatactatattagtctaaattcgatctacacataaagaaacaaaaataataatttttttctacaacactatctgattttatcatttctgtttctatagttatagatcaaatagccttgcatttatgtttgtagaattatatcattccaatcgatattactattttattaaaaaaatctataactatttaggttatatgcaaatgatgagtgacatgataccgggatgtaaaaaatccatgtccgaggactttatcagttaacatagcgtagttttctccatcatcttgctagtgacgagtttatggtccaaagctgtatcagagaccgttgtgatgtagaaatcaaaccatatatcacttggaaagaacgtgcagatgtcccttttttctccagcaagagttggatgaatattaagatttttgtg

SEQ ID NO: 2781 - DNA, 689 bp, Oryza sativa
atcatataaaaggaattgagatattccttcatatgggacaactttaagtcattttaaattctagtgactttgacgatagtaataatattacagaaggaaccggcggtggctgtggacactgacgagcgacgcgtcgtcgatgacgggaccacacagcgtgccgtcggacttcgtggtgtaggccatgctgacgaacactacccgcgtccgtttctccgtggccgtgaactcgagcagcccgcgcttgtagccgcccgtgccctgcgactggtacgtcaccttcacgctcccgcgcgacgcgtacgcctgcacggtcagggacccggagcacccgtcgccggcgtccccgacggagaactccagcctgtacgaccgcccgggcacggtgctcacctcctgcagcatcgccgtctccatgccggacaccagctcaaccgcgcgggcgccgcccggcacagcgtagtgcgccgcgtcgatgtacttgacggacttggtggtcgacaggatcgtccacggggacagcggcgagtagtcgtcctcgtccatgggcggcacaagcacgccccaggacgtgttggggaagatgtacgggccctcctcgaagcccccattcttcagcatgttacctggttcattttgttcgattgtttcatgactgtgagcacatccttgtattcaattttgtagag

SEQ ID NO: 2782 - DNA, 3062 bp, Oryza sativa
tcctgcaccccctttctatatgaaagctgctctaaaatatcatattaatctattttttaagtttgtaataattaaaactcaatcaattatacgttaataccacctcgttttacgtaaaaaacttaatcttcatcttcatttttagaaaaaaaacaccaagcaatgaacagatgatatattaattgttgctgtcggtgagttgtttagtcgtgttcaaagcggagtcgagtacattaacggctcatcctctgttcaaatccagtaccggaactcgccgattgggaaattaggatttgaaccggtccgtttcgatgtagttgtctcgtcgtcaaaaggattagatgttctttcgactcgaaagtgaggcggatcccaacttcctaccatttatacgttacagcgtaacatctatatatagcgaacagtaacgataaaaaaaagatagttagttgccagatatactgtccatatcagcagctagagcaatccgtttctctatcacaaatcgtgacaaattaccctgtttaccaaatcgggtctcatgaaaggtgccctgttcaacgcagagaaccttcaggaaaatattgtaggtgcaaccaatgcagatcgtgtcacttcggacaaaaaaaactgtttgctcctggatctcggtgtttctcggaatgaccggtcattgacgtaccggtcggacgcgtacgacaatttgcatgcagcgaccattaatcgacgtacgcctgcccataggcgcccgatctcgtgcgcgcgccgacaatataggcctatatcgtgtgcacggcgagacaggcagtacgacgtactgtcctctccaacgtacgtcggtcgctgttcacgacgctgctcgtgattacttgtagtactactactagcacagtacaactagtaaatacttcctctattccataaaaaaccaatttagtgctgaatatgatatatcctactactatgaatctggacatacctctgttcagattcattgtactaaaatatatcatatccagttctagattcgttcttttcgggacggagagagtatcatgttagaattgaacgacacctgactaactagtggtgctaatttggatcggtgatgggtagagctagcgtgcgtgcgacagcgatgtggaccgggaggaacaatcatctcgttgacaatggcgtgccgcctctcgttgcgcgtcgcggcgcctgctgccgggtggcgaccccgtgtggcgcgaggagcccgccgctcggcgacagtgcgagcgagcgatcagctagagcggcgtaacggtgagagatattggcgtgtgactgtgacctcacgcgcggaaacgactcctggtttttccgttgaaacgtccatcaccgcctgagcagagagatgcaataactcgtgccaccacggcaatatctccttctcctctgtctgcataccagatatcttaaaggtgctagagtcgccgcaagcctagccgatccacgtcatcaaattttgcacaaaatccctcattattttggtatttctaattgagtccacgtgatcagagccgttctttcccacgcgtggacaaaatctggccatccatttcctatctagatggttccgcccttaccaggtcgtggaatcgacgagcgctcctctccccacgtcgcctccccgtccctgatcccctttctctcccttctccgatcggcgattcggtggccgagagtcggccgtcgttccaatcgggctgcggcgcgtcgatgcatctccaagaccttccgtcgccgtcgttttggtccctcctaatgtcgcatcctgctcgccatccctaatcccctttgaaaggaccttgatgtcgcctagaggggggggggtgaatagacgttcctaaaaattatcacaacttcatagcatattagagtgatgataacttttgattcaaatcgaaacttccggtatgggattggaagttccggtctcaatcgaaaagttcggcggataacggaataaacactatctattaacttgtagctcaaacaaacaaaatgtatatgaatcaaaaggtgacaaataacgtatctaagcaagatataaggtcaccaactaaatcaattaagcatgcaagtagatcgggtaaaaacaagctcaagcacaatatgagagaatgcaagaacgggcaaaccaagaggggagacgcgcgatttgtttcccgaagttcggatccacggatcctacgtctccgttgaggagccacaagggccgggcctatttcaaccctttcctcacgaggttgcacaaatgcactcctcggtttcactcttgatttcttcccttgcggaggcgaaatcgaagccttcacaaactttccgtggcacaccacaaccttgggtgctcaccggcaacgcctagccgtctaggagaccttagtccccatgagtaacaaacacaatcgaagatttgcttgctatgaactcgagtgctcaaagtatggagtgaagctcaatagctctcaacttctcaatcactcaatccaactcttttcccttctcaaatccctctcacaaagaggcaccacaaaggatggagtgaagctcactagctctcaactcctcactctctcaatccaactctctccccttctcaaatccccctcacaaagaggcaccacaaaggtagggaaatgaggatggctatttggctttggatgtgtctaatactccccaagagcagcagccactcaaatgaggggtggaggagtttatatacccgagcccctcaaaaactagccgttggaggccaagactgtaattttcggagtttccgaaaagcattttcagacaagtccgaaaacttacagaagcaaatctcagattcgcagccattttcggaatgtccgaaaagtttcggagttatccaaaaaattttcggactttccgaaatgcacagagtaaaacgactataacttttcgctcgggagtccgtttttgatgaacttggactctatggaaagctcactcagaggactacccaactcaaccaaaaacaaggactaaaaccactcaaaggataggtt

SEQ ID NO: 2783 - DNA, 1098 bp, Oryza sativa
ttctcttctcagtaaatgatttggaaaacaaggaagatgtgcttgcatcatgtgatgaactgatttctattccctattatatttcttgaggttttaatttattgttgtgccctgttaaggaacatggagctcaagtcatatcgacaataccgacagtgccatatatctttgagtatggtgatggaaggtgcaaaattgcaattattatattatatatacttgttctctgttagttttctaatcatggagtgctttatccagcaaagtgcaagtcgagaaccctgcagctttggcttcaaatcctggaaagcgtatagcagcttgttgggaaccaacagtcattgcaactattattattcctagtgagtaagatctgcttcctttctcatacactcttttagttcatgaatttatacatatttatatttataaaccagaagttcttgagactacccaaccgctttttcaggtatgttgggccagtaattatgctttgttcagagaggaggggcgagcagcaagaatatacattcattgatgcgtaatagtttactccagaaatcattttcttaaaataaattttgttcttgccttacagggctattgtttgtttgtttgatgcagccaaagggctttgttgaagtaccgattaccattgagggaaatcattgtggatttctacaatgaactgaaaagcataacatctggatatgctacttttgattatgaagattctgagtaagtttccttttcaactcggtaaccatacatggtcttgtctaatcttttgattttttttaaacattctgagatggaaaggcatgtatctgttttctttcatcaggtggccttattattcttttctgtttttttgctcctttttgtgatgattattttggaggcctgttttatgccccattcctgaaattcgtactacaccttgctcacaattttctactccctccgtttcacaatgtaagtcattctagcatttcccacattcatattgatattaatgaatctagatagatatatgtctagattcattaacatcaatatgatgatgaactacgtgcagtgaacgccatcaaaggggcg

SEQ ID NO: 2784 - DNA, 7226 bp, Oryza sativa
ttttttctgctgtatatcaggtaatgtgaagtaagaaaggactgacgcgaccaaagatcgtgagacgtgacgagctggccgaggatgaataaagtgactgctgtcagttgtcacattcacaggctgcgatccagaaactatggatgggactatgtagtaacgtgctgatatattattgctaagtgttactactgcatggttgcaagggtggtagaagtaccttagcttccaagatcgttgtaatgtgtgagtttaattttggcgttttaagtaataagtctagtgattgcaggattgtacggggtaatgtacttgcattatccattataatcttaagcatccaatataattatgcaataattcgtgccttactgctcttagctacagctggttgggtttgaaggctttatttgttattcttacatagtgtatgttactcatgtcattatttagagtctgctatatactgcttatgcattattattatctgttgttgaacgtttgcaaagttttagcgggcatgtttctttgttaaagaaaggtgcacgaactaattcattcagtaaggactcctttgaaaattaagcaagaagtttacagtatttgacagaatttagttcaacttctaaaaaaaatccttcagaattcctccattgtaaatgagctgtataagatcatagcttgcataagaacaaaaatgcatatatgtatatgtccatagtgaggtgtttgtggtgacgacgtcaatttcaagatataccacttcggtcttctagaggtaggatatatgtgtattcgtagttggtaaatgcacgtgtatgtacataagcttcggagcttatgttgtactagtagtcgctttaactttttttcttgtaacgtttgaccattcgtcttatttgaaaaattagtgcaaatatgaaaacagagaagtcatacttaaagtacttttgataataaagcaaatcacaaacaaaataaataataatttcataattttttgaataagatgaaaaatcaaaagttaaaaaaaaactcaaagcgacgaatatcctgggacataagtagtattttgaaaacaaacataaatgtgtagtggtagctctacaagataagagggcacgtagatgtagctagggaccaaagtggtgatctacactagcccacagtgggccactaatcgagtgtggagagaatgtattctcagctcaggtgtttatctccaaggctcgatgttttagaagattctcctattgtcctattgcctatatttgtcatataaaattgaatctttatatatatgtacttctacagtacatataaagatgcttctacagtatcacaactttattatcatatcctcgatggagataaaaggttcaaagtcaggtcgtagaatacatttgtaaatgtagatgaacttgttaggtttcttacagtgaaacatacctactcaaattaagtctatacttgatatggatgctcacttttacggctaataattttaggcaatatgtatatatcgataatgaaacgcatatggtaatttcgtatatcaaatatgccgaccaatattttggaggtgttacaggggtaagtatgtgcgtttgcatgtatttatacgggtaagcatgcacgcatattaatgaatgcttgcatttgtaacatgtttcgaaaaaaaaatcatgccataatttttttttaaaaaaataagtataaaaagaacatttgcttatgtactatgttgttatatttcggcaacaacgataattagaccataggaatgagccaactaaaagatgacctcatacaagtgcaacactaaacacatgggcccacatgtcagtctgccgctttgtcctaccaatccaagcttcaagccctacctacccctaccttgtcgggaagttgtaactacccactcgcgccggtcatcgtcattgtcgccatgtccttccatctacaagcccacgtcttcatggcgaaccctctccatggcctttccacttctaccgccgtggatgaaactttgattgtcgtataggctgagctcttatctctactttcctaactcacctccatcgtttccgcacgcacgtttttcaaaccgttaacgatacgttttttgcaaaaaaaataaaaaaaattctatatgatagtttctttaaaaacatattaatctatctttcaaatttattttagctaatacttaattaatcatacgctaaacgctacttcgttttgcgtgccagctcccgaacacaatagtaaattttatataaaaagataaaagtaaaaaaaaaaaaagctgatgcgcactaccctgtgctatttcatgatgggctgaaacttttaggcaactacgagaattgggccggcccgaccaatagatggcctcctgcaactgcaacactgaacacgagggcccacatgtcagtgacacaacctccctacgctttctcctaccaatccaaccacctactacccccaccttgccgggaagctgcaactgcacactcgccgccgccgccatgtccatccacctccgcgcccacgccttcgcggcgagccctctgcgcggcctctccgcctccaccgccgccgtctccccgtcggccgcggccgacgccctccgctccctcctcgacgcgggggccggggcagccgacgccgcgcacccgcacccgcacccgcacctctccaagatcctccccttccgccgcggccgccccctcgcgcgctcctacgactctcctcctccccccgctgccgcggccgcggcgccgccgcctcctcccgcctggcgcctcgcgtggctcccgcccgcgcgcgtccccgacgtgccctcggacgccttcgtgttcctgggcgcgcacggcgaggaggaggggaaggaggccgcggcgtactgggccgtcgatgtgagcgagcgcgacggggagggcgccggggatgggtcggcgtttgtggatttgaggacgctcatggtggccacggactggagggacaaggacgccatgggagacctcgccatcgcgggccacgtgcgtggcgattattttgttgttatcagagacattcgaattactacattttttgtggttgattggatttctgattcgagcaggctcgggcgctgctagaatggcatagcacagcaaaattctgcggagcttgtggatcaagggctgttcctgctgaagccggaagacggaagcagtgcagcaatgaatcctgcaagaagaggatataccctcgagttgatcccgtatgatttgtgctcaattcctgacctatcttgcagttggagatggcacctgttgaatttgacgttttgttatccctatttggtgtattgcaggttgtgattatgttggtcatagataaggaaaacgatcgtgcgctcttaagccgccagtcgagatttgtgcctcgaatgtggagctgtcttgctggttttatagaggtgcaaattagctcttagttttcatgatttcttatgtttaatgttcagatcttttcttcataataatatgtgcttagttccattcctttcacttgtaattttcttatgctggttttggtttggatgaaacagaaggatgctatagataacttggttgtattacacccattgttactgcatactgcacaatcctggttagatcttatttgtgagttggtgggatggttagatcttatttgttagttggtgggaggaccggaggagtgtatgtacacacccaccacacaagtttggatcctctagggctaacttggattcatcttcccccgtgggtatcctcattttatttatttttttaaaaaaagagttaccatatcctcattagccatgcttgtaatttgtaggagattatttagagcacttcactatcctaactatgatgaattcattccaaatactgaaaagtaacttgttttcttgtttaagttttgtcctatgcttatgctaacttcaactttctgtggtactagcaagttcatttcattatcatcttgccgtgcactgaaagaagcttacacatgctgcaactgttctttttgtagccaggagaaagcttggaagaggcagtgagaagggaaacgtgggaagagactggtattcaagttggggaagtcatttatcacagttctcaaccgtggcctggtaatgaattgttcttaccatatatctttcgaatgaaaaacacaggaaaggataacactagaagataagaaatatgttttaacctttctaattatcgtatcaaaatacagaagtacttataatgaaagatactaggcaagaactatatcaaattaaagtaataagaagaaataggtagaggacttgggcggtggtggtggtgtacatgcataccaagagacatgtattagggctccctttggcattagagtgtattctcaaaacaaaattatttgtgctttgggatatattatgagctgttatcgtctttttcttgagttgtagagaaaagtcttaatagaatcagtgacaatctccctaacccactctgatagtatccatgttgcttccgatgcttttttcagttgggccgagtactatgccatgccaactgatggtgggattctttgcttacgctaaatcattggagatacatgttgacaagaaagagcttgaaggtttgtcagtatgaaatgttattttttttcctactcttttttgcaactgattggcctggtccatccatataatcctacgtttcagtcggtcttctgttatttttcttatgcaatcttacaagaatatttagatactaactgagtaaaacttatctaattgttaaattggtgatctgtaatacatcgaagatacttttctacaatgaacttcataatagttctgcgcagaccttttagttctcatctctcgaatgccattcttttaccaatgtagatgcccaatggcacagccgtgaggatgtcaagaaagcactaacatttgcagaatacgagaaagctcagagaacaaatgcgctcaaggtcaatcaaatatgcaagggtgttgagaaaaggcagagcatctctgctgacctcaaaatcgaaagtgaggagcctgctccaatgttcgttcctgggccctatgcgattgctcaccacctcatatcatcatgggcttttgaaggagcaccaaaggcacctagctccttctccaacctatgagccttgatcctgttattcattttcactaaacaacacaacaacaggagatagggaataaaaaattttagtcccatgtatcatgtatgccttagtttcttgttagtgtagatgtgaaatgtgtccattgccggttgtaataaaaggttaagaaaagtacatcacgttcactggaggatttggggggagtacagattacagagcaagtgtaatattttagcatacaatttgtaacagtgtatagatgcagcacagatgtgctgatgtttgtatcttccatattcaaagagctggcatcaagtgtgaaattttgccaggtttgttacaagttgaggacaatcttttacatgttgactggtatagttctgcttggagaaaactggaatattcaagttaattttccacatgagtacatctgtttgtcatgcaagtgaatcaagaattcttgtgcaggggttgatttttcagtgtataggggtatgaaatgaatgtagagagtgatgtgcctggacttttgttgctaatcataattgaagcttctccttgaaacaagcaaccacatgacatctttgactaatctgttgcacaaaaacaataattaacccgcatcaatcttcaactggtcaacataaaatctactgttggacagcaacaccgcagcaccttgtactaattttttttatgctttcatccaactactgacaaagaattctcgtcagtttttcaagttcagaacaaaggcaggaactctgattaggtgtagcctcatatacagtactaatatatgctaggagcacttaattaattgctgttcctctctaggtagtacttaattaattaggagtactaattttgcactttgtgacacgttttatgttgattcacagtgacttgattcaagcacaagagaggtggtcacagcaacatgtgcaaaattgtcattagacgaaacgtatcaagctctaattgcagccgaagaagcaagaagcaaaccatccaatcagctgcacagctagtcaacacaagctagtcaaaccgttgactaccactgtctttgttgcgcgccagatttttccacggtgcacagccgcaacgagatggagacatggatagagtaataagcagcagtagcaatgcaacgcaatgcaacacttgaatcacttgcagcttggaactgatctgatcagccatggcggtcggcgtcgtcgccggcgtcgagagccaggagcgccgcggcggcggcgccggaaccggaagggtcaccgcgttcgtcgtgctgtcgtgcgtcaccgccggcatgggcggcgtcatcttcggctacgacatcgggatcgcaggtacagtgtaacacaatgtagcatgagacatcgagagaagtgaagcttcgttaatggcggcggcggcggcggtgcaggtggcgtgtcgtcgatggagccgttcttgaggaagttcttcccggaggtgcaccggcggatggagggcgacgtgcgggtcagcaactactgcaagttcgacagccagctgctcacggcgttcacctcctcgctctacgtcgccgggctcctcaccacgttcgccgcgtcgcgggtcacggcggggagggggcgccgcccgtccatgctcctcggcggcgccgccttcctcgccggcgcggccgtcggcggcgcgtcggtggacatctacatggtcatcctcggccgcgtcctcctcggcgtcggcctcggcttcgccaaccaggccgtgccgctctacctgtcggagatggcgccgtcgcggtggcgcggcgcgttcagcaacggcttccagctcagcgtcggcgtcggcgcgctcgccgccaacgtgatcaactacggcacggagaagatcaggggcgggtggggatggcgcgtctcgctggcgctcgccgccgtccccgccgggctcctcaccctcggcgcgctcttcctcccggagacgcccaacagcctcatccagcagggcaaggtcgaacgctgcgacgtcgagcagctgctcaagaagatccg

SEQ ID NO: 2785 - DNA, 7234 bp, Oryza sativa
  unsure (1)..(7234): unsure at all n locations
ccgtccatattcgttgtactaaattatatcgtatctcatattatgttgggttttttttaagaacgaagggagtactctcctgttaaaaaaactaatatagaatcaaagacgatattttctaatagtaaaataaataacagcctcttgtccaaattcgttgtactatacaatgtgattctctatattcatggtagtagaaaatatcgtttccaatactagattagttttttataggacaaaaagagtacattaaacatctcaaaatgcaaatgatttacacatcagcaggcagcaatgagagcaaagactccccaatgattagagcaaaatagcatgtcgtcccccctgcatccttaactggctgtgtctcgcccggcctgaatgcccctgcattctgttcccccttcctcttccatacacagcttagatctggaatgagtactagttgtacatttaaataattacaactcctccaataatccgttaatcatttggtccattaattttagagtatttcgatgcaattatatattacatactccctcctgttttgtgaatgatcatttgtcttatttaaaaactttatgtaaatatttcagaaaataaatatttacacaaattacaacaaaataaatgatgattacataatttttttaaaataaaacaaataattaaacttatgttaaaaaaatcaataacatcatgcattaaaatacaaatggtgtacgtaatgagtaagcttgcacgtactcctgtaatataatgccgactggcggacagctagttgcagtgttaaggagtacttacttaggttttaaaccataatttaatctccaattacaggagggattaacttaacatggcagggcatatgcaagcgtgagtgacagctgatcgaggaagatcataggagggtaggccatgtgaggccggtcggtcgcacacaatgattggccagttacgttagtcgcccattgatgaatgatccatgatgatcatcgatgactattaattaattaaagctggccttaattcgatcgatctcatctgagctggttaattagaccggtcgtatcatgggtcgatggaccggtagtatatataacacactgcacgcacgtaccaacataattaagccctttaattcattagttagttagttaattaatcacactgcagcaggaatgattaccacaacatggcgttgtcgggcgcgattatgtatctagctactcactcaactacactcatatgaatgcatccatcttgattaacgtatagtaaccacattatatatgtgtatatgatgtgtcaagggtagattaagggtatgttcagattgataccaaaaataaaccttaccaaaacatggcaatgccaaaattttgccaaattggtaatattgccaaaactttggtaggattggtttaataatgttaccaaaattctatacacttaacaaaaagacacgaatatagggaagaacataatatccaatcattagaatgtgtgatgcatgcttcgaacccagaacgtctagcccaccatcttgtggagctagccggaaaacccctgggtatttctcaatatttgttaaaaaaaacgtagttatataattgtcaattttactaaataatggtatagttgaaaatgtcatcaatcttaaccggctctaatttctcctctctgcatacatgcatggtaatactgtaagcaatgtatatactgtagtcatgtgacactaatgacatcttcagaaagcaagaaaattctctgatgcatctgaagttttggttaattaatccttcctatgcttttgagtttgttgtcaacttcattgtataccccgaattttagaagagtcaatttgttggaatggtctagccagttaattttgttggttttgttagttatgtcgtttctgctagatactatatgtagtacattcttctgtttttttcttaatgatgagtacaagtgtatattatcttcattcacactatttcttttcaacaaacacaacaccatgatagttaatccacctcaaaaaaatgcagtacgtacggattatatgatgtgcacatgatgtctaccattattcaactaactgactataatcaaccaacattgacatgaaatgcatgactaatataggagtgcgcgcacacacaacatcacattaattaaatcatcactactgattgcttaattaggattatgcactatatacggttcatatctatcatgcaaagagcttagtctctgcaacttgcacactgatcacaaattggctcctctctgtctccagattccttttcaagtacaactactgtgcaatgagtactacctaagcagctatatagcatcttataattcagacacaaagctggcaatatagtccatgaaggggttaaggaccatgtagtaagctgtctcatggggtcgatccatcattagaaccatgatgaaattgatgagttgagtcgaaaatgatgagctagccagccattgccactgtaccatcatttgatcgatctgctgcttaacccaaaccgatcgatcgaccgaccgaccgagccatgagaccagcagggctccacccagcagcagccatctcgacatgcccaaactggattgtctctcaattttcacccgggaccaacaataatgtcggcatgattaaggcccccgtttggttttagaatggatttttaggagtaattatgtttatttgtaattttagatgtgagagatcgagttagtgcagtggaaaggggtgtacgattccaactccaagattccgtgttcaattcctaacacgcttataattatttcttaaacaaatgtttggagggacgtagcgccctccaaatctcttttttttctagacaacaattttctcacaaaacaaaattacaacagtttacaaatctattcgaggttgaattttatgaacgatgctaatgctttgtaataatgaatagttgaatgcatgtacaccttatgcaaaagctggaatatttctttatccaaaaatacgaattcatgctattactctgacataccaaagattgaaataggtagatagcgtaggatttttcaaaggaattgaattaaatcgtatgaaaatcctgcaaaattcctccaaataccgtcagtaaagcttcttgcactgtggctagcttcaagctcaaaactgaagctcaaaaattcctagattggcacaactacacaacatctgaaatcgtgcagccgcactccatatatttcttacacagatcgatagcgactcacccaagcacacgtacacagcaacaaatattttggatgaagaannaatatctnccttgactggactagtttattagctgctaatctcacctgggacgaagaatccccaatattattattcagatgattgatacactcgcaagcatgcagctgcaattctactaccttcttcgtcttcttctcatcaagctctatagctgtattctgtaatggtgcccgttaagtcaaaacaacaacctcgatcgcaaactgcaggatcgtcccttggcttggcctcaagaatcttcaaagcagatccacccacgcgccaccagctcatcattgtcgaccaatcttcttttcttgatttcaatccatgatcttctcatctatttatacccctcgtcttcttctcctcctctcttcatcgtctccgacgccgacgaactcccactcactagtagcacttacttgtagctattgatctagagcacttaagacatggagaggcaaggcttggatcttggcctgagcctcgggctaggcttgacgacggcggcgacatggccggctgctgggttctgtctgaactccggcatggcggagcaggaagtgatcaggcgtgatgatgtggttgcggcgacggcggcggaggatgagaggttcgcgtgctcacccggcagcccggtgtcgagcggcagcgggaagcgaggcagcggcagcggcagcggcgacgaggtcgacgacgccggctgcgacgtcggcggcggcggcgcgcgcaagaagctgcggttgtccaaggaccaggccgccgtcctcgaggagtgcttcaagacgcaccacaccctcactccggtaagcttcttctcctacccatcgccaatggtggattggattggagatgggattgaatccgagagaatggcatggctgaattttcttcctctgatccatggatgatgtgcagaagcagaaggtggcgctggcgaagagcttgaacctgcggccgcggcaggtggaggtgtggttccagaaccgccgcgcgaggacgaagctgaagcagacggaggtggactgcgagcacctcaagcggtggtgcgaccagctcgccgacgacaaccgccgcctccacaaggagctcgccgagctcagggcgctcaaggccacgcccacaccgcccgccgccgcgccgccattgaccaccctcacaatgtgcctctcctgcaagcgcgtcgccaatgccggcgtgccctcgccggcggcggcgatattccccggccacccccagttcttgtgcggattcagagatcacgccggagcagcgtcgtcgtcgtacggcggcgcatcatctggactcgcgaaggcggtcagggcggcgaggtagatcgatcgatgcgcgcgccgccatgatcgacatgaccaagctagcgatctctagctagaagatgatgacattgagcaagacgcaagagtagaacagagttgaattgatctctcgttttcctgtgtatttttaaggatcaagtgcaaagttaatttagtttttgacaaatgtaggatggatccatgtatgcacatgaaaagttgatgaaataacatgagaagaactaattaattgaccttcttttttaaaattcgtaatttagtatactcactgttttgagctgaattcttttccctctaccaggcatagcctcttttttttttcttttaaaaattaaaaatgtagctgttgaatctttggtagttagcaagcacaagtgggaattgaagcaacttttgacagttcatttagattgggagttggtctatcgtttggttagttacgtcaattagatgtgcacacttgcactaatgtagtagtatcatctacgtcagttttgagcagacaaacaaactgcaacttcaaggtgtgacttacgattttagttactctgttgtagacttatgatttaattattagcgtattcttttgccatccttaaataaaataattattagcgtattgcgccagcgatttttggccttacacgacacctatcttaggctgtgtttagttggatccaaagtttggattttagttgaaattagagatgatgtgaccgaaaagttgtgtgtgtatgacaggttgatgtgatggaaaaggactgaagtttggatccaaattttggatctaaacacagccgtagtctctaaagtttattttaaaatataacaacttctacactagcataatgaagtgttaatgggagtgaggaagtgtatacttgtcaacaattttcagggccggctcaacaattttgagagctctagaacacacttgtcaccagagtgtcggaggtggactagtacagtggagttgttgtgcagttggatggtcgcaccgtgaaccatcgcagtgatcgctcatagtacgcgcagagttcaaaatggtacacgaaacatacgacaccttgtgtatacatggacctaggcccctaatcgagcaggggcctaggccgtcgtaccctgatctatccacttgaatcgggtctaacaattgttactctctccgtctcaaaatataaatatttttatctgcgtgtccaaattaatagctaaaaattgctatattttagaatggaggtagtaaatcagagtagtacctctataatctctactacttaaaagtaaagtcatccgtccttccacccctcgcacatagtgcatgcgctcctcttcccacaaggtcttaatgaaaaaaaaagctctgtccaagagaaaaaaaaaagaaaaagaaaactgttgctaaaaaagcgcatgctttaaaatagatcacacattccattctaagtggtatggcccctattctcattctcacaatctcagagatatggatccgttttaacgtatgaacatattactaagttaaatgtttaatgttatggcattgagaaaacatctcgttcgacacttagaaactatacatgcaagttcatttttcttggctcacacgttcgatgcacttaaaaacattttaatttcctcccccgagtcaggctcactcattttatccgtgctagctagttcattagaaaaccggcactactaaaacaatatcatgtgctaggttgtaacaacaaacgacactaaatatatgacatacgatgttatcaatatcttatttttataaaccggcatcgatgtagtctcatcaatgtaggtttttgtccgtttgggatgcatggtgggaaaccttttatcaatatcggttcttatcgacctgatgctgaatgggtttaactatttgtcattttcaagatgtgacaattatggatttaccactcatagtctataacatatgggtccttatatatctatgacatgtgagttcagtgatgaatcttaattaccgcttgtaagagtggcaaaaagttaaatatgtcgatgatgataattgatagggtacctttgagcagttgtatggtatagtggctgtacatacatatacgggcctaattattctctggcaacacttctctctaggccggtcggccggtcaatccggccatgggagctagcttagagcaagtttaatagtatagccaactactagctccaattcatctatagccaatctaatagctcattcgtacaatagttacatactacactattaatacctggtcccacctgtcatacacactgtgtcttagagtccgtgctacagctggctataaatttgtagcccactactcttctctctcatcatttatctccttaaaatatatttacagctggcttatagcctgctattgtacctgctcttaaagcaagtttaatagtatagctcactgctagcttcaatttatctatagtaaatctaatagccaattcatacaatagttgcttactatactactaatatatggtcccatctgtcatacacacaatatgtcttaaagcccgcgcgcactgcagctgg

SEQ ID NO: 2786 - DNA, 711 bp, Oryza sativa
agtaaactttcatgtttaaaacaactccataagattaacttctaaagatgctgtcgttttataaacgttctgtctagcatgcatgacattgtttcggtccatacatccgcagacatagatgattgaaatgaatagcatagcttagctaaccttgtgcaaatccagtcgcctgccttccacccagcacgaactgcgctgctgtcgagggcacgggcaaagtcaccgttggcaacaccaccaccttggcctgctggaaggtccttcacaatggcgccacatttgaagcagcttgctcggctagcaaagttgtgatagccgcagttgcagtaccactcgcccgggcgaatgtccagggaggtcagcacaccacctgggacataaccatcgccaagcggcaggtcctggcgtggggtatggcagcgctggcagtagtcccggcggctgaagttgagatgctggcacgatttgcagttccagtctcctggcttcctctggatgttcattcgcagttaagccctgcatgccatgtatgaagcgtcaagaagctgtggtattgaatgaatacaacataacacaacaaaagttatatgctaagtactcttaagtcttaactaatcattgtctcatttattagtatattggactactgatcaaaagaccatgctacgaccttgcagtttacgaatatatccaggaaccaatgtgaatatg

SEQ ID NO: 2787 - DNA, 2309 bp, Oryza sativa
caaatttacaatctctctatgactcgctaagcgaggggaagcgtcgttggagaattaacgcaggaggcagtgacctggaggtcgttggagagctcgacgtcggcgatggtggtgagggaggagaggtactggtcggcgccgagcgcggcctcggggaggacggcgcgctggaggacggggtcgcgggtgagcatgtccgcgagctcccgctggatctgcttcgccaccatccgcacccgccggtccttcgccatgcaccgcaccacgcgcagcgacgacgccgacgagggaggcggccgcgcgggcgccagaggggacgcgacggcgaggcgccgcggcagcggaggggacaccagcggccggcaggtgaacatcgccgatcacctcgacgcgagtgtagcggtggcggtggtggcggtggtggttttccggcggcttcgcggtgaggccgtggaagacgatgagtcggggaagtgggaggggatagtgtcgtcgtgtcgaatcgaacaatatctcgcgtctttttttagttttgttttatttgaaagcattttagacgattttaagaagagtttagtgcaatccattttatacagttctggttgtaaaagaaaactccagcaaaatcatcttgcccattcaggccaaaattctacaaatttctctctgtaaatttcatcgtgccctggaaaggcactaaaaggataatacgattttgaagactattatctgatgtagatggagtcatagaaataagaaatctaataaaaatgtcaaatactccctccattccaaaatataaaggcataaccacctctaacccaaagacaaaaaaataattattattatcatctcgtagttttattatcctaataaatacaatgcatgtatcaaatagaattagagaacatgagagtaaaggattttaaaaagtaataatttaatagagaaatggtcatagttaagggcttacatgcatgcatgccttatattataaaatactccttccgtttcaaaatgtttgacaccgttgattttttagcacatgtttgaccgtttgtcttattccaaaaaaaattgtgaaatatgtaaaactatatgtgtatatgaaagtatatttaacaatgaatcaaatgatatgaaaagaataaataattacttaaattttttgaataagacgaatggtcaaacacgtactaaaaagtcaacggtgtcaagtattttgaaacgaagggagtataagaaaagtagttgtgccttatattatggaatggagggagtattttgtaggattgattccatagtcaaaccaagcaacatacagcccatgggcaccgtgcccacatcttggaaaggaaagcccatctaggtaaccaggcctataaacccggcccactatatcatcaaatgccacgttgccctagacgcttaaaccctcacctcccaaacgaacacacacctcaacctcccccgagacgacggcggcgacggcgacggcgatggcgaaggagaggaagcggaggcagcccgccgacgcgccgccgccgggggacgacgacgaggggagggaccaccggagggagaagaagccgaggaaggagaggcccgacccggtgctgccgtcgcagatcaagaacaaggacaagcgcaaggaggtgcacgcgaagctcaagcgcgagaagaaggcccagaagcgcaagctcgcccgcgagcgcggccaggccgcgcagcgcgccgtcgagctcggcgagcaggcaagcgcgcgcctcgatttctcccctccgcagcgagctccccctctcgaattcctccaagctttgtttcttaggtttttctgatggttttcattttgggtgttcgcagccgccggagaagctggtgccgcggacgatcgagaacaccagggaacctgacgagaccgtgtgccggcccgacgaccaagaggtttgtgcacgttcttctgtgtttcttacttggattgatcctaccaatgcgagtttctcaattatcggagtaattgtaattttaatttctaattgtacattcgaacctgtttgactaatagtagtttggaatcaaggacatttatctgacagggtctccttaatgttgcattaggtttgtggaacatgagaattacatttctttggtagttaggctaggtatgcggtgaggttggggcaatttctgaattacatttctttggtagttaggctaggtatgaggtgaggttggggcaaattctttctttactagttatgaccagggaaggctatctggaacgtggtgccttgccgaggttaaggaat

SEQ ID NO: 2788 - DNA, 9404 bp, Oryza sativa
taattatttgataacctctattcttaagaagttgcatctaacactttatgtttatctgcacatatgtctacagaggggacctgcctttattgaggagttaatgcaagtgatacccaattcgtgttatgttaaaagaggaacttatgaactcaagaaagtatgacatgttcaaagtagctaacctgttcatttgtttgaattagacacttcatatggactgaaacacatttctttttagattgtggaatatgcaaataacagagatttcacttcacttgttgttgtccacacaaaccgaagggaacctggtaagaatccatcaatttattagttcaaaatttgcacttgttatctgttatgacatatttattgttatttgtgtcacagatgctctactgatcatcaatttacctgctggtcctactgcacattttaaactatctaaacttattctgcggaaggacataaaggtactttatctgtattttctttatcatactagcaaaatgcctttgctatgggtaaaatgcacatgcttatttgaatatatgttattcacttgattcaaatgaatattagactattatataatacaagaaaatatcaaggactattttgtaagttgtgcaaatgtagttgtgggttggtgaaccaccaccaccgctattgtcttttacagtagtatagattatcacctactaactaatgttatattgttttcttaaataatatctactgaaactacaactcttagatgagttattcaaaattttgttggaaatggtaacctgtatttatttatttttatttttgtttttgggagaacttgttgaatagctttggtgttgtctacatatctttgtgctaacttagcatatattttcaccataccaaagggataggacagcaacactgttatccatcttctatgtgttctgataatctttgtatttgcattgtgaagaacaaatagtaacagctacttcagacaagcacaaattagtgctatttttgaagaatcatatgcatactatcttctgctactgcaaatctcctgtattagttagtttataataactgtttgatctgtttgtgtttttaattgtgatctgatcacgatatcctttgttcttagttttttgcacacatgtaagagtgagaaaatcccacggctgtctagatcttagcaaattgacaacaatatgctagttgggaactgtgattatgtcctctccagaaaaaaaaaagttaactgtgattatgtgttatgatgactgagagccaacacacatggctattttctgaattctttagatctaatgctgatctttaccctattaaacatttaaacctctatacacaaaaggaagaatataaaattatatgagtatatttaaagtcagatagtaaatgtgccattgttttattttcagaaatcttaaacacaatcttgtttttaccgaatgctatcaggaattcattagggacatactggttgtggtttggtatattgttatctgcaggaaaagagccttgcttgtgcataacaactccttttgagggtcttatattattgttagtaattagtgcggtggcctattggctaatataaacacatagtgtagttcagaagataaaacaaactttgatgatcacgttcatcacaatgatgaatatgaaaatgtcaactaattcgtaacgttgtttagatagttatggtaataacaatgattatatcatagctgcatatctgttattacaccgctaacctctttagactaaaggtgcactggaagtgaacaaagcccaagttgacatcaattggtcatcctacttgtctctagtttgtctctaggatgacttagtcatctgagctttgccctcaaaatcaaatgtgcatgtgactatgttcggtatcatatgacatgtctgctagatgctgatccatgtctctatccaacatagcatgttttagttttagtttttccagtctttcaatgattgtataaattattgcaattgcaatggagttgggttgataaccatgttgctgatggtcatctagattgatggaaagcagaaaaaaaatagctggaaggaacgtctttattctgctgcacctggactttgactaattttagtagcgtttcatatccagatttattcagtttatttgatatgttcttgttaaatgacaaaaggttctcagcttattttccaatattatataaatctgtttttgaattttagctttgcgaaccagttaatattcatggctttgtttacctttttggttgcagaaccacggcaaccccacaagtcataagccagagttagtgttgaacaatttcactacgcgccttggtcatcgtgttggaaggtgatttgtgaacatgaacccttgtgctcctttgctgatcctgtttagaagaactctgttttcttttacattagcatgttcatgtctgctgtttgcttcacttgtcaattttccccttctgccttttcaggatgatacaatctcttttccctcaagaacccaatttccgtggtcggcgagttgtgaccttccataatcagagagactatatttttttccgtcatcacaggtgcatttatgaaaattcaagtaggaaaaaccatgttattaaaggactcctgtgtgtctacgtaattgtcttttgctgggatttgttgcataatgtggatcattacaagtgtttttagtaattacttcctggacatttctttagctcataattttgttgatctgtgaagtgtgttatcaaaaccatgctatcctccttgctagtcttgacatgtgcttttgattatgtttgtggcttccattttactgtgagtattcaaacttattttcttatgcaatactaatgctaggtacatctttgagatgaaagaaaacaaaattgcttcaaaggacaagaaagctaagacttctgaaagcaaaagccaacctgagaagcaagtaatttgtcgcctccaggtatttgagctacttattcagtactcactacaagttctgtaggtgatggcacatatttcattcagttcacaatctgttattggtcatcaccatctggcaaccccaaccaaagtgctttctatgttgcgtgtttgaagggtgtttctggttttccgagatatgctctcgctttcaacatcaaatgcttactgtcttgccagttagacaaacacaatgatatcattacttaggcctaatgctatttataattgttaccatgttattattagccctagcagtaaacctaagctgttctgatgaactaggaatgtggtcctcgcttcaccctcaagctgctcaccttacaacatgggacctttgacacaaaaaatggggagtatgaatgggttcacaaggtactattattcatttaccgtcccatgcccacactacactctacatgaaagttttctgacatgctgcaaatcttgcatcattgcatcatttacagccggacatggacacgagcagaagaagatttttcttgtatttagcatgggatcctcatgccacaccagatgaaatattagtgttgttcggaaattactgcatattcgttttgtgcacttagaatcgtatcacaaatgtaacagacctctatgcacatttgaagcaattttgatgatctatcaaatgagttgagctatacgaatcttggcctctttactatatggttgttgttcccgtatccagtatcttgcacaaaagctgccctttgttttgttccagccctaatatgtcttgctatccacaagatgtatcatcaaatctgctgccatacaaaggtcgttatcatccaactgccatgggattacacctcattgttcctgcccttctctccatccaagaacttatcattgctggccccatgttcttcaaggctgctatagccaccagcggcgccatgacagccccaggatcatcgtatccccgaggtatacctcttctcggcctgttacctactctggttataaatatttgatgtttaggttagataacacttattttaaaagtgaaatatttatacctgattagcctatatagtactctaacttacaagtagtaatgagatactggttggccattgcccatcaaggccgctgatcttttaaccctttttattactgcaaagtactagatgccactcatttaaccctttttattactgcaaagtactagtggatgagctgatggtataccctatacctctttctctatctttaagactgtaattacaacttgtgatatctgtggccattgcccattgctagcgctgttaaacttttgacaaatttcatgctgttactactgctaggtagtggctgagctctgatgagcaggctggctggcagatagctgcctgctgctgggtactgctgctacacatggcctgggggtcccatcctatccaagtaaggccatatgtttctgcgcgtacgtccgtgcaggccagggcgtacgacacagaggtgcgttctctctctctccttctcttggtcgtcttctcttttagatgagatgagaggatcgcattgcaccgctagcttgaaagagaggctcctctccatagagtaattgccatctgaaattgctgctaggtgggttggtcacgagtgcagcagtgcagcggcacatggcttgctccctcccctggccctgccatgttatctgctccagtttggtccaatgggtgagtgaagttatactgccacttcatctctgtttctgcagcatctgcatgctagctactaggtaaatgtttgttcatccctcttcttgaacactgtcagttagctgcatatacatgctcagttgctggccctggccatggtagatctcgagttacagctaaaaatcaccccttttatcttcagttttgaactgagttccaggtcactagaagtcttaaccatgcagtcaaatttgggtgagcagcttttatgcagccatttgggtattaaagtggatactggaatattagtatcgcgcacaaaagctaagcctggacataatttgggtgagcagccattgcgtacatgcacctacgtgcaactaggcgttaattactctcgtttttagatgggaaatacgttaatttatggcgtgttactgcatgatagcgaagatgatcactctgaataatctgcactgtacgtggcaagtgtgcatgcatgggttgtggtgcagactatttacatgagtggatcagatctgtgcactgttggatcttccgtgttcgatctgtgtgtgttctcatgcaactcaaaactattatggtccgagctgagcgaaagcaactgccgagtaacaactaagctacctgcatgtagctatatatacttctgtagtctgtaccgtaccacgtacgcacgtacaactacgataatatctctcggagggcgtatcagcgcatagccaatatgaggtgctaattaatatccgtgcttgtatacttcctctgcctcgttaatttgtccagtttcatcgctcgaaataaatttgcgtatagttacaccagaaatctaaggtatatactcctcatttctaaaatgtagggccagttcggtttggttccaaattgtgccctatcaattcattggtaattttcaatagtgtttctagttgtttggattggtgccaaattttaacaatacatctctttagataaaaaagttttggccgtctaaatttggtagtgccaaaaattgcttaaactttggcactaccaaaattttggtatggcaccaatccaaactgacccgtaattattttttaaatctaaaatagaaatgtagctatattttaatacgaacagagcaattactggcatcaaattgacgcagtacgttaagtaacatgaggtccttccgtcctttgctagtggctacaaactacaagttatacaaaaacaactagttatataagctgcctgtcagtcagtggtggtcactactacaagcacacggcgatagccaatatgaatggccagaaaattaggctagctctctgcattcacatacgtactgacgtacatatcccaatcaatacaccacgttgagaggctttcggccggcaattaagcccgaaagatatctgcaggctaattactgatcatatacatatcacacagggatattgcacaatcactgcatgccagatgccacattatattgccacatatacacccgggctagctagatgcttgctagctagctaccttttcaacctcatcgtcattaactattatcacgactactctttccattaatcaaaatgtatacatatcaagaacacatgcatggttgcattttggatatctcgatctctagctatatagctagctagctagcttcttaattagccggccggtcattcattaccttaatttgcatgtacaacgagaccaaaaaaataatgagtaaatgatgattcagttcgttcgaactcatcactcaccaaaaaaaaaaaaaacagcatacatgcaacgacaccagctaagctagctagctatagctccaaattaattaaacttcgccttcgtcttcgtctacctctagctagggcgcgcgctaatctgcgcatgcgccgctagctagctccgacgatcaagatgatcaatcgatgaatctcgatccggccggtgtggttcatatttacacggtagtattcattgctagatcgagctaagctagctgatcttgccggagcaatggaagaaggaattaatatagctagtgtacagatgcggcggcggcgggttcagcgggtgcaggagtagtggagggaggaggtgagggagcggaaggcgacctcctcgcaggggaggacgaggaggccgccggcgccggcgccggcgaagccgaactcctcctcggcgcggcggagcagggagcggaactccggccggtcgagaagcgcgaggggcaccacgaaccgccgccgccgctcgccgacgtacaccgcgaagtggcccctcggcacgtcggacggcaagccggacgcctcctcctcctcctcccactcgctgacctgcttctgctcctgctgccgccgccccaggctcgagcaccgcttcagtatctgcttcagccccgccgcgccgcccttcttgatcgccattgccgccggtgagctcaagcttgctgtagttggtggttggtgatggtggtgacgaggaggcggccatggcgagggggtatatatagggagaggtgggcgaggtcgtgaggtctcgccgtggttggtgctggtggtggatgggcccgcggcgcccgtgggcttgccgggcctgggcctggtacagggtgtgggacccacatcgcaggtccctgtgtttttcaccttagacctagtaattagttgctagttgctactacctccctcccaaactaattacattttgagagaattaaagatagattagcaacaaacacaatttaacacaataacccaatttaatgaccacacattacctacataaacttgattaaaaggaaggtcgagacaataagcccacttaattaccattcttaaacttgattaaaaggaatatttggatcctttgtcagcagaaatttttttgggataaaatttaaatgatagaaatgtaattatttaagacggagataatactagatagtaatggtagagttgcaatggttgtgattagtgaatctgatctgataatggtagtccataatgtggtaccttggggagctccttgttttttcatttttcctttttatacaggagtttttgttgagtgctagtacgggcccattctttgaagatgaaaattgatggatgatcgccttaattacagggatggattaaatactatatattataaatctaataaataacttagaacaatttatttaagcaattctgatttatgaagttttcggacaaattatagttatcaaagcgtggcaatgcatatacaatctatcagggttaatccaaaaagagcgaggccttagatttagagttaaatgatgtaatgtctcattttaaatatgtaagttcagaatttcccacctttttttacttgtatgaaacatggtgattttctggcctttcgaattggacctgtttggaatatggtaatcttccaaccttcaattccgaataagtcaattttcatatccacatcaaaatgaaatatttccttcctacgttcgaggcgggccttcatagaatgttctagaagaaggttgttcgaagttatccaagaaggttgttctaagttttcgaaagtgaaaagataaaaaggaggagaaaaagttgtgatggggggctagctaaaatcctcgatatttccctactcttgcaatttgcatggtagagacaaggtcaacacactatagttagctagtatattgtaggatctaagtatcaatcaagtggcagtgaacataaaagagagaaaagaggagctcaagtagtggggaagcaacttcaaggggttgacatttgacaaaatggcagtggaaaaattccaagtctcacatcaaagtgagtgatcaaaaccaccctttaatttcttctgctttttcaatgccctgcagccagtgttgttgcagacacgttcaataatggtccatgatccatatctttcaggtatctctgaccactgtacgtctgtaccggccgttgccgctgctgcatcctctacgcatcacaaaagatgcctagatagttttttacaacagtttctacttgcatttcatcaggaaaaaaaaaaagaagaagattcatctgtgtttctgaaagagaactacaacaagatttctctcctagttcaggttaatcaggttcaggagtcaagacttcaggtagcaattttcaactattgataatatttgaataaattattttattttattttatttaaaaaaatataaaactattaaccatgttaatttaacatatgaagtataaatttcgcatggatttgagatctcgagccgtgtcaaatagggagatggtaaagattacatagtgaactcacatcctctagagccgaagtattgcaagaaccaatagttcacatgttaattaactcaaaatctagtgcagcaatatccctcaaactgatgtaattaagtatcctcctagctaagtagctaggcttggctacttcagaactaattaatcttatctttattcagttaactaatctttgaatgatagttgatcaatcacagatagtatgtattatcagctggtagatctgcagggcaaaatataatcaagggctgccatgcacttgccactggcactagtgtggttgcatctcatgataggtgatgttgctatgacatggctactgggcgtacggatgggtggccacccgttt

SEQ ID NO: 2789 - DNA, 1103 bp, Oryza sativa
ccgccgcttgaccagagagtgacagagggaggtgggagaggaagcttatgaggagtagtttctttaccacgggggggagcttgggcttggcggcggcggcgctcctggtcccgctggcgctggatggacatgaggcgcatcagatccagcatccccatggtggtgaggggatctctctccgccggcctttcgtcgtcgccggtcggcacttctcaacgtcacacacaaaattggggaacgagagttataatttgtaggcaagatagatatagatatcagagttataattttaggaaggagcccaagcagtaggcagtagcagagttctgtttcaattaggatgaggtctccctacgacaacggggaaggaacggaacgtgtggaaaactaaaaatatatttatccacggactccctacttccaaaaaaaaaccaacttctagttataaatttagacatagtgtatgtctagagtcatagcaataagttgattttttttatgaaacggagggagtatgtgtcatcctagtgtaatttacactctaacttttatatatattaactacaatacaaggggtgagagatagggaagaagggagtagtaaagctgacatgtggggttcacgtcggccacactattttaatttttttttgaaagaaacacagcaagggtggcggacggagcatagcggtgcgggcgagctcatggagcagatgggcggtaggtagagccgaccaccagagcgtcgccctcgcgacagccacggactctccgctgtcgtccttggtgaggagctccattgtcggcggttcgtcgacgacggtggaggggcagagatggcggggttggagcggaggaggaggtcgttctcgacatcgatgccgccatctccactcgcccctacgacgatgctgaccaccacgccgtcagtctccttcaagaagacacccgccaccccggctccggtcaccgcgccacccaccaagtcaccaaggcacccatgccggtacccaaggccaaggccacctcattgccgccctcgtctcccccaagtcgaggctttcgtcgccgagtccccacatccccaccacggcgcacgccga

SEQ ID NO: 2790 - DNA, 8453 bp, Oryza sativa
atgtcctcgcacatagagagcagcacgatggcgaggtgaagcgacacgggcatcgacgtgaatgagtcagcaagcgcggggtgcgcctccaccagcgtgtaccaacgccacatgcagatgagagaagggagaagataatggcaaaattgttgttttacatggtttttcttctgtcaattaggtgggtgacatgtggatcccacgatatttttttgtgtgtgaatgacatatgggtgtcacattttttttattctaatgccatgccacgtaagcgccacataggacaaagactcggtaaagaccgccacgtaggcgtcacgttagccaaaaccaccgagggatattgtttgcatgggttgtgatagctggagaagtcgatttacccggttttgtgggtggaggacaggaatcatactgggcgatagttgggggagccgaagtataatttttccctattgtttgtgcgtgtatatttttcatctgggctgcctttgggtgaaatgcgtggcccatttgagagtccacacccacctgggctggcgcctgagccagctaagcgtgaccaaaaagaaagaaagtggcggggtttttcaattttggtttattagtggtgaaaaaaggggtgtgtttgttcagtggaatcctagccgcccaaaggagttggaagcatcttggccgtccaagagcgatccgtgtcgaccgatttggaccaatcagagcgctggatcaaatttggcacggattgagatggtttggttttcccgctcagcgctttgaaaaatttgggggataaatatctgaggaggggatggggcccagacgtcagccagggccagccccctcgtcttccccttcctctctccactcctccaccaccaccggccgcctcgccctccccgccggccatggcgctcgtcctgcccgacatcaccgtcgccacgatcgaggatctccacgtcctcgccatgctcgatgagccgcgcttcatcgacctcgtctccattcccgccgtccgccgcgcagccgagttcgaggtcgccatcacgccgaaggtggactacgatgggtgggtctgcaacaagctcgaggatctccggcgcgtcaggcgcttcgacgacctcctcaccgacctccagaagaggatcctccccatgctcggcaacaaccccgacgacaaggcggccctccgcaatctccgtacatgcgggtacgcaatgtggagcgttcgtcaacatgctcacccctccctccacaacctcgtcgggttctactccaacacggtgacccggaaggctcgccaagctctggatccgtacaaggcctacacgatcaagcaggagtggctgcacgccatggcgcttcgggtggagggatcccggtctgctttcatgccgttcgacagcgactacgtgccaccatctccgcccatgccaccatcgtcgtcagctcgctcgtcgatgtccacggcgtgcgcttcgccatcgacccgcaccgcgtcgagctcggcgccgtcgacgccgtccgcctcgccccggagtacctccacatcctcctcgagaaggtggagcaggagggatggatctgcccgacgctccccgctctgcgccacgtcgctcgcttcgccaacctcctcaccgatctccaggatcgcgtcctccccgggctcctcaacgaccacaccgacccagccgtcctacgcaagctccgcacctgcgggtgtgggatgaagaagctgcgtgccgtcgccaagggtcctctcctccgcttgacgcgcctcttcagcaactgcctcacccgccacgctcgtgacgcgctcgacgcccggaaggacttccgcatctctgccgattggatcgataagattgcagttcgcgtcgacaggtgtctcactataccacttcatcttcaccaccacctggaggacccgttcgttgatcatctccatgatctcccctgagttgagtgccaccctgatgtcgagttgtacagacctcgctaagtcccactaagatgtcgttttagtcgtacaaggatgaacctcccctgcgtcccgtcctagtcctaagatgtctttgagtcttacaaggatgaacctcccctgcgtcctaagatgtctttgagtcgtacagggatgacagtctgatgtctttcagtcgtatatacagatctcctatgagtcatttgatatataaaatttccattaataatctactttaggacattgctcatttctgtgatcaatgcatgcattttagaagcatgattagatttttcagcatcttgtggtgtttattcgattaccgttactttcgtttacacaacgatcccactgacggtgaggaacctgagtacgaggttgagccaggagtagaggttaagcatggcaagtgccctcctgtagctagctgcattatctatcggagtatctgtatcgtgtagtaactagctgaatgcccatgcgttgcatcgggattttaagaaactagctgtgccccccgcgcgatgcgccgacatcatccaagataatcttaatcataaaagaaaaatcataataataaaaaataagcatgattgaaaacaacatagcacataacagagctacacaataataataataataactcgatcagaaagagaatatcacgatgttctcaattttgagtgatttaattggaccataatattttttatataatcaatgttacacgaacaacgggtatctcggtgcataatacaattacatcaacaaaaataaaataaacaacattagtatttcaatacctagcagagtagcagttcccaggaagaccaatcagtgggcgatgattaatttggaaggatagtcaaacaaaactatgtccacagcacatcacagttgtgccccctgcgcattgcgcgggcatatgaggcaacctataataactcaagatcagaattgggcatatcacaagataacatgcaacactgttccacagtaatagcgcaatatcaaaaagggcatataatctaacaatgttctcagttttgaagtgatgtaatcaaaccaaaagtttttttaagagcaatcttacactaacaaacatggatctcggtacatagtagacaacattcttaattcgataccagcagatcctaggaaaaacgaatccttgggcgatgattaatttggaaggacaacggacatcacatcatagatatggcagtggcaactcatattgtatatgttttacaatctatacaaattggccattagcaataacaaatagaaattaaggtttactgctccatgacccagaaccagtgattttatagccaattctggagatatgagagttcagtattctcgccagcttgtcattaattagcatcgatctattttagccaccaataagaaaaggaaaatacatccacattttaaccttgatgaagagcatgcatatcccacactgtacaaacaacaaagcataatttcaacagaataaaacagtttctaatttcctaaagcatgctgagtaatatagcatcagtatataatagcatgagaaagttgaaattacccggactggcggtcacaaaagcatcagtggaagcctgtaggaagccataaacccatgagctatataaaatacgcaacaaaccactaaaatgccatcacaatattcagttatcgtgttagctaaggtccaatgtttgcctcatattgtggtctctgccatgcgcccatgcctgaaaacgaaaatggatgaaagtggtcactgagatgctgccaaatataaatattgacccatgcaaaaatatatgctacagtttagccgaataccggtttatatgataaaaaatagagtagggaaggtcgtttatcaaaacaactaattaaataatgatcatgcatagggatataacaattggacaacaaataagacttcccaaggaactacccaaaaaactgaaataataccaggcaataacaggtagagaaaccctaaagagcaattgccaagtagctggaagccttgaacttgaaatatgaaaaacatagaaattagcaaacgaagccactcaaagaagcaagtacactattagaaaataaaaaaagataaatgaaacgaaatatgcccatgtgttgttgtggatgattgaaaaatcgtatagatatatttgagataggatgatggcacataaatatgtagctaggtatttaaacaaaaggagagggaaactgtgttgcatatatctgttttagtagtaactgagctactcatcatatagtattgggatcacatgtaccaaaacaaaataaagttacatacctgaggcaaggaaaatagaatatgcatttaagcgtatggcaggatgatatgaaaaatagcttttaagcaatactacactacaacaggaagcaagtggatttgacaaactttggtagagataggacagtactcttcatcaactttacattgaaatcatccatgcatttcttgggcatagaacaatggccatgtaaattatcaatggtagagtaaaggatggtgaaataaattaattggacaacataatgataaaaggggatcagggagctgacgaaccactgtcctggattaaaatgaagatatgcaaggaaaataaataaaatattcattagatattgatgccagacattaatattgttttggcaatgagaagtggccaaacggcaacaatcggaggacttctttttattgaaaaatcgtatgacttctggctggatgggcctagcccaaacctgaatcaagattagggcctaatccagatagaaaataatggggagatcatacctcactgtcccaaggaaggtgacggcagcacaatggctagaagaacacttgctccactccatagcttgtacccaaaccctaactgactcacaagatatgtcatccaaattgacgctgcaaaggatagaagcaaggatgctgaagatggagaagcagattgagttagggcttggcttgctctgctctactccatacccataccctaactacagatagattcatcacaaaataagtcatccaaattgatcactgcaaaggataaaagcaaggttgctgaagataagaagcagatcaggctagggcttggcttaccagactgcacatgttgtcaacaccgtgcaaagaggtggacgaaggcaactatggcagcgggcgtgcacccttcgtccaccttgagaaattggccggtcgagcaagcgaatcaagcggaacggtggcggcgcttgcaggtggctcgcaagaaggcgacgaccccggccgctagctccgcaagaaggtggcggcggcgggcttcgcgactcgcgaggggaagatgaagatttgagtattttgggaagggaggcgcagaggatgtcgaggatcgaggggattggggaagctatgccgggcgcagcgatgtgcatgtgaggcgtggacggttggatcaaatcaacgcgtggacatcggaaggtgcatgctgggtgatgaactgtagtactgtagcatcttttcctgggctgaggttgatcaaatcactgctagtagtgggttgtaaaaactaaggatttaatatgataacccatcaaacatggtaaaacccaaaaaaaaatattttcactgtaattatcagattatatctagcataattttagacatgtatgtcaaactacataattgttcgtagggatgaacaatatattggacatgaattatctatatttctaaactattgtatatgatatgctagtcctcgggaagaaaaagtatttttaatatttggttgagaatttccctttacttatttcagtctataagaaagttttctacgacacccatatattcacatggagtgatggaggccatcatccatttgtctccagaagcagatcgacagaataaacaccagaaaaaccaacctactattgcacaaggcatagaagcccatgaacagcccagcagcccatcgacattcctaaccctgactgctaactgcctaactccaaccccggtccactcattgccccacgcggccacgcccgcactcgttccccattcacatcgcacacacgccacgccgctttggatccggctccgtggccagcacccgcatcgccgcggcgcgcgccaacggtggcgccgacctggccgtcttcgagcagttcgagcggctggtgcgcccacccttctctatcccccctctcgtcgacggatcccgccgcctgtccgcgacgggttcgagcagcgggcgaagcaagagcagcggcggcggtgagctcgggcgtcagcggcatgcaaccgtgaaggtccgccggcgtcggcgatgggaagggcggaaccggcaccccctccctgcaggctgctcgtatttcgccacctctccgccccacacgcacgcggccggatcctttccccctctcaccgacaatgtgggcccacaagtcagcatggcagttgtgggaacggacaccacggttgctgtctttttaagatggtatagataataatataagtacgccctggcctgcagatcgaaccgttaatttaatttacagctgcttctgtagagtagtggtgtgctcatccctcttgcttaggcattaaccacgcctgaatatacatacgcgcatgtactcctatcttgtacaaatactaattactgcatgtaaaagatgtaacactactgcagtgataatgttcagaaatcactagtggcactgctattgttattcctgttcagtgtattgattgttctttaacagatttttttttcgaaatatataatcaaaatactgcaatggccaaatgatcggagataaaattgggtaatgtataatctttgcaacaagagcactgtgtaccacatttagagcaggtacaatagcaggttataagctagctataaacatattttaaacagataaaggaagagagagagaagagcaacgggctacagatctatagccagctgcagcacggactccaaaacgtaatgtgtgtatgataggtgggaccagatattaatagtatagtaagcaactattgtatgaattggctattacattgactatagatgatttgaagctagtagtgggctatactattaaacttgctcttatagtgttccttagagcaggtacaatagcaaacatattttaaggagataaataaggagagagaagagcagcgggctacagatttgtagccagctgtagcacggactccaagacgcagtgtgtgtatgacaggtgggactaagtattaatagtgtagtatgtaactattgtatggataagctattagattggctatagataaattagagctagtagttggctatactattaaacttgctcttattatgatctaaagagcattgtgtaccacatttatagtcattgttcacttgtttcaaataattctccaatacggaccggtctcaaactgaacactcgagatgaaaattagtctgcacttgctgacagttttggcagactagagtttatacttcatgtatactcatctgttgctttttcttcaaggacaattgaatactgtatgtttttatttgatttttaatccatcaatcatgcatgaaagcgactacgggtattctttaactccaaccgtgtcattcatgcatgcaacaagttgccctactattcgcgtacgtatgttatgtataggtacatatagatgaattcaaatattataagaaaccgatgcatatataggtgaaaagaaattaaaggctacacactaaaatttgttacaaactctaatgtttagctttttataacccacaaggccacaagtaggtaaatcaaacgttcgagaacttctgctagtaagaactttttaatgtgcatacaacactgctgctaggtggaaactagagttactagtggatatcatgtgcattggttatgatatcaactagtagtaatcattaagagcaaactttagaaaccatgacccatctaagaatctacagaatcatcatcagcagcagcacgattaaacatcgaataactaagataaacatgacatctaaagttcagtggaatggcagctgcagggctccaaaacagtcagcttcactgtggaaggtaccctaggctggatgtatcttctgatagccaagacccctctgtgaccttccatgataatgtccctatctagtggggggcatttgctgattttgctgcctggagtatcacacctaaaaccagtctgagaagcatccaatgtcaagcactcgagtgaagctgtactctcaaggatatggcatgtcagctcaaccaagctctttacagagatgaatgatgtaaccgtcacactcttaaggttgtgatgcttctcttctcgtattgatctcagatctgcaggatgtgcaaaaattgaaacactctgcacgttccgctgcattacctaggatgtgaa

SEQ ID NO: 2791 - DNA, 4742 bp, Oryza sativa
atcctgcaaaacaagtgtcggtgcccatcgaatggtggtaactctccttcagctcataaagctttaacaagttacaatgacacctagttcaagaatagcacgttattctaatcatgacgaccctgtataacttcggttctcggaaaaaaaaatgatgaaaagaaagcaacaatgatatatctttcaaacacttctggtatttccgctatgtatggtatgaatgcaacatatatctcatatttgacttgaaatcttgggcagcatctaaatcacgtcaaaataattttgagtcttattttgcaacatgggaattgaagtgcgtcacaagaacattgttcatgtgatctacgtaaagccagcttgcgtaccttagctatctcttcttcatcagaaacagtagcacaaacatactcggcatgtatgcgccctcgctaatgcaagttccacgctgcatcaaaagatgcttcctgtgtctgcagatgaccaaaaaagttcaaagcatgattaatgcatcactaagcgcaccatacatgtaaagaaaaaaaaataatggcttcaattgccactagtccttgcggtattaacagtaacctagtattcccttctagttgcattattattgtagtagtgcacaggcctgactgagctcaccattttaagaacacatttcatcactgcattaccagtagaataatgagcaggctagatctgattagtgattaccatctctcgtctgtaaacgagacaatgaacaattgagcatctcaatgtgcaaggacaacgactgttgtgtgcttccaattctgaagggacaaggagtatctctcagttgactgctcgtgatgaatctccataatcattcaatgtggaagacttgaactcctttttctcttaaagattctgtcattcctatgtaccttcattttggtacaagaaccagttcagctgcctctaccgaaattattatctttgtatccttcagatctgagcataagctttatgtaattctaggaatcttcttgtgtagattcaacttctcttcttccttagataagacatttgcaccgtggtagggcagctgcctgtattagttttcccagtttgttaatcttggtgaaagcaaaaaaccattggaaccacttacctggtgctaaagttgtcttgccaatccagtttctagaaccagttatttcctaacttctccaagcattagataagtaaccagccttttgttatgcagaagatgctccatcagtagcacgctttgcttagttactgtcaattttggaaatgttcaaagtcaaatcaattgtgacccagagcttgctgatcctcactgactatttgagcattactccagcaacggtatatcaggacttcaaccggctgtttcttctgtactctggagaatctgttggttcctaaaagcccttgtatgattacgctgctagatttgtttccgagaataaacaaaagtaggatattccacgggtcttccagtgagaacgtagtagggtgacctcaactgaaagggaattctgatattcatgtccacagtcttttgggtttagtgtatggtacacagctcttggtggacaagcattcagaatcatggcactatgtctgtcaactgacaaagtaataacaatggacgatgctctgctaacaaggaaaatagggtatccaccagagcctcttccatctttcttatggttgatttgcaagacggcaggtgtatctatatctgagtagaattttgcataacagatggaaaggatatcagggatgtttaattaagttctgacctccaacttctctagatgaatggccacatagaaatagcgcgaaagtatcagttggctctttcatggtttgatttgcacctttgcagttcctcttgataaaataatgagatggcagcagtacatctctaaccatcaccaagatgattttgtttagactatcacattctttctgaggttgtttactcctcagtgctctctctgaaatgttgagaacaaataacaaatacagaatagaaggcccactgttcaaacattgcatgcaaccattttgtagttggatttgccttcttttcagtttcctgagaacgctttcttccacctgaaacaataaatatatgaaaattcaaaattaaggagcacataaagcatgaactctgtggcatgttaaggtgaacaacaatataaaatggctaaaagaggcacttaaccttaattgtttgactcaataagcccaggttaatatgaaataattatttcagattgttcatacaccggggaatatatgctgctgataaagaagcctggaaaagctgaaaattaagactgatgaagtaattttgataaaaatgtgtatgctgaaatgaacatctagcagaatgggagaaggccagaacagctaataccatcaaaaatgtgaatgacagaagaagctgggaaacttctgaaatcagtagcccgaataaagaaaaatccctcttgcaatgtagaaggaaaatacagaaggtcatataaacactaatccgataccgaattacaaacccagttgagttatatgtgtatagagtaggcacctcatcttctctagcagctgtttcttcagctgattgttttgccagatgagccactaccagctcttacaatttcacaatggcaagtacgtagttcgaagttcgtaaatcagaaaatgtgcctttatcaatacacagtacagaactaaaggtactgctgtatggcataatttactgaaaggtatacaaccattcccaaacaaaacagaaaatgagaactgaaattcagcaaggtaagcagacatataacaggtgctagtcagcatacgacaaggatgaacttaagttaaagcatctttcaccaacggtcgaagaccatggtctagtgaacagaaaaaggggaaatcttccttcagaactctgcgccaaaatagcttcagctttgaccggcgatgtaaaaaaggatatgatctgcttctaattggcaacagacaagctctcctagtgttgaggaactttggaacactttgcaaagcagagagttctcatctttgtaggactaaaatctaagatagctgcacaaaataattacagcaattagaacatttctagtaacaattgtacacatgagctaaactcagagagaacaaaatggaaacctcatcatgcacaactcttaatggaatccatttgcgtgcttattgaatcatgcttgtgcaactaaccaccattacaactagtgaaaatatctcatgcagtcagataaaaaaaatattatgtggatctgagaaactctgccatgcatatcttctaacgcgaaacatgtgcttaaggaaaaggataaatgagcatgatcacagaggatatatctgtcccaaacattgtctatgcagtgctagaagcacttgttacttgtttgatcaattaaaatgtaatgccaggagtaagcaaaaaaaaaaaaatcgaagccagggctttgatcttacttggaataacaagaagaaagtttaatcaacatttgaccaaatcaccacttaatcagaacaagatttttctaagcaaattgattggattttgcaacttcagacaatcaagttaaattgcttatgttcaacttgctaatagctgttgatagcgtaattcttcttccatgactttgagtagtacacagtagtttgccttactttatgcattagaatagtgtgcctttgcagtccacattttaaacgacagaataatattgcaaatccatgatatttcaatttgtagagtgcacacctgctgcattcgggggttggatgaatcatgggcaagtaagaaggcacatcaggttattttacatatatgatgtcctcctcatctggctcatctgcatcccagtcaccttcttcttcttctgatagatttgcaccttctccatcttcctcttcttcatttccttcttgttgctccctttcctcctttaatttgtccagtatagcaagaatctatatatatggcaacaattagactatagtttcccaatatatttgagagatatgaaaaaaaaaacgcttagtgcaatactgcaataattcattgtgtgctaatgcaacccctgcaaacattggattgttaagttataggttctgtgatgttaaagcttaaaaaaatgtctgtatttggggctgattgcctcgcaaagaccctacaggaagaagcttacgtctggtgtggtatcaatgaagcgtaacctatgatcttatccaaataaagcatatgggtacttgtagctataattttcaggtaaaccgaattgcaaacagccaaacacaattttaagtttaaacagagatgcaaaatactaacacaacttgtaaggtaacaaaaacaatgaccatgcttcttttgaactatttggatcttgatatttgataactatccgaggagcagtactggacaatcacatagtatagatacgttcaaggatgcatgtactaaatgaagataaaccagtgaaagcagatattcattggaacaggtagatagatgagtttagagtgtgtaccctgcttccccgctccatggactcatcctcgatgaaccgtatctcaggcgtgaggcgcagcttcatccgcttgcctatttggctcctgacgtacttagtcttagccttgagcccagcaatggccaccttcttccccctctcgtccccaaacacggagacata

SEQ ID NO: 2792 - DNA, 8341 bp, Oryza sativa
ttctagttgttggtatccggataatcctggccgtccgttgtacgatcggacggtctcgctggtgtgtgggccccacctcgctagtgctctagttgttggtatccggataatcctggccgtccgttgcacgatcggacggtcaggatcggactcagcgaggagaagaggagaaaaatctcgagatgaaatggacgcgtaacctgactccgattcggatcccccaccggcgagatggcacgcggatccgccgccgcggcgatcgccggagttgtgtgggtgcttctcctcctcgtgggggtggcgtcgggggcgcgtcttccgggcgggagcgggggtaaccgggggcgggagccgcgcgggggagcggcggcggcggcggtggccacggagacggcggtgttcgcgctgggaagcttctggaggtcggaggccgcgttcgggtgcctccccggcgtgatccgcacctccgtcggctacgccggcgggtccaaggcccgccctgagtaccgcaacctcggcgaccacgccgagtgcgtcaaggtgcggtgcggagactcccacgcttttagctgttcttgatcgataccatgaaccaatgatatgttcagttccatggtcgtagcaattcatttccgtagttagcatcgtaatctgattggccattaccatttcgtatgtgtaagttaaaaactgaaagaaaatactcgcgagttttcatttccatcgtaatctgttttctcttggttccaagtttcattttcattgcttaatgaggtatcattacctaaaaaaactagaaggaatgttctatggtcaaacaggaacgattcatcactgccagatctgcttcttgtgtgtatttttttgtgcataaaacaatcggagatgtttgtccgttgagtgcttcattcaattgcatgtgtgtgtgtgttgtaggttttggagtggtatactggtattaatactttgcagggcctccttctaaactaactttgttggtgttttatgagctaagatgattgacatttttgagtcatttaggttgaatatgatccccggttgattcagtacaagaaacttctagaggtcttctgggcaagtcatgatccacgagaggtctttgggcaaggaccagatgttggcaaccaatacaggtgcttgagttttctaaacctaaccccttttgtgcaatagatctttttgttcacagtttaccatagtcagatttatatactaatgatgtgattatcttttataaacatgtttcatgctaaaacttagactggtttccataccagcatttagcatatggtatttgctaagtttcacaacaaagcaattgagaattgaaaggtgtacatttcatttcatcacctttgtctatcctacttcaaacaagtacctttgtgtacaaaatgttgccatcatggcttaggaaataattggtcactgaatggtgtagctgtcattctcactagtttgataggatcctcagacagcactgtaatgcgtcaattttaattcttgcttcacttatgtggtcacagatccatcatcttcacaaatggatccgtggaagctagattggctggtcttagcaaagaaaaagaacaagctaaggatcgccgcagtgtcattaccacacagatccaaccaataggtgcattttatccggctgaaccggaacatcaggtagcaatcccatctgaaaattcgaactcaccatgacattctatgttttatttccttttagttattgcttgtactttggtagaaatttgagctgaagcgcaagccgtttctcctgcaactgattgggaacctgcccgaggaggagctcctgacctcaacactagctgcaaagttgaatgcatacgctgctgagctctgctccccaaatacccagaacagaataaactccaagattgatgagattgctaagaaaggatggcccatcctaagagacatttagctcggtgttcctgggttttacatattaatatatcattatccaattgtgcatgattttgccgcaaatcttgtccagatgactggttgtggtcattccttggtcgcagcaatcactaattagcgttcatgtcctcctctgctcattttgagatctctctaatagaatctgcatgtatatccaaactttcgagttgtgtgatgtgacctgaaatcctgaatttatgattggttcttacagaacaggtgccgaaattgtatattgttactctggctcttttatgtgtaaaaatatatgatgtggattcattacattcttaatcaaaaacacttattcccatggaatgctaagaattgttcattcttttgaaaacaaaaatcacattttgttcttatggattttttttcacagtttgctcttcggaatgagtaatgggctaatggccacagtgaaatggcgccagcaacgctatactagatttttcttgatggtacaattgcatggaacacacaatctacaggtggaacataagaccctttttttgggaaacatttcgctattgttgcaacctcacacagctaagcagagactagttatttacatgctccatagaaggaagagattattttgcaaggctatttctcagaaacattctaaacaacaagtgaagacacaaatgcacaatggtcagaggccactaattaggttgctgcttgactctttttgaagcagttctggccagagcattgcatatctccctctttcttttcgcattttcatcagtcctgccagaagcgacgttggcctgtcgttccaatgcttccctcacaaagaatttcaacctccagagggttgtctcactctgcacccgcataggaagcatggttagaataaacaaaataaccaaaatattacagaggtaagtgtttggacagcacatataaaatcacctgagcatccatatcaagttccagttcgtctcctttagcttcgaagctagggttgtcttgtgcaaccatctccaatgccttagtaagctcttctggagacaggtggcagagacctgcacccagttttcttttctcatatgtagtcattttcctacaacatcaagattttggcaacatgccacgtgcatgagtttgacagcagttgcaacttataaacagcagataattaaatcgataggcaacagatgaacatttgtaagatgtaccggcatttctggaccaccatttgccgaagctcctccaactgcttgttgatttcaatcagctggaataagaaaccaaagagaacacacttaatatctaacagaatatcagaacattagtacaaggaatgaagagcaggagttgcaggcattttgtgtgtcagccttctagaaaaatcacaaaaaggtatatccataggtcaggaactcaggatatacacggctgctcaaattggccacattacatactcaagaattgaatccatagtggcacatctttattgacaaaccaaaaaaaaaaaaacataacaaaacacatttctgtgaggcctgagtgttgcagttcatattctgaatggcagtcaagtcattacattttgctttgtggaatgagtgatcattaaagctgccatcgatgtgccgaaaataacaaataacagtcaatgatgagcatacctcattgtcagtatcttttgctagttttgcaatagcttcttctggagaaatgttcacttttggaacaccgttggattcctcatccttttgtttcctttcctaaaaagaaaagttccaagttattactgtcaaatgctaagtaacccatatctgcagctccaaaaagaactaatatatgcttacaaacattcattcacctcattttcaactttaggaagaagctggagccatttctcttcaaatttctcaagcaatgatttcgccattatatgaacatcatgtcgttcatcattgtacttcattgcattggcaaaaattaatctaacatccgaatatatttctcggacattgttatacttgttgtcatctttcccttccattttcttttgtatggtcgaaaaatccataggtttggtgataatctgtaaataagacaaattgaaaacataaatatcactacaaactcatttcagggaggcataatatagtagtagtagatgtccaaatcaacactgcttgacaagcgcagagcaataaatatcacccaaaagaaaaaagaatgccatttaactgagatgtttatatttatatatagcaattggaggtctcctacaagctcccacgttaatgctattaggggggaagctggaacacattagcccatgaaaaaagggggggggggagggggggagtacaaataaccacattaatctgaaaagggaaggaaaagaaaagatgctaagcgttcatctgagaaacccatggatactctacaatagaacagatctactgtgtaaggaaacatctgattctgctagaaaaagaaaccaccgagtgatgtacactataagcataaaagaatcaatattaacacaccatctttgcatgtctgatttttgcaggattaagcaataaataaacagatagtagaagaggacaaggtagtaaaaaatgcctgacgcgacctgtgaaacatgaaacacaatccaaacacgcatagcacacatgtgcatagctgcgaatgaatccatgtttaaataggaaacaaatcaacaaagcaatcattagacaagagtacagcataccgtgcggtcatacctagttagcaagactctgcatagtcactacattgccaataaattaaacctacatggactcaaacacataggttctaaaaaggatgtactttataagaggtatttgcatctataaaaattaagaacgtgctgtactatcacaatattgcatatagtaggatagaatgcatacatgattattatgtgccatatatgcagatggaataaatcattcaaaacatttgaaataaaacgggcaagaaactttacaatttagaactacaaaagtaaaaatatcaagggatacaagaattctaaaaattatctgaaccatcgaaatatatgaactctaacaagaaagaacaattataagttcaagattaatcaacagaccatctggcaacaaatgttggtgcctgagccaagaagagggtcaaaattcaaaatgcaattatttacaaataagtcagcagaaaccatgatagaattagatttatacaatttactgaagattacaaaatcgagttaacagtaatttattgccgcacatattcaaaccagaagaataaatacagaaaatgaatttactttccactatttgccatattgaaatgtttgaattaaaagcttgtgataagtttattatagcgttaatactaaagctttggtccaaaataaaatcaaaggttgtgtttgactgattagaattcatacatgcatgttcttcaacaataaacggacacatatacacacacaaaccttaaacgtgacacggtagataatttgttatagatgtataattactagctcatgtgggtgcacagattctgactagttcatttaatcggttaccaagaaataaaataagtgtccctaatattgcaggacacatattgccaaatctgaaggatgcatccataaaccattaggattgacaaatcaatgctgcattccaagagtccaacatcattttggtcgtctgtaatcctaattcattatatcagtgtggaacagtgtcacaagtcgaacaagcgaactcagggaagagagaagagggggttcactctgctagcaaatacaagatgaaatgtgctagcagtattaccttgtaatagtcatcaagctgaaggcctaccacatcaaccggcttgagaaatggctcggcccattcatgagatgtgatctggaagaaaaggaaatcaagaaaaatattgagtgcatatcatgcgcatttcatttggaaagctagtagtgtgttttgagtgtcgagttcaactacgatcaatcaatatgaatttgagaggaaacaatggagcaagaccatacaaatttatcagcatatcatcaagctagatatatctgtctattttgaaggatgttttctatacatggttatggagcaaaattagaatcaaaactagcggcagaaatcttaattaaactgcacttatttatcattggaaataacagtagccacacgtgcacaagaccggacaataaatagctttctagattttttttcagttagacctatcaggtacagtagccatgcactatccaaaattagcctgcaaattaaaagcttttgcaccaagcacattctgaagcatgattcaggatacactaaatactttgagttatccatgccagcaagcaagaacaacatagatcaatgcatttgtcggatttttcttttttttttttcctctcgagatgtggttaagaaagatcacctggcgcacaatcgtgccaaactggcgcataagatcaggcatccctttggaaaggctgctatccttgcgaccagccttccggccaccactgccatgtttcttcccgtcgtagaatcccaccacttcattcaccctcctctccagctgcaatccacataaatctccaatcaaacctctacgccccaattatccgaatacaataaatgcaaaacaaagaaaaaaaaactgtaccctactgtttccctaaccaaaatccccaaaaccgcatactacagcgaggcgagaaggaactcgaaaatccttccgctgaagaatctcatctaccaggctaagcagcgagacggactacttccaaggttgggggagttggtatttatttacctggtcggtcttggagacgaggtcctcgacctggcgccggaacgcgtccacctccgtccccggggccctctccccggcggcggcggcagtggcggccgtctccgccgccgccatagccctccctccctccgccccctgtgggactccacctcccggcaccatatctagggctcgccgccacgcgcgtcgccggcggccgtctgcgagcgaaaaaggcgaaaccaccggcgcctcgactcgacggaatctttttttttattttttttcctttttttttgccccgcatctcttcttcccttcaccttccgaccctgtgggccggatgggatgggccatttcctgggccggaagacttcgccctgcaggatgtgggcccaaggtggggcggatggaattgttgggcctagtcagcctcgtgatttgttaacatgggccggagaaaaggctggggcgaacggtacaggggccgtagggcacacgtggaataagttcatatgagttccttaacttgtcaacgaatccgatttttgtccttaaaccccaaaaccagatataacggtccctcaactatcaaaaccggtgcagataaggtcctcgacggtttagatggcgattttttctgacgtggcgcctacgtggctattttgactcggtcttcatctgacgtggcgcttacgtggcaattcgatccggaaaaataataaaaccagtggaccccacatgtcagtttcacacacaaaataattaaaaatggtgggacccacgtgggccccacatgtcatcttcactcccctcctcttcttccttttcactccccatctcccctctcttcatctcgccggtggctgctgggaaagaagcagcgtgtgggcaccggccgtgggctccgcccggagggaggagaggagcggcgcgcgcgggcgtcggccggagagaggagagaagcggcgcgcgcgcgggcggcggccggcgagaaaggagccgcgcgcgggcgacttctccctctgcttcctctcccgccgcccctgaagacgacgacggtgacgggttcaacgaggagaaggacgagcacctcaccatcgctgccccgcccccgtttccaccgtcctccgcgctgcccaccgacctcgatgacgtcctcttcttcctcctctctccagaaacccacgggtcacgggaagttatgcggccgacggcggtggcggcggcaggtcatcagcaagtttttctacagtgtcgcgaacaacaacataggcagccgcgcaaagaaatcccatttgcctcattccaccacctagtgtcttcctaagaattttagcctgaaagtccatatttccatcgttacatcccatctgcagtttaaggtaacaagttaacaagcacaattgaacagaccttttctatgaaggccgtcgaaccaacaataactgatccaacaggagcgcctaagccttcagatatgcacacctgcagtgcaaatttccgtcgacctcctcgcaccgctcttcaccga

SEQ ID NO: 2793 - DNA, 2350 bp, Oryza sativa
cgagcaggtcgcagagctcggcatggggctcgctgactccggcgtgaactttgtgtggggtcgtcggggataagaacgcgtcgccgccgcagccagggtcgcctcacgccgccccttcctcttacgcccacagccgccggagcgtgcctccgccgccgcgcgccgcgggccgctgtctctccgtcgcgagaaaggagataggagagagatgaactgatgaagagtggggagaggaggaagaaaaggagggctgagaatgacacgtgggcccacgtgggccccactatttttaaattaatttgtgtgtgacactgacatgcgggtcccacaaggtttattatttttctaaatcggattgcccatgtaagcgacacgtcaatgccacatcagatgaagaccaagtcaaaatagccacgtaggcgccacgtcagcaaaaaccactgtccaaaccgccatttgcactggttttgacagttgagggacctgttgtatctggttttgtggttgaaggacggaaatcggattcgttgacaagttaagggatcttagatgaacttattccgggacacgttgctacttcgccagagagatcctcaacggctcgattgtcgcagtctcgcagagatcaaattgctggcaagaagtggcaagaagttttatttgcggttttttttttttggcggggaacggtttctttagttcaagtaaatggtagtacaagtgctaatgaggtggcttatatgttggctagatcgactactggcattgtattcatggttgtatctatgaacttgtaaactctgaatctaggaacttgtaaactctgaatctttatttgaatgaatgagccgaccttgatttaccaaaaaaaaaaatactcactagctgcttgatctgaatgttcaagtgggttgatagtgatggtgaccatgagtccatgaccgtgtcttggctgccacacgtgacacgacagtatcgctctcgtagtcgtaggcgtacgcgtataccaacttggttacaggatactgcttcaactttggctgcctctgccaaataactcttcacatgccaaattgcctatcacccaaccatgtacgtatgatgaactactaacttttcctctcttttttcaataataacttctaactgaccaaacgattgatatgtcaataagccatggacttgttattctggtttctgaagataaacatggaccagctttcaaggcctctttggatcgcaggtgccagatggtttcatctgaaaacgaaaggtaatcaaatgaatcagatctgggtgggcctgttaaactacagaacagaacagatgctcctccttatcaattctgatgatgcgtcggtggatggatcagtgaaagtcagcttcacagaataacagtgcctgactacttgtataatccggtgctccgtcttcataacacagcctgaatcggtgaattgtcaatacgcgctgtgccggtattcaacagaaagacaagtcaggtgctcatgacaaaggaaaattcattgaggacaaagtacattgatcacagaaccaaatgccacttgaacattttcaaagtcagatatagtaaatgcagcaatacgtacagtatgtttgtgatttgattcacaatcggtatggaaatattcatgtttgaaagtaacttacacatgaccatgaatttgtagttgtgaaatgtgaagaagtcttaccctcacaatattgaagatcatgggcaggacttggagacttgaaatgcatggcattacttcatttacatggtagggcgaactagaatatttggttcacataatcacattacagaagatgcacaaaaatgtgaacaggtaaaatcaccttgaaaagaaactttagttgcaatatgacaacagaaaacccataaaatcccaaatcaatcagatgttgcagatgagtgagcaatagctcatagtgtagcgtacagttatcaaaactgagatcttgcattgttcgacaataggctcagagaagagctgtctgaacaataagattgatgctaacttacatccaatggaaactatgctgattaacaataatagtacagacaatcatcatgtccttttcagttcctaagaagctcaatcctcatctcaaactcacaatccatgacagggacaccaaagaaaaccaaaaccccgccaaacaaccgttaagtattttggctgctgaaggtcaatttaccaccatagacaggatacaaagggaaggcaatacaatactcacaatgcttgtcctgaaggccattttgtcacatatgtcctcccgccttacatgcaagatacgaaactggtgctgactttttatcaga

SEQ ID NO: 2794 - DNA, 5848 bp, Oryza sativa
ttcggccgccgcacgctgttcctcgccggcggcgcccagatgctcgcatcgcaggtgctgatcggcggcatcatggcggcgaagctgggcgacgacggcggcgtgagcagggcgtgggcggcggcgctgatcctcctgatcgcggcgtacgtcgccggattcgggtggtcgtgggggccgctgggctggctcgtccccagcgaggtgttcccgctggaggtgaggtcggcggggcagagcgtgacggtggcgacgagcttcgtgttcaccgtgttcgtggcgcaggcgttcctcgccatgctctgccgcatgagggccgggatcttcttcttcttcgccgcgtggctcgccgccatgaccgcgttcgtgtacctcctcctgccggagaccaagggggtgcccatcgaggaggtcgccggcgtgtggcggggccactggttctggtccagggtcgtcggcggcgacggcgaggaggaggagcgcaataatggcgggaagctttgactgaaacaacgcgcgcgcgcaatatccaaagtgcgttgcacgaatcttgacgcgcatctccccccctccgtttctatgctaccttgttcagaaaacagaacacacctacagattcagagttttcagacacatcaaggcttaagaacatactccctccggtttgagattaattgatgggttactccttcatgtttgagtttaattgatgttttagctttctccactactctctcccttctatttctccagaatacccctcatgcatgcatgcaaacagaaaaaagtaacggctgcttggagtattaatgaggggtataacaggaaatatggatctaattaatactgtcattgatatttgccatgatgtccaaaacgtcacttaatctcaaaccggagggagtagttaatgttgtacttcctccgtacgaaaatataaaaaaaattatatatacacattatcaaaagctagtgttatctacccctcctccgtcaaaaaaaaaaaatcaaaccctaggtttaaaacctagggtttgatttttttttctttttttttccagagtagtagatatatgaccagaagagatggagttagtatgctactacaagattaagcgttttcagataaatcaagattcggagctttcaacacatcaaggccccgttgttttatgattaagatacatattttatctcggttgtttgttggcatgtttttgctaaaccatgtgtttgcgaaaattttttatatagaaattatcttaaaatatcaaataaatatatgtttttaagtttgtaacaaattaaaacttaattaatcatgtgttaatattttttttgtgcgtgcttatacttaatcttttctctgtatctatctcgaacgggtccaagattcagagctttttttttttttttgaatccgggtgtgtttagttcataccaaaattggaagtttggttgaaattgaaacgatgtgacggaaaaaattggaagtttgtgtgtatagaaaagttttgatgtgatggaaaagttgaaagtttaaagaaaaactttagatctaaactcggcctgtgtggtgcgctctgaactaggaatgttttctaggtcagaacatgtactaccttcagattccaggtgtagcttatagagtaccaacagagtgtccctatgcttaatttcagtgtagaaaacatgcagttgctgtaacctgtactctgaaaccaatcgttttgatttcaggccttaaaactcatgtgcaaaaactgttggaaaatcacatcaacaacagttatcaaggtacatgaacaatcatgcatgaggcaccataaatgtactagctagtatcacacatggctagatctgacgagattagtaacaaacagtttgcaaggttcagaataattactgtacgagacatcatgatcatctcctctgcccagcaggtcagcatctaccactaattgggggcaagataaaaaaaagtcagtgtagatgtgcaagaacgcttctttctcctccttgatcggaattacgggcagaattattagaacaggttaaggagaatagactgaacagggagcagcagtacaagtgcagtgagggacagtatttggaccggtttgtgctgcattgtcttagtgttatggagcctgaattattggggcttgtgtgattgatacctctcgcacctgtccatgttgccttgtagatatacacacatcactccatgcatctactctctagtaattatccatgtgctcgtctggttggattggaacaagcaacaactaggtatatacacttgtctctgagtgatcttatatgagaaaaataattcatacaaaattcccgcatttcaaataaaatttatcaaattccttcataattacctcgcttcaaaggacgcaaatatagtgattttataatacttaaaaagtaccgtacttttgattaatttagcataaattttaatacctctcaaataccgtaaaatttctcaggtaaatatcacttattggacaacatgtcggccactcatctagtcatcttagagtttagctcacgttgggacgttaacctaatagcagcactccaggtgtcgtggagcctacaagaacgtcgtcgtcggtgaagatagacaaaccatggtagaaagcaaactttcatgaaaaagcgaccaaattaggcgtatccaatccaatcctccaagcgaagcaaaaacacacgtcacaagaagctcacagcaacaactaatggctccatatatataaattaaatctatcctatttggtgagtggtatttattatctgaaagaatctggtgagttttcatatggatgcctacgtggagacatgttgtgtggccaactggggtccaacctgccaatcatgcattgggccagccatcaggctacttgttagtcgatcgatcgatcgccacgacaattcatatatatcttatttacaaggagagagagaggaggaatcaatcgataattcgagacatatagtgatcaatcatgcatcttctggttgttggaagctagcaaaactgaaggttcttgttgctgttgctgttcatcattatcatagccaataagaaagcaagaatccaagaggagacaggatcggaggaggaggaagaaagcgagaaaccaatcgatcgatcgatcatgctgatcttggaggtgggcatctggttgctgccgttcacgctgctggtggcgccggtgaggaggatggtgaggctggtgcaggagctgcagcggatcatgctcgtcgtcgcctgcgaccggagccgccgcggcggccggccgccgacgttcggcgaggtcttgagccgcctcgaccgcctcgactccgccaccgtcatcgtctgaacgatgatcgattgatcagcatcctgtaagctgtaattaagttgcttcaattcctctgccatcttcttcttcagttcttcttgatgtaaatttctgaatccgaattaagtgcgttttagttcttcaagaaaggatgctctcttctgaatcttttgctctgtgatcttcagtttttggtacatgcaagcacttgcatgtatctgtaattatgtatgtacggtttttgtatatatggggctgaaattaagttttatccagctccctgcataagattattgatgaacaccagtctaaaaaaaagagtattgatgaacaagtattcataggatgaatgaagaagtgttctctgttgtatagagagaaaaggttcctttgttcttcagtttatgctgatgattcataattaatttggagctcatttctttctctgaatgatttggagatcctgattatgtgaatggtttctttctgaattttcctgaagagattgcaggattgctagcatctaggtagatgattccaggtcaaacaatgtgtttcttttgctttctgtccaacattcttttttaggatagttccagttttttgtttccttctcaaccaataaagctgctgcataatcttattgaagctgtcagaatctgtaacgtcaaatttgtatattcacatgtatgtcaggactacttaaaaaaggctgaaggggtgagatgtacatattagctagtaaaaaaaaatcaagttcagagaacatacatcattacctggggcttataatttctttaattttctatctgccattattgtgcccttctagaaatgtagggcaggttggtgtagaataaaatgcaactgcacatggctacgaatttctctcaggaaaaataattttctgagggagactagggaacggtaataccgttggaatggtacagatgatactatgtatcatgcctgatatctaggtatcatacctataccgttccaacggaataccgttctctctatttgatttactctaattatatatcacatcattatgtcttttggaaactcaaagagctggtgccacaatttagtgagtcatcataataatatacagcacgtattgctaatcattaactcttccaagcttatgttgtgagcaaaaataatttgtgagaccacaggtttattgatggtctctatacacgttcgctctcatgatttagaaattttcacgttaatcaggaaaaaaaataaaaattctaagccattgattataatgtggatctaaactataacggtgtagtttaaaccaaagaatccaagtcaaaatacaatttaaaatatttgaaggtcggaataaaaacataggaatcaaaaagagtccttttataaatacaatataaagtttggattaaaataaataatattgagataatagtccatttatttagaaatatatgaaattcatagtaaaaataaataatattgagaaaagagccaatatagaaatacgaatgcaattgtacatcacaatgaaattatcaagaggaatgaaaagtatcaaagtgaaaaagaggaattattttctcatttttctcattccaatgtccaaacgagccaaactaccaaagcaatatgcaattctttaaggaaagtaccaattgtgtttccttcccagaaaaaaaaaagacctaaccagctaatctcaaagatgcagacagaatcatgtaataacaaaatgtgtccaccagcaggttatcaggactaataaagtactactaatacattcacttttgctaaaacgaaaacaagttgagagctagagcatgaatcatatgcacgaaaccacatatatatttcctttgtcaaattatatgtcgcattattgtgctttttagaaatttgcagaatgcagagttggtgtatggaatcaaatgttgctttccagtttagttggacacataataatagtacattattgtgccttttagaaatttgcagaatgcatagttggtgcgtggaatgaatcaaatgctctacttccagttcagtttttccttcaaaaaaaaaacttccagttcagttggacacaataatacaatcacactgtgcatattgccaacgcttaactcttccgagtttatgtatgccgtgaacaaaatttgcaactgaaaccatgatcgtcggtgtaatgtggcaggaacggccgataatggtccggagggagaaaaaatgatgagtcaattttagacaactatagctatttcgttaaaaatatcagtatgctacaactttagtcaagtgtttaagagaactgcaatattgacatatataactttatcataagctgcgactttatatttctaatatccttggatctacatgtcatacatacacattaaatactcatgatcttacaaatcgggtctaccgtctacatgtcatacacacgtagggagtaaaattgtattttttatgataaa

SEQ ID NO: 2795 - DNA, 514 bp, Oryza sativa
aaaagaaagatggttcgtggagattttgtgtggattatcgccatttgaatgctatcacagtcaagaacaagtatccattaccaataatagatgagttacttgatgagttagcaggggctcaatggtttaccaagcttgacctacgtgccgggtatcatcaaatcggaatgcatatagaggatgaacataaaactgcctttcaaacccaccatggtcactttgagtttcgagtgattccttttggtttgacaagcgctcctgccacatttcagagtgtgatgaataatattctatctacattgctcaggaagtgtgtgcttgtctttgtggatgacatactcatatacagtcgaactatggaggaacatttgatccatctacagactgtgtttcagatcttacataaacatcagcttaaagtcaaaaagagcaaatgttcttttgctcaacaaaagctggcttacttgggacatattatcagtcctaatggtgtctccacagattctgacaagat

SEQ ID NO: 2796 - DNA, 7900 bp, Oryza sativa
  unsure (1)..(7900): unsure at all n locations
ccttcccccccccccccccccgccccctacccctcttcccccgttacccgcgcttctcgtgcagtcgtgcgctcgatgtggttcctgtttcgcttcactgtgctcgcatagtcgcatcgaagcggacgcctggctgcgcgcgtgcgcgatttggatcaacgcggaaaggtatatcgaatgagagaagctgaaaaagcgagaaatgacctggttattgttactgcagattgcgtctggtttcctgtgaaattttcttcccgcaaaacgtcagggtttaacttggtaaaactgggaatagaggaaagctccctgtgctgactttgaaactatcgtctttaacttgaagcctcttttaagttgaagccgccgtttagattgagactaactatatttatggcgtcacaatttcttttaccaaaaaagagactgcaaatgaacatatatttacattgtgtagtaattttgttgtaacttataaaaattacactgtcaatttcagtactgacattgtaattgtaaattttcgagtacacaccatataagagaaagagggaatatcgattgattacctacctgataaaggagatgtaagagatagaaaacatatttacatataagaaaaaaaaatgtagcaatcacatagggaaaaaaatgactgaaatcgaatcgaaactgtggcgctatttctttttagcaaaaatgctttaacttacatctttttatgcatataaggtagggcgactttaacttacctttgctccagggaaactaaagcttgctctagttggaagctaacttgagctgaattagccaattagccatcagaggaatgatgcaagggataatgcttgcagcgttgcttgttctttgccagttgatcaaaaatgcaggcaagatcactgatgctgcgtgcatctccagtgagagggacgctctgcttgctttcaaagccggtttcgctgatcctgctggaggggcgctgcgtttctggcaaggccaagactgctgcgcatggagcggggtgtcctgcagcaaaaagatcggcagtgttgtcagcctggatatcggccattatgatctcactttcagaggtgaaatcaactcatctctggctgttctgacacatctagtgtaccttaacctgagtggaaatgatttcggtggggtggccatcccagatttcataggctccttcgagaagctgaggtatcttgatctttcgcatgctggttttggagggacagttcctcctcggcttggtaatttgtcaatgctcagccaccttgatttgagctcaccaagtcatacagttactgtcaaaagcttcaactgggtgtctcgcctcacttcactggtctatctagaccttagttggttgtatcttgctgcttcctctgattggttgcaggctacaaatacgcttcctttgcttaaagtcctctgcttgaatcatgcgtttcttcctgccacagacttgaatgctctttctcataccaacttcacagccattagggtacttgatctgaagagtaacaacttcagttcacgaatgccagattggatttcaaagctaagttctcttgcatatttggacttgtctagctgtgagctttcaggctcacttcccaggaaccttgggaacttgacatccctcagtttttttcaattacgagcgaacaaccttgaaggtgaaatacctggatccatgagtaggttgtgcaacctacgccacattgatttatctggaaaccatttctcaggagatattacaagacttgctaataccttgttcccctgcatgaaccagttgaagattcttgaccttgcactcaataatctaaccgggagtctgtctggttgggtcaggcacatagcaagtgtaactactcttgatcttagtgagaactcattatccggacgagtatcagatgatattggcaagttatcaaacttaacctacttagatctttcagccaattcatttcaaggcacactgtccgaactccactttgctaatctgtccaggctggatatgctaattttagagtccatttatgtgaagattgtcactgaagcagactgggtgccaccattccaactccgagtcctagtactttatggatgtcaggtaggaccacacttcccagcatggctgaagtcacaagccaaaattgaaatgatcgagttaagcagagcacagatcaagagcaagttacctgattggctctggaacttctcatcaacaattagtgccttggatgtctcaggaaatatgattaatggaaagttgcccaaaagtttaaagcacatgaaagcgctggagttacttgacatgagttcgaaccaactggagggatgcattcctgatctgccatctagtgtgaaagtattggatctgtcaagtaaccacttatatggaccattgccacaaagactgggtgccaaagaaatatattatctatcactcaaagacaacttcctcagtggaagcatccctacgtacctatgtgagatggtttggatggaacaggttcttctatcactaaacaacttctcaggtgtactcccaaattgctggaggaaaggttcagcgctgagagttatagatttctcaaacaataacattcacggagaaatatcttcaaccatgggtcatctaacttcccttggatcattgttactccacaggaacaagttatctggtccactccccacctcactgaagctatgcaacagattaatctttcttgatctttcagaaaataatttgtccggaaccataccaacctggataggtgacagcctgcagtctctgattctcctcagtttaaggtccaacaacttttctggtaaaattcccgagctactatctcagcttcacgctcttcaaattttagatattgctgataacaatctatcaggccctgtacccaaatccttgggaaatttagcagccatgcagttaggcaggcacatgatacaacagcaatttagcaccatttcggacatccatttcatggtttatggtgcaggtggtgcagtcttgtatcggttgtatgcatacttatacttgaatagtctacttgctggcaagcttcaatataatggaactgccttctatattgatctctctggtaaccaattagcaggggagattcctattgaaattggatttctatctggactaacgggtttaaatttgtcaggaaatcacataagagggagcattccagaggagttgggaaacttaagaagtttagaggtgcttgatctctccaggaatgatctgtcaggcccaattccacagtgcttcctgtcattgtctggtttgagccatctgaatttatcatacaatgacctttcaggagctataccatttggaaatgaacttgcaacttttgcagaaagcacatactttggtaatgcacatacaactgtcaagaagctgtttgtaccacaaaaggaagcatcaactaaactttgacacgggaacatacttaagtgcactgcttgggtttgcatttggattctgtattatgttcgtcatcctgataccctacatggttgcatgaaagactcttatgatagcctatgctttggattggctattatgatatatgaagattttgttttatagttagttgagcattgtaatgattttatccgaacatatttgacaggtgggttaagcggtgtaatgcactaaggcttagctcttttcaaattattactccatccgtttcaaaatgtatggcaccattgacttgtcgcataacgtttgaccatttatcttattatcaaaaatatataaatattatttattttgttgtgacttattttatcatcaaataaaatcgactataattttacatatttatactatatcttttaataagacgaatggtcaaacattgtggaaaagtcaacggcattatactttttgaaaaggaggtagtattatttctcagattatcgaaacagattatttgctctatatttcgaagaataatttaaaaacagattagtttttttcaaggatctgtttaataggggtttcaaatccagtcgataggtttattcagaaaacaagcaattcaagaaccaacttcaaatggaacaggtttaaaaggagtgctcaggacactaaaaagcttctatctttgacttggaagacagctcactaatactaccttgacacatgtgatttttttgacaaatgtttgactatttgttttatttatttttttaaaatataaaatatttccattcaacgataaatcaagtcacaataaaataaatgataattacataaactttttaaataaaataaattgtcaaacatatcctaaaaggaacagcatcgtatattaaaaaccggagggagtaagagttaggcgtcgatagagcattaattcggtcgtttcagggcttctatagccggcccggtgacgacatcctctggatacactcgcaaggcccactagctagcgagcccccttcgttcctctgatcctctccgcttcacgccgtgctcgagccgagcgatcgatcgatccacccgcaccgtgcacccggccggaatggaggtggcggcggcgggaggtggtgnnnnccgccgctcccgccgccgcgcggagcagcccccgccgccgtgcaggccaaccaacgacgacgacgccgcggccagcaagctgtgagtgacctaccgaccgacccacccccttcccttacctctccattccgcgcacggctcctctgttgttgcgcggatgctgcgctctctctctctctctctctctctctctctctctctctctaccactgcggcgtggttggtggtttcgaatcaattcggttcggggcgtgctgtttgttccgcgctgtgttgcggtagagaggcaaaagcgagatgtactttgatattgatgatgtaatggcaaggggcgtgtggttttaaccctaagattttgtgttcaatccgctcacaatttcttcttaaaaatatgtttggagggatgtatttcctccaaatctccttttattattatttttggacctaggcaaaagcaagagaagcctgtaaacctggtgctgaatcgtgatgctaaaaaaatgtcataacaagcaggagagatggtttgaacagtttccattgatgctcccgagttgcacacaccacttaggtgcctctttccggcgagggttcatgcaataaataattgtaatgataaattggtgacaagggagctattcctatttcaccaatttgtattgaaagacgtccttttattgcgcggcatagttggccggccacttacatatatatagttgtatgtgttcttaatttttccctgtttgtttggagcggattgatgctttagatagcggttagccgatattgagtggcattggcaccctcaacttctagtgcttatgtgggctagtagcgttcgtaacttcgtataaagagacgatctaccttgaactcttcagcatgcatttatgagactgtataggccaatatcttgaacaatgaacaaataaatgtatagacagtgcaaaaaacatgcatgcaagatgtgggggtattgcttatacacttatgtcattgtaggttgcatagtagaaatcacccatttccctttgcaggtcatgtgttaataaaggatacatgaaggatgattatgtgcattgttaggcaaataacaaaaggggctccaataataaattgaggtatgtagtacctcattgaatcttttatctgcttctctacaattggaaattctaatttgttttcctttccaaataactctgtgaactatgcacgttgatctgttcttgggaaccttctgcgtcagttcctcagtgctggaaatgtcaggatggtcaaaagaggaaacagaaacttggtgctgctttgatacgacattcttccagttgcagaaaaagacagagcccacgcacgacgtggatatagggacagcttgacttcatgagtagactttgattgcctgagtctttaggttggggttcaaggtctggaagagaattacacatgactttaaccccgtctttggctcttctcttcttatatctactctggccttcatggaaacttgactaatcaataccctagcaacttctgtgataactaatcagaagctaacttgacagtgctagtcacaggctctactggatgtccgtgatgagaggaaggatgcaaggggtgtggcttgcagcattaatctccctcctttgccactctatcgcaaacgcagggaaggaagccgctgctgctgtgtgcatcaccagcgagagggatgctctgcttgccttcaaagcaggcctttgtgctgactccgctggtgagctgccttcctggcaaggccacgactgctgctcatggggtagcgtgtcctgcaacaagaggactggccatgtcatcggccttgacatcggccagtatgctcttagcttcacaggtgaaatcaactcatctttggctgctttgactcatctacggtaccttaacctgagtggaaacgacttcggtggtgtggccatcccagacttcataggctccttcagcaagttgaggcatcttgatctctcccatgctggttttgccgggttggttcctcctcaacttggcaatctgtcaatgctcagccaccttgctttgaactcctctacgatcagaatggataatttccattgggtttctcgcctccgtgccctcaggtacttggacctcggcaggttgtatcttgttgcatgttcagattggttgcaggcaatcagtagtctccctttgcttcaagtgcttcgcttgaatgatgcatttctccctgccaccagtttgaattcagtttcttatgtcaatttcacggccctcacagtgcttgatcttagtaacaatgagctgaattctactttaccaaggtggatctggagcctgcattctctttcttacttggacttgtctagttgtcagctttctggatcggttcctgataacatagggaacttgtcctccctgagttttcttcagttgctggataaccacctggaaggagagataccgcaacacatgagtagattgtgcagcctgaatatcatcgacatgtctagaaataatttatcagggaatattacagcagaaaagaatctgttttcctgcatgaaggagctgcaagttctcaaagttggcttcaataatctaactggaaatctatctggttggcttgagcacttgacaggtttaactactcttgatctcagcaagaactctttcactggacaaataccagaagatattggcaagttatcacaattgatttacctggatctttcatacaatgcatttgggggtagactgtctgaagtccatcttggcaatctatctaggttggatttcctgagtttagcatcaaataaactgaaaatagtaattgaacccaactggatgccaacttttcaactcacaggtctaggactacatggttgccatgtaggaccccacatccctgcctggctgcgatcacaaaccaaaattaagatgattgatctaggaagcacaaaaatcacaggtacattacctgattggctctggaacttctcttcatcaatcactaccttggatatctcaagtaacagcatcactggccacttgccaacaagcttggtgcatatgaaaatgttgagtactttcaatatgagatcaaatgtacttgaaggaggcattcctggtttaccagctagtgttaaagtgctggatctatccaaaaacttcttgtctggatccttaccacaaagcttaggagccaagtacgcttattacatcaagctctcagataatcaactgaatggaactatcccagcatatctttgcgagatggat

SEQ ID NO: 2797 - DNA, 21511 bp, Oryza sativa
ccatatcagcagtcgcccttcaacaacattccgccaaatcattatgtaagttgattaccatctttttttttgtttggcacttaatcccattctgtttactgccactgcatgtacctgagatatgttacactgaatttattgccattaacatggacaagatagttactctagtcatttgatgttaactattaatttgaaccattgttgtagtggaatcagcaaggctctggattgtcttctacaacacaacatttaccctagcgagattcgaattgaagatgtatatgttcgagtgaagggtggaattaccacagttaaactgcttgtttatgaaggtgtgtgcctcagccttcttgtacatgtgaattttctatgcagtgaatcttacttgttaactttccgttaaactttttttataaaaaccattttggttttttgggcctaatttgttcataacatgtatgcagctcaattggcaacatcaagaaatactactgctagtaatcagaatgcacagaggatcaaactgtggaaagatgtaaaaggggttgcagacaaatgtgtagaacttgctgggcttaaaaagcagatccatcctgactgtgataggtttttgaaatatattggtgctgggaatgtcaagtggttagaggattacccggatgaatggaatgatgacaaaaaggcctgttacttgaaggcacttgtggcgtctgattctaaatatgtcagatccaagctgcaactcattggttttacatggcctgactacagtgacttcctcaacaacttgataactgatcaagtgaccagattggacataaagtacaacattttggatccttatgactacctgcgattgtgcagaaacctggtcaaacattggctctctctgccctctaatctacgggtaagttcaaatagacaaataaaaccatctacaatactggaatgattatgaatggatgcgagcatgtaccttataacacttcaaatgcaggagaagaatgatgattacgctttcttccttcgaaagatggagaagtggacaccgaggatttggtgtaacctgtatgaggccattgggtggcctccgaagtaaggtattccctcttctcatgatatatcgtctccttttacacgggtagtaaggggcgggtaaaaagacttgttgtcttctcggggtggacgatgcgtagacccggattagttgaggctacaacaaaaccataattcttttatccattttctctttcttattagccatacctgtgatagtggtttgtatgtaactcccttttctcagtttggttctgtatatttctgagttgcagcagcaacaggttttgatcgtgtcagtgccaaatgaaagaaatatcaaggttttcggagtagcagcagcttttgacagtgtgagggacagatttcgatcaaggttttctgagttgcagcaatttaagaaaacgcaatgctgatggagacacagtggacaccactattacttttctttttgttcggcagttttatactgttgaacacgaacagtatttaagtagttttaaacacaatactgttggagtagttttgtttgccgtgggcaaccgactgttgcaattagcagtgaactctatctaagaagtgcgattggatgaactctctttagccatatgtatttcccgagaaaattgtatatctaccattgcataaggttggattcgctggaaaaacatcaattaaatgggtttcattagaatatcactcaaaactaaaatattttcgtcaaaataccattccaacgaatccaatcttatgctatgctagatgtgtaattttcttgttgggcagcatatcatctagttgcattccattgttcatggcgatatctaaagtagtgaaaaatcaaagagtggaagatctaattaagctcccagatcttcatgaggcttgtataattccaagagaagctagacaccagagaagcgaaaataaacgaatcaaaataggaaaaaacacacacacagaaacacaacggcggcgcgttggctgaagccttcctgaggcggaccgccccatacggcagggtggtgcggttggccgagctagccgacggcgccgaagacgacgccgccgccgccgccgcactgtgtgtggctgtgccgcgccatatatctgagtcgaggtaacagttgacgaaggcataaataaagctgtgaggacctgttcagatcatagatgtccaaatgggcctcctggcccgacacggcctaggtcagtcgggccggcatggctcgacctacacgccgggccgggtcatacctacccacagcctaggcacagcccaaaaaaactcgggccggacgaaggcgtgacaatatatatttgcttctttatagaataagtttatttgacctcccttatctatttgggttgtgtcttataaagctgaaatatggctattctatctccctcctctctttttggacagggccttataaggctgaagtaagtctattttggttccctcaaatatttttcaaatatgagggatagagagggaggtcaggaggaagaatggaggaaagaggactaacatggggccctcattattattattttttttgatctcggggcccttatttttttttgtgtgtgaatgacaaatgggtcccactcatatttttttaattctaatacacataagtgccacatcaactccacgtggaacgaagaccgagtcaacaccgtcatgtatgtgccatgtcagtgaaatcgtcctccaaaaccgctgagggagtcaaattgcaccaatttaaatagttgggaggttgaaatatccgatattgtgattcaaggatacgaatcaaattcgatcactacttaagggagtcatagtgaacttgttcctaagcggattaagagcgtagcgccgccgcctcctactgtcgacgctcaccgtcatcgccccataagtggcctgggcggcggccagctctctgtccatttcatggaggccggagggagaacagggggcagcatcacgagaaaaatctagggggttttcggctagctacacaaggtggtggactatacaatataatctagatttgaagcttcacccttttatttggtattaggtcgctccttaatattcgcgtatgtttttggggggcagcatcacctgcagggcgcggccagttcatcgcgatagtaatggacttatttaattgaaaaatcattactcattggccattgaaaatcagcccattaaagacagtacttttgcattcccattagtctctattaagattaggcaacaaacgaagttaagcttggatttaaaatttggtgagaatgtattttatatctacacctatctaccttacaacgcagagttgccaaaggcatttgtgccacggtctcctaaatactattaaatgtgcccgacacagaattttgtacaccaccatcgtaaagctatcggcttttatataactcaaacacaaaagagagaagacccaacaacctggtccaaagaacatgcaacaaaagaacaaatttcgcactcaatgcagcttatggacaaatatcgatcactccgcacctcctccacaccccaggtcatagcttgctctggaactgcaaaaggaacatcgatttatttcattattatttttgtaaagaacactagggcctgaagttaattttcaaaagtaaatatcgttctggtttcgcccattatgcccaacagacactatcaattccgtcaaggatataatgccaggtaacaacatgcatccccaccagacctttcgacagataaaggtaattccaatcacatggcaagcaaacttggcagctataccctcaccctcctctaaatgcacttgctctaaacaaactagtactcctaatatttcaattccatggagatcagaaaaatacagaaaacaagcaacattgatatagtgattagaaaccagtcatgtcagtagttcggtacaaacggcagttagcttgcaacaactaagggaaacagacctcccccaccccccccccccccaccccaagcaaagcacagacacacatgtgcattctgtagataaaagtgccttacctgagatggtcatagcaagggagttagatatacatacttatattttagagccactaatatgaactaggaaatgaataaatgaagcaatttacttgataattttccaagaaaaaatgtttgtgttaatagctctctgctgtttcctgtcaaaaaaatcaggaaatttcttcaccccatgatagtattaaaaggcatccagtgagaaacaactgacaaagaagtatgaaaatatgaatgaagttaattgtatattacctttctttctaaaatttgtgagcttcacgactggagtagaacattcaaggaaacaatatgtgttctctagagaaaagttcccatgataatacccgttgagaaacagctgttccatcccgtcaaatattcctctgaaacaacattacaaaatcattcacggaagcactactctcaaaattttaacttcactcaacttagtgccaacaaaacagacctcaaaaccatctggagatggggtgacggaagtaagagagttgcaccaacgggggcatgaaaccgagctgttgacaggagcaattgcacatattctgataacacacgagtgtaacgctccatccaggccacattaaaggagctgtcaccaatgataacttccttaataattccaggatgtaatatgttctcatggttacacgatctcattacatttaagcaatgaacatcttctccaatgcccaaattcatgataagctctgcacaatgtcccacattatggggatatcttgctggcagtcttgaaggcatcttcaacctgccagatgcttgttgatgctttagactcagtattgcagaagtcagctcgtacttaatatctatctgcaaattgcaaaattttgtggggtgaagaggttcagcataaaaaggtatcaacattttaaaataggattgcaaatgcacccaagatgtctagcaaccggctgtttctatgtttgaccatgataggtgtttcatttcatgcctttgaacactggcaagtgtgtgaaggccacagactattcagatttcagatacagaggtttgacttaactaaccatgcagaccattgaaatccacagaaaattgactggttccaataaatgaataaggcgacatatacataatagaatatttgtaccttgttccccttatccttagcttctgattgatctgaagtaaaaataaaataaaatgctgaattagagataagattaattgattcagtcttaattatgcacatcctatttctctaagactatctaagagttaaaaaaggattatcttaacttattaccccatggctcagtacaactgtataagtagcaaaagtacaaataaaataccattttgaagagttcttaatggttcacccatgatggttattctggaagctggcgtagcaatcttctgtggtatagaaatctggaaaaaaatgccattccaacataacacatttatttatgaagcaatttgtatgaatatcatagcttggacacatacatactataaagctagaaaagaaacaaaccataaacacctgatatcctgggttaatatcatggaattataatatgctactacaagatttccctgcttgtacttcaatgtgtacatctatcaaatgttatgcagttttttttttttgaataaatcaaatgttatgcagttgctatgtcaattcctagcagcggcataattgagaagccaaattgaaacaagaagtgcaaaccataactagtatttttgagaagtgaatgattaaattttatattgcacagatgtcccagattaacatgttgggttatattcaaattctatggaagtatctagggtctgcaatatgagtctgagttggttacaaaagctgttttcgcacgtgcatactatctcattaagacagattgctcgtgtggatgaatgggtcggtgactagtacaagctaatgcactacaaaagggtaaaaagcatccaaggtcatacgaagtgaccattaaatgtatatgcactacaaacattaattctaaccagcacaggatagaggtggtctcattatagatcctggtttaggatctatagactataatcacccattgagtcaccacatggtttttttttctgcaggtcagcaatgggatctctcaatcagctgacaacaaaaactattttctttaagaagttgcaacaaaacgttttattctatgtgaagaggtacaggcagtcttgacgataatgtgagtaaacggagttggatacaaaacatgaaatttataaaggaatactgactggtatcttaatgacaacctgattgcaaagtatcccaactagtacaaggggccaggaaaaaggaagaactcgaatgcaaaccaaatgaaaaggagtttctgcaagttaagagaagtgtatggcaaaaacatctttactttttataatagtagagaagagataaaccgacacaaggcacacaagatcatcaggagaacaagacaacggcgtaacagcattgggatccaagcgaaatgacaagatttagaccacacggcacgtgaatgtttcacgatttctccgcgtggagagaaaccgatcgatacgcccgagatttctccaccagatctcatcctcatgagtacaaatcgaatctacattgacattgttgcacaaagccccaaggaaagaagaacaaaaaaggccacctgttggcatgtcacgtgtgctaggaacgcatctatactatacaagtacaaagcacaaggtagttggatctggaagagaagatcatagtcatagtgtctcaccggtgtaagccgcagggcagggcggatggagatgctggccggcggctggtcaggtcttcaaggcggaggcggaggccgccgccgccgccggcggatttttccttttcttttcccctccacctcctctgcagcagaagaggggaaatgcgaggaggccccgtccctggtcggattgagatctggttcagccgttcattcttacgatcaatggtccagatcaatttctacactgttcacacctagggatggcaattatgccaatttgcccgtttacccgtgggtaaaaaccctattagggttgggttgggtttgttctccattttatacccatgggttttttattgggtcaaaacctatgcccgatgggtaaatgggtatgggtatgggtaatcactacccatgcccgcttgcctatttacccgtgaaatctaacttacatgtaggctaggagcaaaatccactagaatacataagccgcgttctttgttttctacggtttccttttatttcccttattatttctctcccccttcctctatcgccgctagaggagagacaccacaccgagacggagaatatttgatgttaaaagtttgtagacttttttccactgcttttgttgtggcgggtaaacgggcacgcccgcgggcacaaggcgtccgtgggcgatgggcatgggcaacaatccttgcccgtcatgtagtaacaggcatacccatgggcacaaataatctcatgggcacgggtatgggtagaaattacctgtgcccgtcgcgcccgattgccatccctattcacacctgtcgtgtagtacttttgctacaatttggatttagatccaatgtagcagctacaacgtcttaactagacgaataaccgccgcgttgctgcgaaaaattaagttagatagtatgtataaataagatgaaatatgaatattaaaactaaaacaaattgatattatgaattttgagtcctaaaaatgattgagattacttagtgttaaaagagaagaaaaaaatgacaatttcaaccatagaactatcatccaatggataaataattggggtgatgtggcttaatgagagaagagagacatagtattaactacacttagtggggatgaactatataagtatataggataagggcatgtttaggaaattaagagtctgtttagggagcttaagggtctgtttggtacagctccagctccacctctcctggagctagagctcagccaaacaatttcagctccaccaaaactgggagtggagctctctcacaaaatgaactagagttgtggagctgggtttaggcagttccacaactttactccagacccaactcctagagctaaatttaggagttggagctgtaccaaataagctctaagattatgagaagcagctggttgatagccagcttctgggaatctggaaaagctgggtttctcatcttctggtttctagtttattttctgtattctacaactacaacttttggcttgccagaatctggaccaaaagctggactgtctagggagcttctgattctaggagaagctgcagcagttagaagctccctaaacaggccctagatcccctggcaaaatttacatccatgtcacatacacgtttgaacacatgcacggagtattaaatataggctaaaaaaataactaatagcatagattgcgactaatttgcgagacgaatcttttaagcctaattgctacatgatttgacaatgtggtactacagtaaacatgtgctaataacggattaattaggcttaataaattcgtctcgcggtttactgatggattttgtaattagtttttttattagtctacatgtaatacttcaaatgtgtgccgacatacacgatgtaacactgtaaaactttactcccctgcatctaaacacagcctaagttacagtccatactactactgcagcttccagtccacggacccttttcacattcaaaattaaggatccgccccttctcttactcctctgtctaaaaaaaaataatctcaatcctaagtttaaacatacatacatacatacatacatttatgtacatatatatagtatatgtatgtatatatatatacacatatacatatacatacatacatacacatatatatagatatggatactcatactctatgtagcaccaattaatttacctacctatatatatatagaactactatatggtaccttaagtgctacgtagctatatggcactccacagatcatcttttcgaccctcacccgaacgtagtaaatttttaactcgcggctcccaccagcatctccgcaccccaccgtatcctctctcacaggttcaaataggacgccactaacagatgcagcgcgccaggaagcttcgtagagcgactcacggtagtccccgcgtccggtttatctgttcaccttcgctccctcaccggtcatctcggtcaaaatattactcatcgagcgttgtttccgtttctattgctttttttaccctgttcgctctagcacgagagattcatctttctaatctacacgtggcaccatgggctaaattaactcccagcaaaattatgcttcagtaaaattttcactccctatatattaggtgctcaataaatttctccaaagtcagtaaaatttttactcccgtatacagtttggttgtgggttacactgacatggtttgggagttaaaagtttactattagtttttgaaattataatatttgatgatcaaattcagttttttttttacaatacccgtctcccacaaacaagtcattttttgggtgagttagcttttgcatacttgttaacagagatgattgtttgcattttttttgtaatttgttgttataaaaaaatgcatcccaatacgtataagtttttacatattcattagaaaccttgtttttttacatgggatgcagcttaataagcttaaaaacatggggagactatgtaaaaaattaacttggtatccttactgagtaataaattaacttggtatgacaacaaaatttttactccatatacatccacacaatctataagtataagttaatttttcgttcgcgcttgctccggacatcgacggcgacgcgttgtggaggtggccgccacggaggtcatgccatgcgcgtgggcgcggagcagcggccggatccgctgccgccttgcctaccgctcgtagtcgcccgtcacagccgcgcccgccgtcaccagtgcaggatccacactggatccgctgccacgccgcctgcatttgtgcaggatatgccccaccgcagccggatccgcgcgcgtggggcgaggagcggcgaccggatgtgccggcgtgctgcctcctcgcctcccgcctgcaatcgcccatcaccgccgtgcccgcagccatgctgtgccggatccgctgacgccgcgcacgccgccactcggcggtggaggcggaactgccgcgtctctcccgcccatagtcgcccgtcaccaccgcgcccgcagccgtaccgtgccgcgtcattatgtgaggcaaaaaattacacatctataatgtgaggaaaaaaattacacatctataaaaaggacgaagattcattttacagcttaaaaaaggcacgcagcagtatccatcaggattcactgaaggtggacgacgaccacaaacggcgtgcaaaaattacacaacaaaatcaggggcaacgcgcggatgtgctcgccgactaccgcgcacggctgcgtcggcggaaggtgacgccgacgaccaggacaggcttcctctatgcccctgattctgttgatgccgtcctcgcccgtcgcaacacaggagaggagtcagatccagcagtgcgccgtctctgtccacgagctgccacctaggctcactcccttggagcaaaccacgtcgctggtgtagggagaggttgtcgccccggtggccgatgatgctgccgactgcccccagatccggaaaaaaaggatggagattggagagtgaatgggaacaggttggattagggtgccaatagggttatatattcagtatattggtaggtaaaaaatttactatcatggatgtgggatgacgctgccttggcaggactacgtggtggtttgcgatagtgataaaattactctggatagtgagaacaaaatataataagaaaaagtatttttatgacataaacaaacaaataaaattataaaatctgtggcacgtaatagtgagcggatggttatgctaacttgaattaaaacataactagtaagctaacaccatgtagagtaaaaaaagatgtcgtctgacacgtattgaaaaaaaaaactctagttgaactaaaaatgttaaatagagttaaataattactccatatgaatagttaacaaattactattgaaaactgtcagcacatatagttggcaatcaggcggacgtgcagtagtcaaaaattaactattaggtcaacgtgggtgggttcaggatgggggtggggtgtgcgcacagttagtgggtctgatcattgtgtcaggtgttgtttaataggtagcaccttaaggtgtcatatatatatatatatatatatatatatatatatatataactactatatcgtccgagcctccatcgatctgctccggtcgtttccctcactaccgagaaacaagccatcagattcaaattgggtgacataaggtaggcatgtcacaatgcgatataggatagatctcggctctacaaaacaaatccaacggccaagattcattcatgtcatcacgggttaaaatttaactccattaaaattttaactcctgaaagtttactcccagtaaaattttaactcctgagtaaatctgcgagttaaagtttaactcgtgatgtcgtggatgaatctcagccattggatttgttttggaggaccgagattcaccctgtgtcacctggtgacatgcccaccctatgtcacccaatctgaatcccaattcccaagtcatcatagatcggcgcccacggcaggcgatcttgcatactttgtctgattgtaaaatggtgtaaatgccatgtaattttttttgtcgaactgatgcaatgcaacactatgcatgtgtattatacacgtccaattgaagacaattggacgtgttgttttttttacttttttttttctttttagaaggcgatttttacggcttttttttatcgttatttaaggacttttttgccatctgtttttggaatcggagttgcttttttgctttttaaattcttttttacggatggatcttttttttgttttttcgctgttttgtaagtcggatggattttttttggccctttttattttaggaaactattggcgttcagtttttttttttcagaaggtgattttttggcctttttatttttttagacgttttattttcgctattttttgggagtcggacttcttttccgcttttttttccggatggctttttttgtcggagacggttgaatcgggatgtgactattataaagttgtgaattttttaagtagttaaggtttttttttacgggctatgacacgggtgatcgctgttaaggaacagggacgatgcaacttaattggaacactaagcggattaggatgacgtaccaaacggaccaacaaaaacatcttcaatttttataatagtagagataggacagctctattctacacctcccccttagtataactattggaaaaagtacaccgaaggtccctcaacttgacatcgagttacaaaatcgtcccccaactgcaaaaccagatacaaagcctcccttaactaacaaaatcgtttacattagatccttcggtggttttgaccccggttttatctgacgtggcgactgagtcagcgtgggacccatgtgagcctcatatgtcagaatgccaggtcatctatctccccctcttctctccctcatttctctctctctctcacttctctccaatttgatggcgacgtggcagcggtgatggcggcgacgggcgacgcggcggcggtggggggaggagcggctcgcgggctcccacgccggccgccacccacgagacccacaaggcggcggcgcgcggccggcggcagatgcacccgccgcacgggcctgccggaggaccgggcgagcgggggcggagcgggcgacggcgcggggagcggccggctagcggagcaaacgggcggcgggcagccgcgctgcgggagaggaagatggcgccgacggggagagcgaggacgccgctgccgtcgtcgtctttggccacagatctcgcgccaccggtgggagtgtatgagcgtggggcagctatacctggccaaatgggccgtgccaagccgggccggcccgagcacagcagtactgtagccggccaaggcccggcacggcacgccagcctgtgggccgtgccagcatggcccgttatcccgtgccgtgtttgggccgacgcctcagcccgtaggccagcacggcacgacacgtttactttagcgtgccggcatggcacggcccaggcatggcacggcccaccggttcatttatttttcctacgattttctaatttttcccatatatttctcatattttttatttttttccacattttatcctatttgtaccatatattttatgatatatttcctaaattttcctcacatttatcctatatttataatgttttcctttatattatgttttttctgccttttttttcttttttcccctcaaatttcaatttttataggccacatgtactagtgggccggctaccagcccacggtccgctacagtagccgtgccggcccggcacgacccagcacctccttgggccgtgcttgggccgaggccttggcacgtgggccagcacggcacggcccgctacaggagccgtgcctaacgggccgtgccctagtgggccgtgccgtcagtgtgccatgccgtgctgggccggaccgcccgtttggcctgctataggggcagcggcgggcggagcgggcacgacgccaaagacaacttcttcccgcggcggcgccgccccagcttcttcccgcactcgcccgccgccgacaccacttcgtcgccgatgagaacggcgtgacgaacgccagggagctgaagaggtatcagtgactcgcactccttcagctgtgctgcctcgtcgacgacaaggagatcgaacgggcttgcttctggcaggtagtgcagacgggatgagctcgaagcttgtgcagactgcagagtatgcttttggtgttccggactaggaaatcttctaccgaacgcttgtcgaaaatgttcggaagttcaaagtgatcagataggtgttttagcttctgaagacactgagctctagcatccttcatctctgtactcacactatcttgcacatatgtcacgaaattctgatgccttgatgccttccagtgcagagcagaaatcagcacgagttttgtcgaaacatgatttcggcaataataaaagggggtagcgcacgagacctaaaagtggatggatgcggagacaaaagatttagagaggttcaggccctctcaatgagaggtaataccctactcctgtttggggatttgaatccgccgagcgtgtattgatctgacgatctagttgtgtcatcatgccccctagagggcctcctgcccaccttatatagggtggggggcaggattacaagatagaaaccttaaccaatacggtatcggtttcctaaatctactttacaatattatcaaaccaggactttaggccgttccgtaatatataaggaaacgtaatacccgagtcatgatctattacatattccatagatataagttatcccctatgactagtcggataaccatgccgtatgggtatggggtacccataatatccacagtagcccctgagaccttcgcagtcgaaaagataatcttctctcgaaccagaatactccaaagccgagtgcttcaatcatctttgtcatggtctcccgagtacttttaccaaatctgaagactgtggagggctggaaaataaagtcaggtgcaccgactagatgcacctaatagatgtagcccctgacaatgtggttaattgaacaaaccaagcatatagtcaaggaataaataattcaaccaaccgagtggttttgataatcgtaatcaaccaagtgacttgatatcaatatatagcatatgcggtgtgaatcctccaaataacatgatccgagtgatataccaactgctttgtaaaatatgatgagtgatatagaaaaatagctataaagaagcttgtatattgtgaataaagaaatttccaaagtattgggcatacgccatgcgcacactgctttaacagatgtgcttaagtccctagaagacacatggtttcaccacacctggaaatatatggcatatgtggtgtaaaatccgagtaaataaactcataaaggatttaccaaccgcctaaaaaaatgaccacaatatataatcagcctaagccataatattggtcaataaaaatgcacacttacgtggcaaaaagcaatgatattgtatccaatcaattgcttaaaaacccaaacagcaccatgactatataaaaaagtcagcgggccagctatataaagctttactgtttgacaccttttaagatgcattgtaccaactcctaaaaagttaagtaactgcggtataaaaggattttaaggtattgggcacttgatcacgcgcactttggcctaagcaaaaagtgcctaagtccctaaaagaacgtgacaggccacacctgaaaatatgggctgcagacatattaggcctaggccaaaaaatatgccttcgacaccctttaaaggatgacgcatgtaacatgctcctgagtaataaatcttctgggtaatatagaccaagtgtagctcatatgaatagcttctgatctgaatgattatcccttatgggatactccaaaataaatataataattgaatcccgactggcgcaagtattcggttgatagcccttacggggaataataattggtccagtctttgagcatagaaaatagactcatgactatgaatccatgtggaatgtatccggaacaagtccaaattggagatataatcctcacgcttgagttgatgagcccctgagcatatagcttgtccttctgtcatagtcaaaattgtctattggcaatagctgacgcagtcggtatggagatgaaatgaccaacatgaagacgaaattgctcatcagaagtaacggaagatgtcagtggtagtaaaaacagtgacaccaatcaaaggtaatgaagttgcataaccatggaggcgaagaaaccagtcggcaacagtcaggtcagctagcagtgaagatgtaggcgcccaacaacaacgaaagaacagtcggtgatgacaaaagcaaaccgacgatgaagacgtagacgcgcatcaacagtgatggcgaaatccaccaatcatgaagatgaagaaaataatcggcggcgacaaacgcatccaacggtaatgatgattaacggcaacagagatagccgactatgatgacgaagtttcccatcaacggcagcagagttggctatgttgatgaggcttgacaagatgttgatgaagatgacgatgtcggtgatccagtcaatagcgatgtagcagccgatgataacgatgagatcctctatcggcagttgcgtagtaggccaaccgtgaagacaaataattggaggagagttgatgttgttgcccaactcgtctaaaccgaaatatttgaagttgttgaagtagaatgtctgttccgaagcaaagatgaagataatgactcctggagttgactcattggctgattaattgatttcttcagcttgacataaaatttgtcaaattttgagccttatatttgtgtagcccccgactctttggttagttgggaaacaactgaacatagagtcgagaattatagcttcttgtcgtcgagtagtcattgcttgattgaagatatgtgttgaaggtgtccaagtagaaatcctgaatattggagaatcacttgttgtagtaaaatatcatggcattgcatgccgagatgtcgaggttcacaaagacgtcgtggttggtgaagtagtaaaacttgcgaagtaacagcaatagagtttgccagtgccgaagataataaagatgaagtcgccccaccatgatgacaaagttgcatcgccgtgatgaagtgaacacgagtcggcggcaacagaagcaaactggtagcgaagacgcgcggttgtgaagataaaagcactagtcggcggcggcataaccagtcggcaacggaagacgatgatgtccatcagtagtggtagctgtataaaccagacgtagaggtgagggcactagtcagcagcagacgagacgaccggcggtgaagaagataaggccaatcaacactggcagaatcatgcagccatggaagtgaagaaaccagtcggcagccatggcaaacgtaggcagcttgtgttgaagacactgatgcctattagtagtgacagcgatgtagccagccgtgaagaaggtagcatcagttggcgttataacaggccagccgtgcaggcggtgacaccagtcagcggcggatgcggcggccggtcggtgaagacgtagacgcccaacaacggcagcataataagtctgccgtgcaggcggaagcaccaatcggtagcggcgaaggcaagccggtcggtgaagacgtaggcgcccaacaacggcggcataataggccagccgtgcaggcgaggacaccagtcggcggcgacgaaggcaagccggtcggtgaagacgtaggcgcccaacaacggcggcataataggccagctgtgcaggcggaagcaccaatcggcagcggcgaaggcaagccggtcggtgaagacgtagacgcccaacaacggcggcataaaggccagccgtgcaggcgaggacaccagtcggcggcgacgaaggcgagccggtcggtgatgttctgactgatccattcctggagcgtaagagataagcttaaagccatgaatcccttttatgcatatctggatctggatcctgcagaacaaacatataggatgagtagtatctgatatataaatataatactcgagaaaaaaatcaagtattttaaaatatttataaatatgtatttctcctcttgtcaattttgatttccccgagcagatgactctgtacgtttaaacactctgtccgactagtcataaccatcaagcaccgggagtcggcctaggcacttcccaaacatgcatatgagtgacatgagttcgtcattaatggaacaaagtttcacggatcagaatttactactcgggtacttttgcaattattaagagcagaaaataaatttatctcatctctatgcttttgatttattccgaataatacttagcaccttgcgttactcggtccatccaacgagcccccgggtgctaggaatcggcccaaaggcaaccatccattggcaaaccaaacggaaagcataggaagatagaactccataactcgacaggtacttttgtactcagattatgtcgcaagcaatcaagataaatattataaaaaatatgatataacatctgtagcccccgactcactactcaatggaagaccaattggtgtagtgaggcagaggaaaaggaaaaatatcatataaagaataaaataaatgatgacttagctttgtaatattccccttggtgatggcagaagcggccaatgtgggaacaaagtcgtccatcaataacaatgaagacaccagtcggcggcgacgaaggcggtcgacggtgaaagcgaagatgcccactaatggcggcataataggtcagccgtgtaagcggaaacaccagtcgacggcaacgaaggtgagccaacggtgaggatgtagacatccaacaacggcggcataataggccagccgtgtaggcggaggcaccactcggcggcgacggaggcaggccggcggtgaagtcgtagacgcccaacagcggcggcataataggctagctgtgtaggcggaggcaccactcggcggcgacggaggcaagccggcggtgaaaatgtagacgcccatcaacagcggcataatagaccagctgtgaaggcgaaggcaccggtcggcggcggacgaggcggccggtcggtgaagacgtagacgcccatcaacagcggcataataggccagctgtgaaggcgaaagcaccagtcggcggcagacgtggcggccggtcggtgaagatgacgatgacgcccatcagcggcggcggagtccaccgaccgtataggcaaaaacaccagtcggcgacgtcgaaagcgggccaatggtgaagacgtggacacccatcaatattggcgatggaataggtcagccacgaaggctagggcactaattaacgatgacggagacgaccggcaatgaaagtagaagatcatcttcggcaaaggaagatggcaagcagccggcgctgcacatcggtcagattgagcccagctttagttgtgtcctcgttggatatgtgaatacatgcgaacaagcaaatcagtttgattagaaaacaagaacaaatatgcgtgcatgctactgtatatgctcttgtatatcaattaaatagaatattcttgttggttgaccgttgtcaagcttgcatgcgagatgcatatgtgtaggcgcctggatcgtcgacagctccgtgcggctgaatcgtcggcaacggattcctactcagccgttgtactgtagacgtccgatcacaccaactccatacgtcgagcgaagcgtacgtgctagcgccacctcgcacgcagctcgcggcgcacaaccgatcgaaccgtgcggtgacagcaaacggcgtgacctgaaggagaccgttcggccgcgcatgtgccgctccagaaaaagtcgcgcgtggctaccaatcggatcggcaacgacgacgatactgcaagcaaaagcaatatcatagcagatcaatctgcatttagaaattaatctaacagagcaacagattggaacgagaaacctggcgtctctttgtagatcgatttgataagaagatgattccaatggcaacagattccactggcagatgaaaagaaaatactgaagttgaacttgattttttctcctgttctgtgtatggatcatgttgctatatatccggctccggcgacttcataaatatggaaggtggaagggcagcagcggctccaccgcggcagacttgaagccctgaaggtcaatttgatcttggcaaaatcagtctcgccgaattaatcagtcgacgtacacgccggcagccgggttgcggagtcgttggaagattaaacccggtagtgttggaaaattggctgctggtcttgccgatcaaatagagaattcggcggcaacagtgattaggtccatcgccaagattaattcttccatgtacttaacaggcatacgccttaaccactcggccaaagcgtcccggagtaggctcacgagcagtcggctacacagcgacgccaccaatccatgagccggtgatattggagattaaatcgttgaatctcgccgagattgatctttgtgactccaacaacatcggagattggttccatcacactcgtcgatgaggacctcgacgtgtcccctacctggcgcgccaactgtcgaaacatgatttcggcaataataaaagggggtagcgcacgagacctaaaagtggatggatgcggagacaaaggatttagacaggttcaggccctctcaatgagaggtaatacactactcctatttggggatttgaatccgccgagcgtgtattgatctgacgatctagttgtgtcatcatgccccctagagggcctcctgcccaccttatatagggtggggggcaggattacaagatagaaaccttaaccaatacggtatcggtttcctaaatctactttacaatattatcaaaccaggactttaggccgttccgtaatatataaggaaacgtaatacccgagtcatgatctattacatattccatagatataagttatcccctatgactagtcggataaccatgccgtatgggtatgtggtacccataatatccacaagtttcttcgatcagcggcacggtgaatgatcccatgtactctttcagcgaggagaaagttgtgggtattttcttaacctgcatcaaggcaagatcatccgcgagataatactcagattacagcgagagaacgagctggataatgcgatgtacactaccattatagtggaagagattgtgtgcaaactgcagttcatgggataaataggtactcccatgacactaattctttgccgactccgacgaccccgcccagctcgctgacctcgattccgcccactccgacctctgctttgccctcgcctccaggttcctcccctgtccggctatccgtctccctcccccttcccttcctcccctgatgccctaacccaccctccctttctccctcaggatcgagaag

SEQ ID NO: 2798 - DNA, 4265 bp, Oryza sativa
cagcccaactaccaaaagcccatcccaccctccctcccgatcacgcccggccctgcttctccagatcgtgcgcagcgccggcggccggccccgcctcccctcccgatcgcgcgccccaccagcgccgtggccggctccgcctccctccctcccacctgatcgctccttttttttcttcttctcttttctagaatcttctcttttctagaaaaaattaaaaataaattaatgaattcaagattagaacccatgatcttatggttcataacaaactctcctaaccaatttaccctatgacactatgtgatattattatttgttttctatgtatatctgttcaaattttgtgaacacaaatccattatgttactgtataaatcataccttattattattatgattcggtagtaacattatcgtagaagtacagtaacatgatatgttactgcgaaatttataggtcgttactgtgaaattactgcacttttacagttacatcatgacgaaattgcagtaaaagagaacatatgttagtacctatactactgtgaaagaaccatctggtcgggatataacttcggctgaaaaaacacaacgttgtccctcaaattatcgcacgagcaggatggccgctgcttcagctatccccgctggaacggatctgagacttgggaggatatgaacaggagagatgggaaaaggggatgaagggagaagaagggaaatttggtaatgaagggagaagaagggaaatttggtaaaaaaaattaaaaaataagatgaaagggtaagtaataccatgtatcaaataaacatgaaattgtaatggcacgtatttaatatgtgaatagtaatagtatattttaaaccatgaaagttgcaatggcatggttctaattaacccaattaaatatgccttattttttaatggtaggagtactactaatcatcttttaattaataatatttttatagattctagaaatataggagattaatgtgtccagccgtccaggatacttgttccaatttccggttcaaccataatatattgtatttatctgaagattttaaaaattatttgtgtttctttcttatttttccttcctagctccttttctacttggcccaagcgcgcgtcatttgggctgtacagcgcagcttgggcgtccactttttctagcctaacaacaagagagagaaaatgttaagtgtcgacaaatcttttcataagcatcacaaatcagcaacattatttatcactggccaacatttccaagcctaacagcaagaaaaaaaaggagaaaaaactgtagaaaattatgttcatatgcatcagaaatcggcaacattgatcatcattggccacctttcccggcctaatagcaggattctgttcatatgccatattgccatcacaaatcagcatcattaatccaaatttgccgtcatgcatcacaaatcagcgagtataatgcaacaatcaagtattgttgttcacttttgagtcatatggtatccgctaccatcttaaccagcacatatcctacaaaagccatatggcatccactaccaccttattaagtaatagttaactaataatccatccgtttcagattacaagatgttaaaaactgcttcaaatttaactaagtttgtagaaaaaataataacatttttaacccaagataaatttattataaaaattcaattattgatttaatgaaactaatttggtattataaatattactatatttttctataaacttaattaaacttaaagtagtttgactttgactaaagtcaaaatgtcttataacctgaaacggagggagtattacataaactgatgaaaaaaaagtggaactaagactccactgtggtgataagtccaatagctcgggcaatttctatcttttttctgatgtagtcatcataaaaccgcggtttatccctctacaaataaaagaaatctcaattagtaaactactccctacgtcccaaaataagtgtagttttacactattcacgtttaacgtttgattgttcgtcttatttgaaatttttttatgattagtatttttattgctattagatgataaaacatgaatagtactttatgtgtgactaaatatttttaaatatttcacaaattttttaaataagacggatggttaaacgttgggcacggatatccacggctgcacttattttgagacggaggtagtactaaactttttttaaaaaagtaagcatgcatgcatagagaacttcatatagtacagtaccagcttcttaactgcctctgcaatcagcccgagaacttcatcctctgcaacctgacaagtgggatgttagacataacaacatctaccagtataaatatataatggattgcacttgcatgtcagatacataagactacttacttcctccgtaatgcaagccgtgcaagtatgaaactggaaaggggaaaaaacgatgaaatgaataagcataaaacaaggcaattagataccacattataaatttgcaggtcatcaatgaacaacacaactaaattacctccgcttcccattgagagcagtcattgatctccagtacatatttcattttttgttgccgtaccggaaacctgttcagttcgtagacttccttcattgcatctctgaaactcatctggacatacatagttaaagagaaaacacgggcatcactgagcaaatacaacatttataaacatacgaaataaaccattatatatttacattacataaattttagttgtgcagctggggtatagtgttgatattgtactgaccttttgcttggtgacccgctgccaaatctcaaaatacacaccatctagctccttaaaaaaacaaacatcatagttcatgctagataccaattcctgaattgcatgagtaattcaactgttagatatatacaaaaccaccaaaatcaaattaaatagtgtgcaacttaagtatcatacatggaagccaagataagctaacttggcagtaatcttggggaatccggtggctatcttaactgcttggtagagtcctctgttgcttacttttccccactacatacagagttatcatggtgatacaatacatgcagatacaaaatttgtttatacaaataatacttgccttaagagatggccgctcaagtaacacataatcttccatccactgtttcataataaaaggaggctattagtacggtagtcaatgttttaaaaacgttacaaagttttaacacttgattaacttaatctatatatgatgcatagttgcatgtataccttaagtttctttgataattcaacatagtatttcgcatactgtttttcaacatcatatgtattaaaatacatatgatatctatcccaattggcatacatgcaaccctacaaaaagaaaaggggggaaaaatcacatgattgagaaaataatatttacaaagatatgtaatatatagcaatactcgtgcgcacacatacataatttttaatgactagacgttgatagtcaacaagtgcagcaagcttgcagtactcagggtggaagtaccaaacaaatgtgtaatcaaagcacttgagaacctcccagaggacctcgtcatcaacagaatcaagtgtgccatcattttcaaagcacataaggacctcctccaactgcttagacatgtcaaaagggtattgctctatcattgtatcatgatccagcttactcccagtcctaggcacttgttgtaacaactgcaacagtaagggcctgtttggcacagctccagctccagctccacccctcctggagctggagctcagccaaacagtttcagctccaccaaaactgggagtggagttgggtggagctctctcacaaaatgtactagagttgtggagctgggtttaggcagctccacaactccactccagactcaactcctggagttatatttaggagttggagctgtaccaaacaggccctaagatcacttacgagattatattgaatattgcaaattcaaacaggaggttaatcatatataacaacacctatatatacgaataaaagtatatgcaacatatataaaatgtacagaatatactagaatgcatggcttatatatgatgattaattaattaatatatagatagagcatggatgaaactaaccttgtagtacttcacacgatacagttcatggagttcatttgaagcatcgagctgatcgaaattcaatt

SEQ ID NO: 2799 - DNA, 18305 bp, Oryza sativa
tttgtcttacgtattttctattgagaaaatttgaaccgtgccacacaaattttgcaaaatttgtgatatgccactccgacccacatgtcattgactcatgtgggtcctacatgtctttgagatacgggtggcatatctaaaattttgcaaaattagggtggcatggttccaacaaacccttttctatttgtcgcacaaggaacacacactatttagacatgcctacaaatctagaacaaattgaatgaaatacagatcacaccggcaaccatgcagtagaaaatataagcttttcccagtactgcagtaatataaaataaaatatttttccctttcaatcggacaaattgctacaaccaccgttcttggatttgttgattacatgtagaataagttttcacatgatgtgagaatcagaaagtttgacaagatgcatactgtacaaccaagtttgctggttagacccaaagcaaaccgttacatcgactccggcaaactatcatgctcatgttcctataattttctcaaatttgttcaatcttccgtcactgctcaaatttgttcaatctgagaacactgaaaagatgcatgtaactgaacatgtagagcacggacgggggcagataccggggatagggtatcgaagtggtcgcctacgacaggcggtgattactggcgacgatctacttcattgtagcagacatgagtcctatttatagtactcatagcttacttagaaaatgattagagacacataaaaagtagaatttgccgcacatatacctctgatgaactcaatgtagcagctctgagtcctctttgttcatattcgaggaaggaatcaacaagtactgcaatgttaaacaacccgacagatcaaatgccaaagtaagaatgcacggattcttaatacaggcaatatctgataaaagcctaaaatgcgagtcatgttatgtacactctgtcatcaatttaaataataaaactatccttctcataggtatatgttctcgattattacgtaatttgactatacattaacagattaatcttgcagtggtgagcatatgttacatacatgtaaggaccttgttttgttatgttcaagactcacgttgcttctgatatcggtcaatacttggagtatgtagcaacatgaggaatttatacaaaagatttattacttaatactcactatttgtaatacaatttcatattgcatgaaaattggtgtagataaatcaagaagtacaaaacgcatggtttccaattctttacaagcataagaaaattaataagcaaaccaataaatatgttgcacatccccactgttaatgaaaccatatttctgaaaaaaaaaagacagtttaagctatgcaatgcctcatgcgtgtagaaatcagaggctgagttaaatcaacatgtaatctacaaaattgttctcatggtcgtttttacatactggaaactggatccatccctcccctcaacagcatttaatcgaacacctaccagcctaccgggcacaatacaatacatgcgtagagaagtcatgatcattggttgatcatccaagaagtcacaatcaataagaaacaacgatagcagaccatattcctagggcattatgacttcccttactccacatcaaagattccatttttttcataaacctgggcttcaactgaagatttgatatttagctgttaccgaatgaccaaacatgtaaccccaaaaaacctagttgctccagatagttcatatttatcttttcaattgtttttacagctcacattattgttgtttggtactacctctatttcaggttataaaactttctagcattgctcatattcatatagatgttaataaatctaggtgcatatatatatctagattcattaacatatatataaatacagacaatgttagaaagtcttataatgtgaaatagaggaagtactttggtttccaagtcccaagtgcaaaggtccccagattcataaaataaatatttgtttgtagtggcagcttcctaggagggctaggaatacaaaattgccagcttcgatttcctattttttgtgattaacagtgaacacaattcattcctcatgtgttgctatcacaagttcacaaaatttgttgcactgaaaatgcaaatcatgttgtgttaagaatatgctcaatgttgctctacagagagacttcgccattacctggctagcggcgtgggggcgaggaggcgcgacgcggaccagacggcaggtaatcgacgacgacttgatggcggtgtgaccgagaccggcggccaccaacggatcctgtggcgacgcgcgaggtggggcggcacggcgcgacggttggcgggggctcggtcaccgcgacgacaaacccgcggtgggcgatcggtggcaagcgcgatggccggtggctacgcggtggaggagccaccgggattcacctaggagctgccgggattggggaagtgggagggggagggagcagggcgcggatctacagtgtagtggcccgtgtcaggcgacaccgatgacttttggcaaaacctataacggaattgtttatccgtatattataacaccatgatttaagcatataagcatgctatgacaccaatagatatgttatgacaccaacgaattgattttctggatccgtcagagggagggctggggatgacgacccgcgggatccggcgcgagatgctccatggcgaccagggcgaggaggcaaggcgtcacagcgtcaatctgacgagggcaaaaggacgaggcggcagcttcaacggcgactggttgacgcggcatggttagggttacggagggagcgcataaatgaggggagtagggaaggcgcaagctgtgcggaagggagaggggaggtggaggcgatcgtgagcgttggattttacagagatgatctgaaccgttgagtgatgaatataagagtgtttgagtgaaagatgagtaaaacaagttggtgaattattattaaaaatatggtagatagatgtgaaattttttgtatttgcttttttttttgcaaaatataattatctgttatatgttatatataatatttttctgtgttgttatttttaatgtaacatatttcgtatcctatacaaaatatttttttgctactatcttttgcataagcaatttctcactcatataccacacaaaaataacttttctttacaaaaataaaaacacaaacaaaacttgaaacttaaatagaaattcccattctgtgtaaagaggctacataaaaaaatcatatattttttaaaatttataatggaataaatcaattgttaaggtattttgggtttttttaaaaaaattcctagcccaataacatattataaaacaattaatagctctttccgatatatattataaaaagggacaatgtcaatagcatcatttaactgggatatacttaatgggtacaaattaattctgaaatgcatgacatcaacatagtcaaattagttgcctcaaatttttagcccgtatttgatctgtttatccaaaaactataatcaatcaaaatacatatattaaccttgccattttcattcttcttcattttttcttcccgtattttctatttgttttgtgatttctcattgggacaggacgactttaattccatctccctttttcttaggtagaattgtttttctctagtttgtgttggagaatttatccatttcagctcattccagtcggttatagaaggcgctgcgttgcacaccttttttttttggtctttttctcgtttaagttggaatagtttaatgaaaaaggctagatacgtgtcaacaccgtaatgggctgccatcccaaccaatcagctggcagtatttttttccagcttggagataaagtgattagaccaaccgacatctaaagcacatactcatctaaaatcctctatctgatcttttctattagttgcagttgacattcaaagttttacatagcactgtaaagcacgcgagtttatgtagcttgaattgaaaacagttaacgattttttcaacttcatctttgctttgttaggtgtgtgcaaaactttcgtacatctcaactctagccttatatggatgttcgcatggagctctcaattttgtttgctgatctacttggcagatgcttgagtacaatattcagttattgatttgtggttcggtccttatttgtacagtaacctttttttttatcatgatttgtgttaacaacgcttcaaatcgccgcaccggccgcgcggcgtggcgccgcacaatcccttatagtagcgacgacgaaacacattaggatgcaaacaaaatagcttgtttggttgcctgaccacaagaggagtggcaatagtgattatatgtgatttccagcaaaaggccaagtgagagaaagattgaaatataatcatgtcagcgatagatgtaccacaaatagcagaaactaggaaggtagcccgcgcgtatgcgcgggcacttatttaatgttgcttaaatttttgttacaaatgtttacatgtagatgatatttttaaaatagatcttgattatattttaaacatgttttcgttaatatctagtttggacatattacttgaaaccgtacaaccttaaatttatgagaacatgtgtcacgataatggaatatttgagttgtttcatatctatttgtactatatgtgattttttaacctagataaagggttttttaaatactaccacgataatctccagagcaccatattattggttatattttgataaatatctataattttgagtttggtttttttaacgcttattattcataatcacatgagacatatttactaattaatttggagaatgaatctattttcccaaacttatttacaataactaatttattaaagtatactttatagtcatgccaatagggttactttatagtcatgccaatagggtatatgacatccgtccatcaaatttgcctgatgtgttggaattcctcatctataaaaaatatatcatgagtaatttattatgcatgttacttgattgttcatttgttgtcaaaactatttgacaaagagaaaacatatatatgaccataaatctcatgattgattaagtggttgtattctatcaagataattggcttgaaatatttttcatatttttttacatctgtgtaacattcatgttgcccacttatcagatactaatgaaataattctaaagattcaaaaaaaattgaaaaccttaatctcaaacgaattaaaattaaattagatctacttaaaaatacacaactaaattgtgttgttttcatttattttacatatgtagaattaaattagcattgtatagtcttcaagtgatatttgacacctgaaatatgataagatttttttttaaaataggaaaaagtacaaattatccacataagcccgaaaaccggacatctttcaccctcaactattaataggacgaactagaaaatgagcgtgcccgttggcacgctagctagtttatagcatgtgtatattttcttttagaaataataggtttaaaatgattatttaaagtttttttttcaaattttatgtttgtaaaagtaagttagaatagtaaaattatcctaatttgtggtcttatcatgccgaacagaatatttacgttaagaaattattaaagatcatatatattagtgaaaaatgtgtttttattaatattcaacacgattgttataaacttgcaagtcatatagtttgtataattagtccgaaatacatatctaaaataaatgtgtcttcggttacctgtttctttatactggttttatttagaggatggggcatcgacatggtaaagatacttatcttgttttcatatatccagttattctaatgcagctcagctggttaggttccgtgcctatacgggttcaggtcaatagacttagaacgagttctttgcattttaccactatttgttgtttcaatgataggcaacctaccgatctttatcaatccaaatatatgtctgacggcctagtcttaaaaggtgctcgtgtgtatatcatctaaattgtgtttcacaaacaaaaaatatagcaaaattattgtcgttacttacccatgttccaaaataaatggattcctttgtggtggaaccaacccacccgggttcaaatcctagatttgacacgggtgttcgtatttatggctaattattctttcagtggtaggcgacgtacccgtcgacagcgaagcgcctgtggtgacttcgtcaatctcaagatatgccggcccagtcttctggaggtgctcataagggtagggtatgcgtgtgtgcattcatagggtgagtgtgcgcacgttgtgagcgcctacgtttgtactgtgtttctaaaaaaaaaatggattcctagcatccagaaaaagtataaggtgaggattaaaaaagaaaaaaaatgttctgaattaataggaaaatagtgctgaacttgtcggttaacagagaatacatcggttcatctaatttcactttttattctttccattctatagaattttaggtattttcctcgtttgaagtaaacattctagattgtatttatctggaggctttcgattgtcctaacacaatccttgctgctgctatatttttttccatttaatttcactattttttctaattttctagaaacacatgatgctaacatgaagtgactttccctcattcgagtaattgtggttgattgcataatcctattatttttattttttctcattttctttttattactattattttgttctatactggctctgtacacttcagtccttcacgctgtttttcttcccttttcttttgaacgaacgtacttagcgccgcgtgaagaggccatgcaccagtattgcggactgtggtacatattgcggaaaaggccgtggggcgccagggccagggccaggcccagggtcgcacagcctagctagatgcaaaacccaccccgcatacgcacgcaggcaaacgtttacgtttttttttccgatctctttcgatgcgaatacttcacccatcacacgtggcagcttttcagtgagctctaaccaaatttgtagggtgccacgcggcccaatgaaaaacaagagcctagacctagaaatcggtattagagattggcctcagataagtattcatgtaagtcgcatgcaaaggggaaaattatcttgcattgcaaatttatgcaaagagcatgtttggttgccagaccacaaggcattaatctgggaatgagtgcataaaaaaaaggaacaaacagcaaggaaaataaaagaacaagattagataaatctgttcataagcatcacaaataagcagcattaaccatcactcgccaccttttctagccaaatagcaagaaaaattagatcaagtattgacaaatctgttcataagcatcacaaatcagtaacaatattcatcattgaccacatttccgagcctaatagcaaggaaaaaaaaagaaaaaaactgtagaaaatcctgttcatatgcatcagaaatcagcaacattaatcctcattggccacctttccagacagcaggattctgttcatatgccatcagaaatcagcatcattaatccaaatttgccatcatgcatcacaaatcagcgagcatcatgcaacaatcaagtattgttgttcactacaaaagacatgtggtgccactaccaccttaacaagcagctaaccaatatcctacaaaaaacatacggtgtccactaccaccttaaccagcaaatatcatacaaaagccacatcgtgtccactaccaacttaaccaatagttaaccaatattacataaacagatgaaaaaaaaaagtgaaactaagcctcttctgtggtgatcagtccaatagcttgggcaatgtttatcttctttttgatgtagtcatcatagaaccgcggtttatccctctacaaataaaatgaatctcaatcagtaaaaagctaaacagtttttaaaaagcaagcatgcatgcatagacaacttcatatagtacactaccagcttcttaactgcgtctgcaattagccccagaacttgatcctctgcaacctgacaggtaagtgggatgttagacaaaacaacatctaccagtataaatatataatggattgcacttgcatgtcagatatataacacaatacttacttcctctgtaatgcaagccgtacaagtatgaaactggaaagggaaaaaagaaggtgagatgaatgacaagataatgagaataccacattataattttgcagatcatcagtgaacaacacaactaaattacctccgcttcccattgagagcagtcattgatctccagtacatatttcattttttgttgtcgtactggaaacctgttcagttcatagacttccttcattgcatctctgaaactcatctggacatatatagttaaagagaaaacacgggcattactaagcaaatacaacatttataaacatacaaaataaactattatatatttacattatataaattttagttgtgcagctggggtatagtgttaatattgtgctgaccttttgcttggtaacccgctgccaaatctcaaaatatacatcatctagctccttaaaaaaacaaacatcatagttcatgctagatacaaattcctgaattgtataaataattcaactattagatatatacaagaccactaaaatcaaattaactagtgtgcaacttaagtatcatacatggaagccaagataagctaacctggcagtaatcttggggaatccagtagctatcttaactgcttggtaaagtcctctgttgcttactcttccccactacatatagaattattatggtgatacaatacatgaagatgcaaaattattctatacaataatacttgccttaagagatggccgctcaagtaacacataatcttccatccactgtttcataatacaaggaagctattagtcagtagtcaatgctttaaaagcgttacaaaattttaacacttgattaacttgatataaatatgatgcaacaagcatatataccttaagtttctttgataattcaccataatatttcacatactgtttttcaacatcatatgtattaaaatacatatgatatttatcccaattggcatacatgcaaccctaaaaaaagaaaaggggaaaatcacatggttgagaaaataatatttacaaagatatatataacagtactcatgcatcaagaacatatatatgatcacatacatcatttttaatgactagacgttgatagtcaacaagtgcagcaagcttgcaatactcagggtggaagtaccaaacaaatatgtaatcaaagcacttaagaacctcccagaggacctcatcatcaacagaatcaagtgtgccatcattttcaaagcatataaggacctcctccagctgcttagacatgtcaaaagggtattgatttatcatttcatcatggtccagcttactcctagttccagacacttgctgtaacgactgtaacaggaggtcaatcatatatatcagtattgtatcttatctcctaacaactgtaacaataagatcactcatgagataatgttagatgcaaatgcaaacaggaggtcaatcatatatatcagtattgtatcttatctccctgaaatgtttgaggttaagcacattttagagaaaataaaggttgcagcattttttaaatttcattgagtaaattgcagtttgggtcatgtatttttacccttgttgcagcttggacagggtcttagtcatgattttcaatttggactacacaaccttgccatttgtttcactctgatcttatccaacagactctatccttatccctagggccttgacccctcggcccactacccatgacagcaccaccccctcatcgtctccaagtcaggcagcccatcaccgttgtccctctctttgctgctattatcatctctcccaacctgttcttgttatgctatcaacgaacaggaggaggtaaaagtacgacacttcccaaactccagtcaccctatccaatctggagggaggagcagatcatcacaggttcagcagcgctaccggtgctcaagctgagatggagtgcatggtggtagagctgaagttgctgctgcttgagcttgggtgtgggagcagtacgacagcgcttggaataggcaatgtttcttgagctcgagtatgtaggttgctttcaccagggagctcaatcccaaacacaatttttttttgacgggtcagccgaaaatggaccaaccgaaattgtattaagaggagaagaaattcagtactgttaaaaaacggcactagactgtcaaaaaggggcaaacgcaacaagccgtcaaacgacagtgtgccattgccccaaaaaaggaaaaaaaaccaggagctgcaaggaaataatcgctctgcttgaacactcctgcttctctccaaaccaggacctcttctcttactgctctgtagagctgtgcggcggtgcagttttgtgctaaaaaaatatcatattgctctctttccacaccagccagcacacaagcatggagaagatgaagacttcagtatgctaatgaccaaattaaactaatcgtatcacctcacttggcatgctaattttagctatcaatacaagagagggcatggtagtgctcaagctcacgtatagtggcttcagctcaacgaagaagagaagagagcggagattgaggaaaaaccggtccaatctgaaacttgtataaaattgtctagtccaaagtgaaaatattactttgcccctagtccaatgtgtaactctggtaataagaggtagcccaatgtgcaattcactcaatttcatttgtaggatgtgtcaccgaggaagcacggatactcaatccactctataagctagtgatcattgattgatatatggatagagtgtgaatgaatgaaactaaccttgtaatacttcacacgatacagttcatggagttcattttgagcatcgagctgattgaaatccaattgagtagaagtatcaacaggagagtcttgttcttgaggcagctggcgcaagtaaccacggaacttgtcagtgctaatatcttctcccaaacccaattcattcagctcctgagtgagaaggttggcttcctccacatttttctccatggtagcatcattgcattcggttgcgattgcaactggaacgctgtaatcttgttcggtatcatcatcctggtctgcaggactgttgagggccttagaaaaacggaagctttttttcctcctaggtggaacccatgtcttcttcttcttggcctgcttgttgtgtggcgccgccttctcttgggaaggaccagagaggccagaaagccccgggacacacgaatccattacatcatcatcatcgtcatcaagttcacctagcaccgcgaaacgacgaccttttggagtggtcgagtcaataccagcggatacgtcgacgatgtcgttgatggttgacacggccaaacggcgcagatttggagtcgtcttcttctctgaggcgccgatggccggcatgttcttcccgctcgggggcggcggcccgcggctggacccgcggtgcttgggcggcatctctccaaacccaaactagatcgatctggaacccagggagcgggagcgggagcgggagaggcggcggcggcggaggaggaggggaggggaggtggggcgaagaagacgattggtttgggagctcaaatcgccaagggtgcccaggtcgggatcgggtcgggttgggttcgtttgggaataagcgagattttttttagatcccttaaccccaaaaccagaaatacgtgcccctcaactcttacaaaccgttcacgggaggttcctcggcagtatttttgcccggttttgctgacgtggcatcctagtcagcaaaaataattttaaaaaatacgtggggtccacatgtcagctgcacactcttttcttcttctcctcttttctcttctctcttctcttcttcagtgacttcagtgagggagaccggcggcgggcggagcccgctcgaggccgagcagcagccgccgctgccgccgccctccgtgtccgggcctggcggggaggggacggggagagccacaacaccgccgccgtcgcgtcgtgtccggacctggcggggaggggacggggagccacgacaacaaatcgggtgaagctaaatgaccaatggtctaccattcgagcgattaactgacggcaattacagcgaagcgctcgatcggatcggagtccggtcagtacccgccggcgccgctgctccatccgccgcggccggcggcgcccatctgtttgctgccgatcgccaccgaaggcagctggttggcgttggtcaaatactgccggacggggtcatccgtcggcggcccggcgagcgccaccggcggcggcagcggccgtgatgacgtactgctgcatgaccagcacggacgccatcttggagaactcggaggagacgaggaggtcgccgatggggccgagctccggcgactccatccactcggcgagccccgacgtcagcggcgagctcgcctcgccggggtggcggccgacggtgtacagctcgtgcgcgttgtcgagctggctgcggatggcggcgagcgtctcctcgctgttggccaccacctgctcgacgtagaggatggcatcgctgccgaggttgcgcgaccggaactcgttgaggtactcctcgtccatctgccgctcgctcttggcgacctcggggacgacgttgatggcgcgggagtgggcggcgggcatcggcggctgcggcggcgagaccgccggcgccgtgtaccccggcgggatgaagcggacgatggtgaggcacacgcccgggttctcgaccatccgccacgcgtacgcgagcccctcccggtcgtcgggcccgccgaagaagaggagcgcgacgtagtgcacggcggccatcctcgccgcggcggcgctgaggccgcggtcgacgaggatgccgacggagcatggcgccgacgcgaggatgctctcgttgaagccccggagcgacgcattgatgggctccatgccgcgtccaccgtctgctgcttgtggaacgggagcacgatgagcgagacgtgcttgtcctccgccaggacgcacacgtcctcgtgcatcgtctggtaaggcgacaccgccgtcagcgccgctcgcccggtcccaagcccctctgctcctccgagccgctcgcccgccgctccgccgcctcgctccgccgctgccgctcccctctgcggcaaatataaagacgaaagaggaggagagaaaaagggatgctgagtaggatctgacctcatatttttgtcacttacatgtgggtcccacgtactttttttaattttttttgctgactagtatgccacgtcagcaaaaccgggcaaaaatactgccgagggacctcccgtgaacggtttgtgagagttgaggggcacacatttctggttttggggtttagggacctcaaaaaatctcgctatcaaattaagggacctctggtgaacttattccgttcgtttgctctctctcccatatagctggccaaatgggccgtgctctgtcgggcccgcccaagcacgatgctacagtaaccgacacggcacagcacgggcccgtgagcttatgggccgtgctcgggcgtgccgtgcctgggccgacgcctaagcccgtgggccagcacggcccgacgcgtggcccggcacagcacgagaggccgaagccatcgggccgcatgccgcagcctgtagcgccgtccccagccaccaaccgcagcgcagcccgagattagttaaaactcgctccttttttacagcatgcaagcgtgcatggttagtttgtgtggcatgcacaggaaccgaataggcagtgcatgcgtgcatccaccccaactaacatgcatcataattgcttcttgaattaattctcccttagtattgctgcataaatgacctcggcgacgtcaaaaacatgcatgcactgatgcacccaaccaacatgcattccttttcttttcgcatatttttttggtcaaaatctcccgttcttatgcacgcttgcgtcgccgccgtgcgcccgtgccgcatcgggcgagccgcggctccaatctttcgcctccacgcgtcgcgcgccaggcgggcggtagacgacggcgcgactttcgacctcccgcgtgccttcgggccggcgccggcccacgtgccactaatgggcccgtgccggcacggcacggcacgacgtccccttgggccgtgcttgggccggagggacggcacgtgggctggcacggcacggcccgctatggaaccgtgcctaatgggccgtgcttttggtgggcccgtaccgcgctgggccgggccgcccattcggcctactatacttgggaccttctagtgctgtacggtattccagttgtaattaaaaaaaaagtatatccgaggtctttatcttgtcaccaaattatacaaaatcatctctcaacgaaaaaaatcagacatatcggactcttcaatttacagaactggttttttggttgaggaatgattttgtattttggtgacaagaggggtctcatatgtcctttttgctattccagttctagcatcccctatatgagtactatacagcccatgcattgcttttattttctttctttttttatataatacaagaaaaaaaatatccgcacagaggagaaaaaggttgatgagagagtgtgtgatcaataaaagccgagtgaggtaacaacgtggaatgtgagacgtcaataaaagttgagcgaggcagcaagcagacttgatgcgtgagttgaacaatataccaagaaaaagaaaaaagaaaagaaaacgaatgacatgcagacgaccaaggtaaaaagcatgcaagtgattattgaaaaaaatatatgaattttcgaagtacataatacctccgagttatgtaataaccatttacttcgttataaattgatttataatagtgtcatatattaaaaaggggaaaagtataattaaaactagggagagtatatttctatatataagaatatatagagatatggaagagatagatatatacagatatatattcttataagaatatataagaatatctcaagttggaagatgaaactatcgctaaacattaccatatatcaaatatttattttgctatatttttgtatcattttcctcttactctacgtatagcaccatggtccatgtttttttttccaacttattaatatgtgccttttctcatatcacattagattttattttactttttccctctttgacgtcctggccttgaatttttttattttagatttttttaataaataattttaataatatacctcctaggaacttattttaaaaaataaatctttttgccacgccacttaagctggtgcggccaaactaagcagccacaccaccgctcttggcgttggcaaggtcaaacaggcactgacgtggtgggggtgaggttggtgggggtgaggttgggcttgccatgccatcccatctagcatagttgggggaaatataccctagccgtcgccgccgccgctttctttctccttcctctatcgtgttcttgcgctctctctctctctctctgcgcgaagtaaccgacgccccctcctcaaatccattcaaaatccagtgttcttgcttcgatgtgaagcccttttgagtgggaacccaacccgtaaggtatatatctttttttggtttcttttctcttgtttttgcatgtatttgtaatgtctaggattgtatgtaatgttgttggaatatgtggtaatgaggttcatgggatggatcggaatagatcggggtgtattatggagtagttctcatttctgttagtgatatttaagtggaaaatacctttttagttcgaatgatatggttaaaagtggggttagacatgggagagcacggacacattttttttaggtttttgtgatcatgtagggatgataaggtcatgcatccagtgatttttttggtgtataagttgtcggcttctgccttcgtatcgttctataatgagtatttgatttgcatgtgaatattgtgcatgtagatggatcgtgtggtccgtgtatattctggtggaaccgttagtgcaaatggaaaatttgatgagatgaaagtaggtgttttagtgtttgcgagcagtcctacgtgggcacaattatgtgatcgggttcgttctaaaatggaacatgtcgtacctacgaacgtgatgagaatggaagggcagtatgttgcaaggtttggatcaggggaacattttgtgatgatgccaatgtcatgtgagttggagtgatcgacgtatgttacatatgtttcaagttcacaagttcgttctatggatgtggtggttacaacttgtgcaaatcgaagtacagtagatctagtatccttagattgtggtcattccttggaaacagagcatgaactgatagtggagcatgagggcaagttttatagtaggggtagttgtcacatctaattttatccatgtaagataagaggtgatatatacaatacaccacatctacaccacctctatcattttaacccaaattatttttttatttgtttgtccaatcccctctttctttcatctcatttttctttgggtttgtgtggaggttgcccttgcatgaggggtggctcaccttctctttcctcaattattacttccacctcatcatccaatcctacatggcatttttaggggcaacacattaagagcaagtttaatagtatagccaattactagctccaaatcatctatagccaatataatagctaattcatacaatagttgcttactatactattaatatctggtcatacctgttatacacacattacatcttggagactgtgctgcagctggctacagatctgtagcccgctgctcttctctcttccttttctctttaaaatatgtttatagctggcttatagcctgctattgtacctgctcgcatcatagtacttgtcctgaggagactttgacacaggatcccccattagcggagatagctggacctggtaacgagggtgtaatactgttggtagaacctagtagtgtctcaaacaacaatgacactataatttgtgctggcacggtttatatgcaaaattttgaattgcatgggcacaaagtgattatcgagttttatactggagatgaggtttatttcaaaatgaaaacaaatatatcgattttttttcatctatagcaaagtacgggatttcaggtacacgttgacaaattttacataaggagctagcctgggagtttttagtttttaaaaatgaccgtattgtgtcaaaatagtttggtactccctccatctttttttatatgacaaccgtatacaaatcaaaacgtgtattaatattgggtctatctaaaaatctgtcacaagtttttgagaaaatactttcaaatataacattagtgtaactacattgtgattgtagcgtaactatattgtataactatataaaatttgtatataagttgcttgcaactaatagaacattttcatagctcagttggtagcatgcgtgtggagcataaaatttatagttcagttcttagtaggtgggacagatggttgacgccgagatggttgaaaaaaactagttaattaaatgttcattctaaaatacttaagaactgaactttataggcagcaatgcttgatgcagcaacaaacgacactccgatcttggtttgagtatgtcattcaggagtataaagttcctgcatttcaatggagcataacattttaagaagcacttttttttgctggccggccgaaacgaccaattttattaagattggaagaatttttaagaagcaattgtctttgaattcaggtctctgaatgaatttccatgaaattgcattgtaggtgagacaacgaagtttggcatgaaccggaggatggggtatgcccacatgggcgacggccttgtttggatcctccgggctattaaatagctatccggattcttgttatttagaagtattaaacgtagattactgacaaaatcaattccataacccctaggctattttgtgagacgaatctaacaaggtatattaatct

SEQ ID NO: 2800 - DNA, 3213 bp, Oryza sativa
  unsure (1)..(3213): unsure at all n locations
gactaacttatcacattggaaatacaattagaaaagacatttccttaagatgccatgtattcttgattactatatccacttgcaaagcaatgtgcagtagtagcacataaacatagttatgcctgaagaaataagtatcatcaaactagaggaggaacaagtcattccataacacaacatggcactggacaatctacacagatgaaggatagagcaacatgagaaatactgacactccaagagatgctgtcaactctgctatcctaagaaagtcaaaacattcaataatcctgaaacagaaccaccatcacaagaccatatatccgagtgtcaaccaacaaccagacaaggtccaataagaaaatccattcccaaccaacaccaaatctaacccaaccttactgtcaaggccgtacaacagcaagtacaggataatggcagctgaacaactgaatctagcagacctgcaccagatccattccacccccaatctaatcagtaccaatcagtttgcttttcagtcaaccaaccaaaaaagaaaatgtcacacagacttgtacaattggcacaagcacattattatccagaagaaacgtcaaaatagagtgatatggtggatgaccttgcggagagggtggtcggtggggaggaagctgccgatggtcttgccgtagacctcgcacgtggagaagtggatgagacgcttgttgttctcagagcagtacttgacctgtgcacatcacacacgtccatcaacaattctgcactagtggtagaaaagaagaagaagaacgctggagtggagaagaggagggattaccacagggagcgcgtcgatgaagttgctgtagatggtgtcgagggggcgcgtgttgtagtcggccggcgtgcagatcgccgccaggttgatcgtctacgcagatccggaatcaaggcgtgttatcagaaatgaaatgagattgaaattgagagcaggagggagagagagggagagaccagatcggccatcttgatgaggccctcgagcctggagtcgttcttgatgttgaggcggtggaaggagatgcggccatggaggtggggaggggcggggtcnacgaggtggcggatcttgtcgcagtagacgtcgacggcgtagacgacgtgggcggtctcggccatgagcttctcgcagaggtgggagccgatgaagccgccggcgccgatcatgcagatggtgaggggcgcgatggggttgccgtccagatccaccctcccggcggcggaggcggcgggcggcgacgacgacgacgacatcctcccttggtccgcggatccggaatgcgcgtggaagatggattggattcgattattgcggaggaagggaggcgctggatttggnggttacgaggcgaggcgatgtcggtggcggtggttttctttttctctcctatttaagagcgcccacactctctcttctcctcttgtctctctcgagtctcgactttgaagaaggaagggaaaggattgaggggatggacaagaggtggcccactcctcccatcgagatccggtggttggtgggcctgcatgggcctctcttcctttttcaccatttccttcttttcttttttttccctaactcatttacgcctattcattttggatgaattttaaaggattttaatttcttttaggattaattcctacgaaagctatttgattattaggaatgtagatataggaaaaccaaagaaaaaatttctcctacaagatgtagagggaaaacatatattttgttcccgtccactctaaccttttgggaaaatcctatggattcaagtttgcatgtattcctatttctccattttttaatatnnttctaattggtatntaaaaanatttttcttttcaaaaaaacccggaaaaatttagacactaatgaattttttccctttaaattcttacctctactgcttaaaagcggagcattcgtctgttccaaaccaaatatacatcaaattcattcatttgttataccaataaattcaatgtttgtttctacacgcgaacatatattgctagttatattactattcatacacgcataaattagcatcatgtgtgttgttttaacgtacgcgggaagcggtaaatctcgaccacactgtatgtataatatttatggatattatttgcgtactgttgtatatagtactatagtgtgatgccgttgtctgttacctcaacccaaatgtcacagcagcactttggtctctgtcacgttggcaacctacttaacctagtaggggatgtagatgtgatcccttttaaaataacgaatcataaaaggtagtccaaattcattataccttctaggagggtcaaatttctttctaagttaattttttttacacagagggagtgctttcttcatcatcaccacacacatatacatacgtgtagtgtactggtcagtaccattatgtaattaaaaataactcttctttttcagtaactcccttttcgtttaccttccagtctttaagttgttggtggtgtaatattgttatcgtcactcatatatctcatcataaatcactactacaaaaatagttttcgctggtagttaaattgggttttcgttgaccagcgaaaatcgagtttcgcaaacggatatgctaagataaccaagcggcaagctaaagagaactgccagtgaaaacaattttagaataaaaaaaattcaaaatcggtgccatcggcccccataaccccaaacaatgccagccggtcggaatacgatagggtattgtacgatccgttgtaaaaaaaaaaaaagtatgtttgcaaatatagtttgaaacatcaaatatatggctagtcggcaattttgctgatcctatgaccgacgaaccgacgcaacggaaaaaaaaacaatgaaagctttccgtttcaaaataaatcaatctagcacatgatgtcacgcatactaatactatgaatcaaaatctggacaacaactctagcatcgagagtcactaactttaactactttctccgtttcaggttataagactttctagcattgcccatattcatatatatgttaatgattctaaatatatatatatatatatatatttatatatatatatatatatatatatatatgtatgtgtgtgtctagattcattaacatttatatgaatatggataatgctagaaatgtct

SEQ ID NO: 2801 - DNA, 2058 bp, Oryza sativa
tcggttttaaagcgaaaaatttaggaaacatccaagctaatttctgacctcattcgaaggcctgggggcgatgtcacgcccaattgtacctttttcatttggattttcatgattatttttcgtattaaagccctgatagtaaaacgtacacactactggttagtgtttgagtgaagaggaaaataaatgattgagaagatacgtaaaataaggttagccattagcatataattaatcgagtatcaactattttaaattttaaaatggattaatattatttttaaagtaacatttctatatatttttttaaaaaaacacatcatttagtaatttggaaaatatgcgcacaaaaaataaaaggtttgctccctcaatctccctgaacaaacgcagatacatcttaagtggaaaacaaaaggagatcggatgtattctggcttccagctatcaagaaacaaagagcttaacatactaatgatggacctgccctttcatgcagttttttttttcacagtacgcaatcagtatgagtttgagaacaatgcacagtactttctcaagaaattttgaactaatccaaattatcagttcatgacaatgggaacccacctggatactgtgatagcacgagaaaagctcaggcacacggcatgcgcatggaacaaacaagttaccacaaattagtcggtcatatgaatcacaactaccaagtagtgaaatttgcagattttgcttctaacagcctactactagttgctgtactaaactcaaagaacttaactcacaaccattatagcttccagcccataatttccttgaacaatcatctatactgaacaagaacatctctcaccgacgaagcaataagaaagaatgacacaggatgagcaaccaaaggtacaaatgaatacatcgactctgccacagatatggtggataaccccttgccggcttacacaggaggaaacctaaaagttggtagggatctaggagtgactagatgcacaaaaaggattacttgagtatacgtattccacttccaaacgattatagccactgacagtgctctacaagagccaacatcaccatctatggattggagcgtgttgtctaactcgacgctgaagcctgtgacatttgccttttgatagcttctttgtaagtcttgtgctggtaggtcaatgttgtctccagcaaatccttgagaggggtcttcggattccaacctagaacagttgaatcaatatttggttattatgaaccactggttacccaactagtacaacatagacataacaggttattgaagacagtaaataccaagctgcttgttgattatggtcatgtcaggaatcctcttatcactatcatcatatccttcaccatagaactgcttcgaactcacgtcaatcataggttcatccagtggtggctctcctgagacatttgcatagacctgtacaggacaaccatgtaagacttagggcatgagtaacagaaacgctcaaagaaacattgccacgctaatgatgtacctctgtcatcatttcagccaattgcctaacagtgacttcattgttaggattcccgacattgaagatttgaccattggcacgagcaggattttccttttgacataaagtacacatttcagttcaactaacaaggtaaatctagcataagagcaaaggaagtaaagataaacagagaaaacatacaatcatcaagtgaacagcttcaatggcatccttaatgtaaacaaaagttctctgggactggccaccatcaacaagtttcaggggctcccgacgcaggagattctgcaaattcattggcgacatacatcttatgagaaaaacgaccataacgaaatggaggtatattattctcagaaagggactggttgacatacgttactgaaacatgccaaaacccgaggaacaccctcactaggaccatcaacaccaggaataaagtccattcttggtccaatccaattgaaaggtctcacaattgtgaactcaaggccattttctgctccttcagctggttaaagct

SEQ ID NO: 2802 - DNA, 738 bp, Oryza sativa
gcgcattcacctactagtggtacagtagttcatcattcgttgaagaagagaggagagagatcgaggtaggatattggatatttctttcagatcagttggtggcttgtcgcttgagcttgacaatggacgtggccgggggctgcaaagaagtcgaggaggtggaggctgttgacggcggctatcacagacgccgatggagatcggttggcccaccgacgttcgacacgtcgaccacgtcaacttccaccgagtacatggcttgcagggccctcccgtggagctacagcccgaggtctgcggaaacgcccctagcgcaaggtaagcgtcttcttgttctccatctgcggcggccagagctgcggctgacaactgtattattattatggatatggaatattgcacaagacggtgttcggtgtgtcacggagtcgatgcactgctcgtacgacgcgcgggggaacagcgtaccgagcatactcctgctgatgcagcggtggctctacaagcatggcgggctgaaggctgagggcatcttccgcatcggcggcgacgacgcccaagagcaagctgtccggtagcatctcaactacgcttgctcgcgagaggcacgctggacgtgcactgtctggcgcggctcatctaggcctcgatctcggagctcccccgctggatgctggactccctggccgcaggggacgtgacgcagagccaattcgccgacgactgttctgagctgtg

SEQ ID NO: 2803 - DNA, 725 bp, Oryza sativa
agcccttgacttcagtggtacagtagttcatcactgatcatcaaagaagacttggtataggcccattaaactcaactgaggcctatcccgggagagtgaaaaaatggcatctaccatgagttctaccagtataacccgaacggatcagtctggggtaacatagtttggggccactcggtctcgacagatctcatcaactggatccgtcttgaacctgcaatagaaggaaatactccgagcgacataaacggttgttggactggttcagcaacaatcctcactggtgatcaaccggttatcatatataccggtgccgacacggagaagcgtcaggttcaaaacattgtgctaccaaagaaccggtctgatccttacctgagggaatggaccaagccaaaaaacaaccctttgatcgaaccggtcggtccgggtttgaactcaaaccaattcagagatccgacaaccggttggataggaccggatgggctatggagaatagcagttggggctgagctgaatggctacagtgcagcacttttgtacaagagcaaagactttatgcagtggactagagtagatcacccattgtattcttctaatgcatccaacatgtgggagtgcccggatttctttgcagtatttgctggcaagaacaatggactggacctctttgcaactttcccaaatgcgcccagcatggtcttaaaagagcttggattcctgta

SEQ ID NO: 2804 - DNA, 757 bp, Oryza sativa
  unsure (1)..(757): unsure at all n locations
agtgggcacatatcaagtatctgcttggagcaatgttttcgtatgtgtattccgnatgcccanttcatttcggttagtcattatcnatttcagttggaaaatgcaatcgtatgtttggggtactataagtgatcaaggggtggtaactcatatcacaggggcaaactttgcacagagttcccattacgattaatgggtggctccgagttttcttgtgggcacaagcatcccaagtaatacagtcttatggttcttcattatccgcatatggtctttttatcctaggagctcattttgtctgggccttcagtttcatgttttttatttcagcggcatgcgttgctgactcgctcccatttttggaccattaattgaatggattattacataggcagtccctgctacaatcttgttgatcaacatatggaaattgttatactttcagtagcacattttttagatttttattgaccgatggttgtattttaatacaaagtacactaaggcatcctgttggtaaaagggcatgttccccttcgcaggttgaatctttatgacttggtatgtttcactgatcacccgttaacattatttaattgaaatttagccatagtggaaatataattttttggggcatattcaccttctttgtgtgacctctcttcatgtaaggcctgtcatgttgtagcaaaaagagcatttcgatatagacaacatctggtgatgaactactgtaccatatagaggcgaatccgcg

SEQ ID NO: 2805 - DNA, 741 bp, Oryza sativa
cacaccttagattgcgttctactgcaagtagttcatcatttcccttcccttgcgattggcttgggcgagggggaacatatcaagtatccgcctgggatcatgttttcttatgtactattctggatgtacaactccatttcggtagtcattttccattttagtcgctaaatgcaatcctatgtctggggtactattaactatcaacgggtggtgactcatatgacagggcgaaactttgcacagagatccactacggatcatgggtggctccgagagttcttgtgggcacaagcatccgaagaaattcagcttatggctcttcattatccgcatatggactttttttcttaggtgctcattatgtctgggccttcagcttaatgtttttattcaccggcatgcgttgctggcttgctgccatttttggaccattaattgaatggattattatatcggcagtccctgcttcaattttgtttatcaacatatgggaattgatatactttcagtagcacattttttaaaattttattaaacaatggctgtattataatacacagcagacaaaggcatcctgttggtaaaagggcaagatcaccttcacaggttgaatctttatgattatggatgattcactgaataacctttgcattatttaattgcaattgtaccatagtggaaatataattgtttggggcatatttaccttctttgggtaactatcttgatgcaaggcctgtg

SEQ ID NO: 2806 - DNA, 537 bp, Oryza sativa
  unsure (1)..(537): unsure at all n locations
cacggtttggacactctnnnnnnnnnnnnnnnnnnnnnnnnnnnnnnnnnnnnttgttgcttttgaacatctggtacagatctgttagtaaatttacatgccctaatattatgattattttatcgtaaatcagatggttgaagctaaattcacaacgatgcttaaccactcaaggactcttctgagaaaaagatggctatatggtatttttgatgatttcgtgacgaagcagctacctcacaatgtgacatggtggtccaatgacttgtacagtaggatagttgctactcgtgtgcacattgcacagtaggtggggtgtgtgaagggccacaaaacacctcttgttattgcttcttttgttgcatatatgctactgcaatcagctatgattttgttcagtctgtgatttgttaatagacagttgcccctgtccgaatgggtcctctgaatgtcaaaaatttctgccactgtttcatcgagcttttttatttgtgggatgggatttatatctaggtgatattaactgccacattgaat

SEQ ID NO: 2807 - DNA, 6735 bp, Oryza sativa
  unsure (1)..(6735): unsure at all n locations
tttcaccaaggtctgagcaattcttttagaacgaatgaatatttacttaaccagaatagtagtgtggcaacctcacgtttgcagtttgtttgttaactgttcaacctgttctgttagtctgagaaatcaaagaaggctggacaccctccttcaactactgttgttgttgaattcctgagaactacgtacatgggaagcctagaggtccttctactggaagaagatatgaatttcaatgcccgtgctacatcattcaccgttcgtgttctctttctattctttctgacgttcccactataaagacatgtttgattttgaaaaatccatatcttcacacaagtatcgatgttcctctgcaggaggtcaagggaaaaggctttcttctagtttccactgacatagcaagcagagggtttgacctcccacaaaccagccacatatacaactttgaccttcccaagacggctattgactatctgcatcgtgctggaagaactgggagagaaccattctccaagttagcttgcagcgtgacaaccctcataacagaggatgagcactttgtattacagagatttcagaatgaactcaagttccattgtgaagagctacctgtagaatccatgttcgcatttaacttgtgacgtccctcactggatgtaaatagccatttctcttgatttcatcccccggttggaggtttttcttttttctgtttaatctagatgaagaggtttgaacaagtgtcctggttattttccctctggagagtggagaaagatgttgaacgtatttatattaaagcataaagttgttatgtatccttaatccttattcactggattgtagcttttttaatggaaattcccattagttgcaacagggttatacccctgaactcttcaatatccaaccagcattgactcgaaaataacagtatcaggcgatgaacaaggtaatctgaacatcctgttcaaagatttagaattcaaatgttaggtctgccttcggcgagagcatgattaggtacagagcacactcatgtcacacatcacactcttcattatcaacagaggagagaaatcggtccatcactcaacagagaagagagaaatcgatccatgagtgatgcggatggcagacagaaactatgaacatgatactctagtactcctaccatggaaactgttcagattcatgatacgagccaggaaaacagatgcaagattatatttcaggtgcgccaggtctgcagcatcaagagaagcaggatgggctcttccgcaaattactcttctttagtctccagcaatttggaatcgcaggccacgatcttcaccttgtttattgtctctgtaatctcttcgttcttgaaaattgcatctgttaggatgaaagtccacacattgtcgcagaacctgtaggtgtgcagatggccctgtgcagagaaaagggaaagccatcactggaaatgcaggcggtctgaactatacatgtgaatactttcaaaaggactcatggcaggaaagcacagtcaatgtgctaaacataagaaatctaattaagatatatgtaacacatcgacggtcttgagtgaagctatatattggcatatactcatcacttcgaatgtgtaacctcaatgcacaataaatcatacagaacttgaattatttcccataaagtacaacacaattgcaaaagataatcatgttacttcaaaagctttgcagaagtagccatcttcgacatacatgacacacaataaaagaacaaaattaatcaatattatattccagttatttgtaggtttgtccaaacaggaaccatgattgaaaatgttgtgcaccgctacttgaccttgatatttagaaattaacatcagaacataatcaatcaatattccagttattttcatggaaatttggattgtcccaaaagtgcttaacttattggtcacagtcattctcacagaaagtctatcgaattggtgagtagcctatgaagcaagcaggaattgccttcccacaaaagaatacacggtagatctaaaagaagactcctatgccacaaacttaatgacatgccaacatgacatagtaataatgttatctatagactgcactctcagtactcatttgcattgcataacttggatgtgtgcaaacaccatagaatgaattgatgattaacaagataagtcaacagttagaaagtttactaattcataactaaataacaacaatacggcattctcatcgattcctttttttaaaaaaaaatctacagctattaatgaaacctacagtacaaaaagagaatcaatagaaagagcataccttgacagtaaccttgctcttcacctgatgctccaaagcgctagtcatggactgaaacaacaagaacatccatatatgaaaaacaagtaatccacatccggcagcagtaatgaaggagaggtagggggttaagaaaccttgtcaaactgcacgaggacttggatggcgagctcggggctgagcgccccactggagaccatgtcgtccagcgtgtcggtgaggcacataccgatggtggacctccggtacagctcgaaggtggccatcgatgatcgaatatcgatcccctccctcctgcagataggcagcccagatacataaaaagtttaagatcggcatgcaaaggctgcggaaacgaactaatcaaaatcctccgggtctgtttgccggccagccgccgcaaatcaaaatctagaaaattcatcgatgtgatcgttcgtgcatatacacaagtatcgcatccctccctccctctatttggtttggttgggtgcggtgcggccaatcgaatcgagggcacaaaatttccctaaaaattagatcccgatcccaacaaaaaatcgcatgatcgaatcgaaccaagcaccagccgcatacctgatctgagactgagagcgagagcggagaggaggattgaggggaggagcaaagcgcagccgcagagaggaattcgaaatctggggcttatataccgatggaggccaggggaagggaggaggggatttggggattatataggcaggggaggcagcagcaaggatcgactatgtcggtgccaaatgccgattttgcccctccctctcccgttgacctggtcaatgcatactgctttatttccttttcttttttttttcatttcatttcattattattccttttccttttttcctttgattattattattattattattattattattattattattattattattattattattattattattattattattattccacgtcatcatttaccttttcatcatatattattgttctcgcttggtttagttacatatagtcgcttggtttagttatacatagagaacgtatttggctctcttttgtgttaatagagcgtttcagctttcaacctccagaaatatatgccacgttgtattggtttttcttactaagccaggatgggtgaaggtgatgaagagcacgatgaattaaagctcactagtaattgacccgtgctaacgctacggtaatatttagtaatgcaaattaaactattaaagtttatcattcttaaaaaaaagaatgacagagccaattactatattgttaattacatagcgatgtgagtaaaataacatcgtgacttttctatcttttgatttgaaacaatgcaagcctattgtacaacttcacaatcaggcatagacatagaagtctatagcatctaatatttgatatatatgtggttttcaatagattttcagtctccaaacttttccctttataaagtgatcacctggcctaagagaattgagagtccaagagaccttgcatcttctttccctcagtagaacatacatacagagcaaagacataagttgagtctgcaggtggctttgttgctcacccagtcaccaaggtcttcccaccgatcagaaagtactataaacttattggatctgggaaacaaatttacatgtgcatttcagccaattaaatgatccaagtacttaagtagaccaaaaatgcaacatgcttcagcttggtgtcatctacctcaaaagctaatggcggtgaaagtttacaaaataaatttccagttcacatatagtaccaaatgatctggaacgaattcacttttntggggcaggcaccgggggcccaacgccccttcaaaatttggatttcccaaaatgatattaccgctgatgttcggaatttcagattttcagactttcaaaccaaagttaagactttcataattaacttttatcaatgaatattccaaagtttagactttcagaatcttaaccatggtaacttataacttaaactgtcttatcatgtgcttccatgtatgcctatttacattctgaaattttaacatagctatatacatattctgaaatataccatgtgttgaatgcctgaatctgaaacaacaacattagttttctgcaagtattcattaaaaaaatatgcagcaatcttgtataatgtaccaaactacccaagcaagacaagcaagatgatgttgattttaggttctgaattaaggtaatgtaataagaaaaagaatatatttctaaaatttaatgattttcctcatcaatttgactatatcacaaatatactccatacattaattttcaaagcataggcataaagcttcaaaatgcaagccatagataaacacttaaagtgcccaaagcacaaatttattccatcacatgtcaaaatagagatcattatattttctctaaatagaaaatatggggtaaataaatgaataaagttcagaagtgaaacaacccttgccaaagcccgccaaacaactatgcattccaacattgtgtacattattgagctcagaactaacatatgaatttcagtcgatataacacatgaatctgtcatgtactgcaaactgaaatgctaattttgtaactccaatccaatatgaagaatcgatgtttgttggtgacaagaacgaagtggtatttaggcgcaaatataaacaacttaaccgggagataagcaacaacccaagcgtagaacctatcaggaatatccttaacctttagctacatctaccttccagcacatctgaaaaagttgctcccatgttgtacgctggtggatagcagagggcttcgtgcaagggagaggtggaaacaaaatgcaggaattgagaaacactgtatgaagacagtgacctgatgttggcaagccagcacacttgatgactgatagcttactttatggagtaaaatggacaatttccttaaaaagaagaactgatgaagaaccactacttttactgcatcagttgttaaccaatagtattaaatttaaaagtagcaaattatcatgagttgctcatataatgctgaatgttacctgaccaatatcggcacagtagaagtaggaaggcctcgcggaatcaaagctgcatctccacgggtttctaagacccaatgcccaaacttctagttctaagtcactgtcatcagtgtatgggttgtcttttggaatggagtagttaccccacaagttggttagcaatttcactctgtcctgtaaagggaaaaaagggaacaaattatcaaatagagtacatgttgatgctccatatattgctaattgtttgtcttatgtgagaggagatttatcacaaataaatatgtgaagtcatttgcaaaaatttcagttcgtatgtttgaagttcatcagaaacatatttatctacccaccccggtatctacttacacaaatataagtagtgaatccagataactgggttgttgctatatgggaaaaaattgcagcagtagcagtacctatctcatgacggtggaaaaaagacactcaaatcaatttgattacctgtatcaccatcctgttttgcaactcgtagcaaaatggagtacagtaataaaatcctattaccagttgcaatagtacaatggaacttagttgattcccataatttgtagtatacacatgatgacataaagggatggatggggtctagttgtacaagaagggctctgcaacactattttatctccattaccaaattctctgtaacactattctacgtgcattaccaaaatcagaactcaaaaaaagcaggaattcattcagttcgtaacctggtcaaattcttgtgagcaaaaatttaccttgggcacagaggagatcggcaaaggtggccgtcggtgacgatgcggacgggagagatcgacgctagcggagcagatcggtgagcggccgtcggtggcaatgcggacgggagagatcggcttgggcggaggcgcggaggagatcgacgacgttggtgacgccggccgacggaggagggatggccgttgttggcgtggcggcgtcgcgatggcggatggcgctggatagggcgatggcggcggcgtgagagtgcggcgtcggcggcgtgcgagagagaggaggatgcgtgtgaggagcgtgattgggaggatgcgcgtgaggaaaggggagaggaggacgcgcgtgcggaggggagggtccgcgacgattttgaggcgttggatcaaatgattctggaccgtcagatttgatgaacggggtttgtaggagtgtagttggtgaattatagggtagatgcaaccacacaattagtgataataataataatcataaccatcccagatcgcaaaacggt

SEQ ID NO: 2808 - DNA, 1344 bp, Oryza sativa
tgccaaatgattgagaagcgtgctttcagtcttcagtctatgagagtattagttattgatgaggtgattcttgagtcctaaatcaaacttttttgcagtataagctcagtctgctaatgcaatatctgactctgtatatttgcaaagagcccaagaggctatttgaagtttggaactcatttagttgatttttttcaagacagaatacctaatgtactcattgctgtttgataggttgattttatttttgggtcgtcaaagcaagtaagctctcttcgcaaaatattaacatcttattcagcagcttccagtcgtcagaccatatttgctagcgcatcgattcctcagcacaatcgctttgtgcatgactgtgtgcaacataagtggactaaggttgcacttctttatctatatggcttgaacgtacactattattattgaatgaaaagatggacctttttgacctcatgtttgcatattctgtcttatctgtgtgcagactgatgtggttcatgttcatgtcaaccctgtacaacccatgccctctcacctccagcacaaatatgcggtgggcatataaatttctttttatgataatcttacattctaaatgccttcaatcatttcctacaactgtggaacttaatacctgtcttgaacatagtaaataggcgtgtttcagttggggcctaaaacctaaacccacaggcacgggcattccttgcataagctcattaaacagcatgcatgtgattatggcaaaagtttagtccttttacaaagcattgcacatcttcttttagttttcagtgatctcatgagtctcttttacttttctgttcctgaaaaatcttgcgagtatgggtgactaacccccttgctcctgaaaaatatcttttgacctgatttttgttcttgctgattatggtaattttttaattaatgtacagatctgcagtaagaaggaaaggttgcatgttttactatccttgcttgagaaggatgcaccaaagtcagggattatatttgttgctgaacaggtattgctacttgtggattccatttactccatggcatgttgattatagtgttgctccagggtgatgggatgtgccaatttaggggttagaaattattctagagggaccaaccggccaagggacctcatgatggaccatttatgctatcctatatgcaaatacaaaatgttacttatcatagatagtctttatctgctggtatggaataattttcatttttggtacgattgaagatttaatatctgattctgtttcaatgggaatcaccagctagtccattagctgatattctttatttttatcg

SEQ ID NO: 2809 - DNA, 741 bp, Oryza sativa
cggtgaagacgtaggcgcccaacatcggcggcataataggccagccgtgcaggcgaggacaccagtcggcggcagcaaaggcaagccggtcggtgaagacgtaggcgcccaacaacggcggcataataggccagccgtgcaggcgaggacaccagtcggcggcggcgaaggcgagccggtcggtgaagacgtaggcgcccaacaacggcggcataataggccagccgtgcaggcgaggacaccagtcggcggcgacgaaggcgagccggtcggtgaagacgtaggcgcccaacaacggcggcataataggccagccgtgcaggcgaggacaccagtcggcggcggcgaaggcgagccggtcggtgaagacgtaggcgcccaacaacggcggcataataggccagccgtgcaggcgaggacaccagtcggcggcgacgaaggcgagccggtcggtgaagacgtagacgcccaacaacggcggcataataagtcagccgtgcaggcggaaataccagtcggcggcggtcgaggcggccggtcggtgaagatgtagacgcccaacaatggcggcataataagtcagccgtgcaggcggaaacaccagtcggcggcggcgaaggcaagccggtcggtgaagacgtagacgcccaacaacggcggcataaaggctagccgtgcaggcggaaacaccagtcggcggcggcgaaggcaagccagtcggtgaagacgtagggctgcagg

SEQ ID NO: 2810 - DNA, 739 bp, Oryza sativa
agtcagccgtgcaggcggaaacaccagtcggcggcggcgaaggcaagccggtcggtgaagacgtagacgcccaacaacggcggcataaaggctagccgtgcaggcggaaacaccagtcggcggcggcgaaggcaagccagtcggtgaagacgtagacgcccaacaacggcggcataaatgccagccgtgcaggcggaaacaccagtcggcggcagacgaggcggccggtcggtgaagacgtagatgcccaacaacggcggcataaaggccagccgtgcaggcggaaacaccagtcggcggcggcgaaggcaagccggtcggtgaagacgtagacgcccaacaacggcggcataataggccagccgtgcaggcgaggacaccagtcggcggcgacgaaggcaagccggtcggtgaagacgtaggcgcccaacaacggcggcataataggccagctgtgcaggcggaagcaccaatcggcagcggcgaaggcaagccggtcggtgaagacgtagacgcccaacaacggcggcataaaggccagccgtgcaggcgaggacaccagtcggcggcgacgaaggcgagccggtcggtgatgttctgactgatccattcctggagcgtaagagataagcttaaagccatgaatcccttttatgcatatctggatctggatcctgcagaacaaacatataggatgagtagtatctgatatataaatataatactcgagggggggcag

SEQ ID NO: 2811 - DNA, 3233 bp, Oryza sativa
acaggagtgctcagatcaaactgtgtagcggttcttgagacctttgtccatcttttttgcatcgtcctacaaccaaaaagggcacgaataagaaacagttattcatccaggcatataatgtaacaaagctaaggactactcacatgaacaatgaacccaatcgagtccttgtaatccagaaattctttccactgcttcccaatgcttatctgatgaagaaagagaaacaattatgttcagcttatctgacctacctaggcgaatcaaatataataatgatgtgatgaggaaccaaaaaacttgccacaagatgcatatattgcagcagtcatacaaaacgctaaaatggcaagaaaatactacaagagataacgcggacaatatagcacgaaaggaacaccaagatagaacagaacttaacgtttcaatataaaccttggttaaaatagctgcacaatgtatatagcatgatcttggccaaaataatgaaaatccccctatgacaaacttcacctggaagtttaagcaagtgcacccaaatgttgcaatcttttcaggaatatatctcttcagctatgcattgtgtatatgcagattgagagcattccacatgtacagagcaacatttggacaggctcaagacataaatagctccagataaccagatcatgccattattaatacatagtggtatttgacagcaatgacatgtaaaagtttgaatttaatgatgttgaaaactatgtggttattatctgcaggtaacaaataaattagcagcacatatcttagaaatagtacctgagcagcttcattggcagcatttttagtccagatagctattctttcctgcttgccacgcacactaacaactgctccacaaatttcatccccataatcgaattgttcgccaatcattgccaataactaagcacaggataaggtaaagaattagggagatatttgtataaaggataactgtgcaaataagtgattcaaataatgcttacagtatgcaaccacattgtgtcggactttcctctgccacagctgaaggtccatttacctccattagcacagataggatcttcccattttggctcgattttattcttaaagcaatggaagtcagctcccacaaccaacttgcttgggtgatggatattgttataaaggctgaaataccacattcaaccttattagactaaaggaatacatgaaaagatagaaggaaaaaaaatactgaagcaaattgccaaaaaataataatatttaagcgagctgttagcagaaagaaagaagccctgaagcacatgcattgatataatttgcgacaaatgacacatgttataaactgtcgagagaactcaggacgacacatgtgtcaacatacgtggactatctcagatctctgaacatgtatcaactcaggatgctcaaattactcataaaaaaatagagccacagagaattaacattctttttataaatgtcagatacataaaattcaaaatcaccaaacagaacaaaacaccatcagccaatcaccttccaagttctaatactacatggaaagtaaaagatgacaaatattcggccagaaaaaaaaaaagaaggatcatacgcattttagaaggatctgattcatgtcctttcatgatgacaatggaaaaagatatgtttatattaaatataatatctgacttagacaaaataacctagaactgaaaatagaagaacgccaataaataactggcttatgatgcagccagaaagatgtcaaaaggcacaacagcacaatgatacagcaagatcaacaaatatttctgacatgaaacatgaagggtgccaaaagcataattatgacagcaggactgtaaacaaatgcttaagtgtgaacaagcagaacacttggacacaatttgcaacacatatgcatgaagagaaaccaaagaacacccaactctgcacctcaaatgtaatgcactacaatgtaggataacacataatattgatttccccaaccatgccaagaaatcacaatcggcgtaccgacatttcaacaaacaaactctgcacaccgatttaaccacagttaggcttattaaaataaaggcataacaaatcatgtggcctgcactaagaattcaattctacagttgaccatggaataagtatttgagtttggtacttctcacttgagacgttttcttccagggtatcaatcactcaagacaaattttcctcaagacatgttgttcatctaagaacattatgatgatagcatatacagattatcaccctatactaagtaaagtttccatcaaaatagataaacaaagaaaagcatccatccacagcatgaaacataaactgatcgatgaagatgtgaaatattattctgcttaaagaaaaacactataattcacgaaaagagtgtactcctcctcaaaacaattctgcctaatctgcaaccaagtcaaaaaaaaaaaaaactagatccacattagatctcagtcctacacatgaagcctatgacatggacaaagtaaagtgggcatgagtggcaagcctaacgcatgtaatcgaatcgggttaaacagctagatggggaatctacaatactgattcatgaaggcaagggatggagaggttgtggaggggaaaagaagaggagggggggtgggaaacctccagaagtcctcgacggtggagaaggtgtggatggggcggatggagcttccccaggttgcctgcttggactttccctgcgggttgtcgaaccagaaggtccaggcgtgctcgagcgggtgcggcgcggcggggttggcctgcggcggcgcgtggccggagtcgtcgtcggcgatctccccctcctccctctcgtcagcgtcgtcggccctgccgcggccggacgacggcggccttccggcggacggcggcctcgtctcgtgctcctccgccatggatgcgggcggcggtgagggtttctgtgttgcgccttaattagctaggtcgaggtcggtgctcttcccctctcgcttctccgtctctatatctccctctccactcgtgtagtatagaagaagaacttgtattgtaccggatgcgttgggcttatcaggcccatgggcccaaataaggactatttaggaattttttttatttataattttttttattaaaagttttacaaaaataattttccattttgaaaattaacgggctgcagg

SEQ ID NO: 2812 - DNA, 746 bp, Oryza sativa
ccagcggatatatttcgttctactgcaagtagttcatcacattcacctcagtagctagctgcatgaccagagatgctagtttcggatgttcatcaggatccatacttccaaaagcaagtgccttgaagtagtaccaaaactcttcttcggatggcctcttcaccctgatgggttgggttgtcccaaacttagcaatgtcctctgttgtacctatcactacaaccttaattccaataccgggcatattctgcaaatatgattggaattttgtccaagctgcctcatccacatcccaaatgaactcaataacaaacaaatatttcccttgagaagccttggagttaagcgagagctctccggtcttcagatcgtcttctttaaagaaaaatatatgggagaagcagttgcgcaccctctcatccaggcaagcatgttgcacaagagttttctttccaatccttggtgggccaataataggaagaatgctaacatacggatcatgaggatcattgcaaagcaagaaattgatgacttgctccttctcaatacggctgccaaacatacaattctctatgtatagatatgtactgtaaggctgacgtggtagacgagggtggctaccaaggagaatgacaaattccctcatatctgcaatcttagtttctaaaccatcaacaacatcttttgatgaactactgtaccatctgattaggcgcatggtcataagctgtttctgtgtgaaaatg

SEQ ID NO: 2813 - DNA, 736 bp, Oryza sativa
  unsure (1)..(736): unsure at all n locations
gcggccccattagttnctcgttggtacagtagttcatcaaatggatccatggcgtgcgtcatgttgggggcgaagaccatggcgacgttgcggctgcccatcttgttgctccgctcctccctcgccacgtccgccatcagctgcaccgcccagtccagcagcgccgccttcgccgccggcagccgcgcgcacagcctcgcgcagtcgtcggcggactggcaccgcgtcacctccgccgccggcagcgagtccagcatcccgccggggagctcgcggaaccaggccttgatgagccccgccaggcagtgcacgtccacgccgccctccgggagcacgccggagttgagctgctcccggaccgcctgctcctgggcgtcgtcggcggcgatgcggaagatgccctccgccttcagcccgccctgctcgtagagccgccgctgcatcaggaggaggatgcatattgcctgatacagatccaaactgtcattgttgcttctgggacattggagctgaataaggaagcatgttgcttgtttacctcactgttgttcaacttaataatgtttttttttgataaaggaagcttttattaatctcagacgattacatcaagttgatagaaccatactaagaaaactcccggcctctgcataactaggatgcacacaggccaaacacacaaacccacaaaaagagttgtaacaagagaagggaagcagtaaaaatcagggagcac

SEQ ID NO: 2814 - DNA, 1660 bp, Oryza sativa
tgtgcactctctctaggacccagtaccagctttcagtgttctcgctctctacaaatgcgaaagccataggtagaacctggttgttcccatcacacccaattgctgtcaatatctgacctcggtatttacctgtcataaaagttccatctatgcatagaacaggtcgacaatgcacaaaagcattgatgcaagcacccaatgagaaaaaggctctttgcagcacactctttgttcgatcttcaaccgatgtaaatgtatgtaggtcatagtaagtattattattcctctgggcaatggtggctaacaaacgaggcaaattatcataagaagcttcaaatgtgccatacctcatctcaatgatcttttgtttggctctccaggcctttgcatagcttatggtgtacttgaatttgttctcgatgtgcctaataattgattttggttcaaagccaatgttaccaacaacactgctgtacatctcacttgccacaaaagctgaagtgatgtttcggtgatacttctccaccccttgtaagtagcacttgtgctcggtcacaatgctaactttccaataatcattccatttacccttatatgcatggacacgccacggacaatcttctttcatgcacctcacttcatacacataatttgttgacttgaccaccctaaactctctctgcaatgaaactgcccaatgcttcaccgcctccttcatctcatccttatgagcataccttgcaccctcaattacctcgttctccttatactcccagggtacatgatcaccctctgatataacaagaccagagaagtcctcatttgcccaatcagtggccattacatcaccttcctcatcggatgatgcgtcgtcctccgcttgctcattatccgaatcttccctctccatttcatcaacaattataccgactctctccccctcatccgccatgcccatggcctgctcctcccttggttgattttcctcattttgcatcgatggtccaacaacatcccctgcattgctaggaccctccacatcttcggtttgcattgaaacatttgtatctttctcttgtaccgacacaaatataacgaggggccatgaccgttcaaaagccatttccacataccgtctccaagcagcagtgctgtccatcggcattagttcccaaaaataaccttctattgcacgactcactacaacagatactgacattgtgtagacttcttggtctattctaaatcctctcaacaaccaactataaattgactgaaatgttctctccgcaggcctatcgatgcccttagatgtcattacaaaatctgacagatcaacaccatctggaccaaatctaatatttccttcaccgtgaactatctgaaatgtgaccttacttgacattgtgcctgatgaaaacaataactgcgttaacctcgcatttctgtactacgccctaagttacattctctacaatattgttctctaaatttctaaaagtaggttacattctccagatcaaactaaactacatcttacaattaacactactgtctatgtctcaattcatactattatattctatgctctggatctacacatatgtgctgtgtgctacagatctgctaaaatatatggaactaaaactaaaacgcaaca

SEQ ID NO: 2815 - DNA, 4707 bp, Oryza sativa
aaatgggtggtgagggggggcatggaattttgcaggcggcccccttgctgccctccgttagggcgattttgcactgtgcggggggccgcctgcaaatgggcggcgagggggcatggaattttgcaggcggcccccttgccgccctgggggagggcgattttgtactgtgctctatattttttttgtatataaatatcaatagttatcaaatctttttatattgaaaactatacaagattaaaatctccaagactggtaaaatacaattttattattttttagggcatatttggaatgttaccgtacaaatattttgttaatgccaaaatataagcaagttttggcactaccaaatatttggtaaggtaaaattgcatttgatcatatttggtttgctgccaaaatgtaaaattgtagtgaagaatgttgtacataatctcaattctagattacgtattaccaattaataggcttccattttcgtgtgtggtgtggtagttggaaagaagatatgaagaggttgccttcagattgtcaattatatagcgtcgttttcagtgcaatatatgtgaactcaatgagatacattattcattagatgtgacaagacgatcacgcgtgggcgtgattcactttatgtcaacaggcagcgccgaaagttgatagtgataactcgagctgccgcttttcatgtgtgctgttgtggactgtgcgcgctactggatatggcactaccgtgaagcgccgaaagtgtgttgttgtgagcataagttgttcaagcaccatatgaatgaaaagaactacgtagacgagacaaacacaagtagtactgcagtagtaatagcaaaagtagtactgctttacaagtttgtaagccaaaagaaacggtcacataaggactgaagaggtagaacactactgacgaggcctcttacccctgtccctcctaccctgcgccctaatgtgcccctgggagtacgtgagtcggtccgggggtacggcacggccaacccgtcctgcctgtacaggtgtgacctctggctgctcctgagtgtgcgcctctggagctcctccaagctgagaggagactagtacgtcctggtggtctgcaccgtgcaagtcgtcgtcgtagaactggctagtaggaccagtcctaccggcgtgagacgaagaggccccagtaccgaagatcccggctgcaaatcctgctggacaaggaccatcagtttcgtacaggtatttaacagtattaataaaaagtaaagtaccgtgtgggtgagggatcgacgctccgtgggacgaagagctggcgaacgcgcccgaagaggtggcgaacgcccctgcggagctcgcggaagcgccggtcgtgcctacgaacgcgctcgaatgcagacgaggtcctgcgatgaggaaacgtgcagttaaaacatggtgacacattcgtgcaaaagctgaaacaaaaatgaactaatatctgggctgaactgtaccgtgcgaaaccggtgctgtaggtcgcactgctccgaagctaggggcgctcgaagacaaacgaggtcctgctccgacggtaggcgcgcgaggccgtgggtgtaccggaccagctggaggtacgacgtccacggcgctgcgacaggagaagacgcgcatgaccgcacgcatcttctcctgcatccggtcgaaggtcgccctctgctcaacgtcagtcaagtgcaaacctctgttcaacctcacctggactgcggtgatatcggcactgatatcccgtgccgcatcagcctatgcaagatggaaataaaaaattcagtagttgtcctatattatgcaagataaatgacataattgttggaagtaatacaaattggacgtaccgccacgaagtagtctcggtcacggtgcgtgggatacgcgtccgtgacagcggcaacgtgcggctctggggcgtctggagtgaaggtcacacgcgaacgagtgcgaggaaggtaccagcgaaggtagtcacggtagttctcctccgtgtgtgggaagagctcgttgatcacctcctctgtagctaacacccagtcgtcaacgtactgctgtacacgtggagcccaaagtgcgcctgctagctgtccccgtcgagtcaacctgtgaagagaggtaaattgtatggctcgatgatgtaattaccataaaaatttagaaatgaacaatccgaactcacgagtggtcggcaggggggacggtcggctgcacgttgcccggaaacacctgcctaagtccgaactgtctcatcacacgctgcgggcagtgaggctcaacgaaaatgtcgaacaccatcggcaggatggtgagccagtaagcctggtcgcgtgtgcacaaggacgaaagtcctagcggtgctctcgcagcgacggcctcttctgtgtacggctcccagatgacgtcgctcggctggagacggtcaaactcgaacacgaagtccgggtaaccacgtctcacctggacgtgagcgtaacgacgctgcaataaacatgataggaattagacatgttatgtgaaggaaaaaaaagaagaggactgataaacttataacgcagcgaagttgcactaaccccacgtcgacaccagtaagtccccatcgtgggaccgtcctctggccactgcgcgctgcgaccaaccccgtagggtgcgctgtccaccactggtcgccctatggcaaacctctcggctgcccaaagctgaagcaacatagggcagccagcgatgatcgctcccgcgtcagtcttcgtgcacgcctcacagagggcacggtacgtggctgctagcacggcagaaccccagctccactgcggcacgtcctgtggctgagcatccgcgatggaccgtgcgtagtggaccagccggaagtccacagcgtgcccgtgggtgctagtgaacatcacctacccgaacaaccacaacaggtacgcctcaagggagcgtcggaccgagtaatcatcagcgtcagggtgcagaaggtccgcctacagttaagaatgaaatgttagtacaaaacactcatccggtcgcaaataagcatgtatgataataacaacttatttactacaagtgaactggagcaaccaagccttgctaagcccgactgtagagtacggaggaagggtggtggtcggtcctaggtgtggaaggcgcatcacctgctcgaagcgcgcagtgatatcctccttccacccaaaaacaccgtcgacgggaccaactggtgctcccgccagcggtagcccgagcaggtacgacacgtcctgcagtgtcggagccatctccccacagggaaggtggaacgtgtgcgtctcaggtctccagcggtctacaagagcggcaaggagtgaccggtctgcatcccaccgcttcgctgggtcacggtcgtccgccgccgcctcaacaagcctacaaagtggtagaaggcctgccgcacgcaacctgtatagagcaaacttcaaacataagtgcaaaacaaagcaaagttgagttcaaatgtgaacatacgcgtaccaaggaacgtgacgggggtcgacacgcaaccactcgcgcgacgtgcgtggacggaaggtgccgagctgtgcaccctcgactgctgacaggaacgagcggtggttcctgtcaatcccacggttcaacagcgccggtgtgtcgtacgccatacctgcatcaaataggttgatcagaaacatataaataattagttcaacataagtaataaatgttcataagcgaattactaacacatattaaacaagagtacaaacaaacaaaagtgtttagtccgaacactcatcacgataacattatgatacaacaccgaatagttcgcaatactactagtacaacaatagtcggaggtactcattacaacaagattgaattgaaattacacgatagaagtatttagtccgaacactcattacatcattttatttcctaaatcgaaagcattgttacaccatggaatcgcctgctgcgcgacgacgccttggccttgcgcgcctgcttgttgttccttcaccaggtggtcgcctaccatcacttgcctgtccagatggactagcatctgcgccgcttggaacttctgcattcttcgggcatttcttgtaagtatggccgcgcagatcacacttgctgcagcgtaaagtcctcccacctgcttctgactcatccatatcatttctgatgcgtctagtttggcgtcgaccctttttcacccttaacttagatggatctggaatataaaaaacttgggcactcagcgttgtgtaagatcctgagatcccgaacccatatatctcctcactccatgtatgaaagattgcttctttcctgaaataatttgagacgtacacattgggagatatgccacaatcaccggcagcagcaagaacgtgtgagcaaggaaggtgatgaagcttcggcttcatacaactacaggtacatccaccatccgccttcaagatacattcctgcacggcttgcttgcgatagataccacgcctgctcctatcaacacacattatttcataccgatgcacttgtgtgccttgagcaacaactctatgtctccgtgcctttttgattttatcttccatgtactttgtcactacgttgccaaacactatgttgttatcggccatggacggaccaattttcttgtatcgatccctaaagtaggcttgg

SEQ ID NO: 2816 - DNA, 504 bp, Oryza sativa
aacaggaggtgagtgctgaacaatatcattaacatcattaccaacaatttcagtttcctgatcatccacgtgctccacctgcacgctaacatattgctgctcctcatcagaaccacctggtatgacatctgtgggcaagctgtcattaaacataacagattcattgaaaacaacactcctgctcatgaatgtcttattagtttcaggattccataacttatatccttttactcctgaaccataaccaagaaacagacacttaatagctctaggctctaattttccattatcaacatgagcataagcagtgcatccaaaaactctcaactgtgaataattagcgggcataccagaccataccccaataggagttttcttattaagtgggatagaaggcgacatgttgatcaagtagcaggcggtgttagcagcctctgcccaaaaacgcttgttcatgtgaacgttggacagcatacaacgagccttggagatgattgttctgtt

SEQ ID NO: 2817 - DNA, 2933 bp, Oryza sativa
agatatgattctctacatcaaccttgtgcacatccaaatccaaaagagaataacggggtgcatatccaaatccaaaagagaatatattggtgtaatttcgattggcgacatcttagtgatgaactctcgtcgagatcgaccacaactctcgcgaatctcgccgtggaactcaataaagcatcgctaatgttagtggagacgatgcgatattgtggatgcaagacgagggtttccttgttggaataagttcatctaaggtcccttaacttgtcaataaatccaattttcgtccctcaaccagaaaaccagacacaacgggtccctcaactaccaaaaccagattaggtccctcggcggttttgagggcagttttggctgacgtggcacctacgtggctaatttaactcggtcttcatctgatgtgtcattgacatggcgcttacgtggcaattttgtcgcgaccgagaaaatttgcattttcccgaacgctagtgtattaatccccgtcccaggaaaagccggggtacaccacacaaacatgatataaaagacacatctttattatatcgataatatttacattattacaaaggcacttcaggcctgacaaacaaaaataaacagcagcggactagcgggcctatggctccatcttcacaggcgctcaactggggtataagctaggactccacctaagacttcttctccaaagcttctcttactgaaggggggaaagatagagcaagaatgagtacaaccacagtactcagcaagtcacaccgggagatgcatgattaatgcaagggggtacaaggggataataatatgggttaagttttgcagtaaacagcatttaaaagtcacttagttgcccaaagccattttaaaaagacgatcctagagctacacagtattattaatcaaggccgtgaacccgcacgaacctgccttaacccaaggcctatgatgattcagaccgaactggcaacctgaccctaggtcccagctcgtcccaagccaacccaggccaaccattccacattttagttgttaagcaggttttaagaattaaaacactaacttgggtacattgctaggcttgcccataaccgagggcgcggctattcgaatagattatactctgatcagaggtgtacatctttacccacaagacacgtcttcctcacgtgtaaccacgtgccacataccaccacggcatacggacggaagacgtgacatagtttccaacccatcctagccatagacaagagtgccgacccaaccccacctacggccggaacctccgggacaggtaggcaggactgagcccctagcagcaggacaccagccctgtgccatgacatctcgactaccgggccgcagctcgtgtagccttcatttgtcctagagatgtccatcgacccccgacttcatccatctccatccgtgtacttttgtttataaccagactgagccacaaactaagccttacccactagacatgtggaagtacggtagtgctttgcaacagaggcccgaagaccggtccttatgtggccgaggtgctactatcaaatccatgcaccccgagcctagcctaaaaccattttgagggttttgaatagagggggaggtgtgaatccaattccacaataatccaaccattccacaatgtccaagtgaaatggatattcccaaagtctagagttataaaaccacctaatgttgcctaattaaacagcgaagcatctacctaaattcatactagtggtactatgaatagagtacccactagttggggttttgtttattctagggtgaacaaggtaataataacaataacaataataataaggtcatagcaaaggtaaataggcatggctaaataaaacagtgataacgcgggaatttaaataaagctataatgcattaattcaaataaaaataattttataaactgggattcaatatattcaaggatgatgtgacttgccttgctcgctttcccaaacgtcggcttcaacctgcacgtagagcggatcttccgaagctgcagcgtctacacgaccaacggaaaggaaaaaggcttttactctaataaactccatataacaagtaggaacaaagcacaaaaatgggttcttgacttcttgaggaaaaattagagacttgaacggtccaattccgagttcaaatggccaagttatggccatttgaagtttatatgctctttaagtgaatatttgcgaatttctttatttaaattttaatttaaaaaggatttattgcgtcagccgaggagagggggcgcgcggaccgggtccacgggagtggggcccacgcggcagcctcatggtccacggtggaccgggcgcacccgggctcacaccagccggcgccgtgggccccacgcgtcagccgtacccgagggcgcgggcggctgacggctaggccccacgcggcggccacacagtgcgcccggaggcggccacgacggtgcagccggcgggaggcggcgcccgcgcccctatggtcaccggcggcggccataggcacggcggagcggcggccgagagaggggaagggaagggaagggggaaaagaggcggcggtccacggcttaccccgggtcgacggcgacgacaaaggaggcggccggagcggaggaaggcggcggcgcggctcgggtggactgggacgatggcgctccggcggtcggcgagctcggcgaggtggtggacggggtcagcggcgatgcgacgaagccggagaaggcgacgccgaggcgggagacggtcccggcgagcggagagggccggccggaggtcgtcggcgacagaggagagagaggacgacggcgcgagctcgattctggcagggagacggtgcggcaagtggcggaaacgggcgagagaggcgcggggagggtttaa

SEQ ID NO: 2818 - DNA, 6221 bp, Oryza sativa
taattcccccccccccacttaattgcacgcgggggcggcgggatgcggcggattcggcggcggcggcggcggcgctcggcgcgggcggggcggcgagagcggcgggaggacggggatgacgggtgggccccacccgtaagcgagggtggcgggcaggcccgcccgtcagcggcacgcacgcggggagagaccgaatgggctgcgggggagaggagagagaggaagggagatgggtcggattcggcccatccgaggggagagagattttagggtttttctttttataaaaaccttttcaactttttttatttcttaataattattatttgtgctctgaaaatttaagtaaaatttgagggctctttttagaccaaggagaatttaacaaaaattctccgggtcacattcgaatttttcttgtacgcattttaatgtttgccaatttctttttgaattttaattaattttattattccttttagagaatgatttttatttcgggatgaatttattaggacgtgacaaatttgatcccaaaaataataaaaaccgtgggtcctacatgtcggtctcacatagaaaataataataaaaatagtgggacccacgtgggcctgagggcactcaaccgaggccgtagaaaccagaggagaactggagaaaaacaagatgccacgcctacgctcccggcacgggacgaacccgagaaacaaaggagagagagacctatccactcctccatgcggcatcgcacctcacttcccagccactacttaccagttgccaccaccactaccacccacaccgaactaacctcgccgtggaaaccaaacccccgcgcccgaccaccacctccctcctcccacctcttcttctggccccaccgcgcgccgcggcagacctcggcacggcgcgcgtggccgtaccatgccgtgacggccggaacccgccaccgccttgatcgccgcgcatatgcaccccatggccgtggcagtggccgccggaacagccgccgtctcatgcccgcgcctcgtccccgagcgtatccccctctccgcctccgtcgccgtcacatgtggccgtggctgcggggtggcggtgagggcgcatggccaaagcgcaacgcgtcgcggagagaagctatgcgacgaccacgacggccatggtggatgccagtgcggcggctggtcgcagcagcgccgaggagcggcaacacgggaaggggtcgtggagtggagtagccagaaggaggtggtgagggcgaggagctcgcccgccgccgctcctcctctgctccgccccgccggcccgcgcccgcccgctcgtccacgcctcgccgccgaggtgctgtcccgctcgtcggcctccccgcgcgctcgccggcctcccccgagggagcacccaagatagagaggagttagctcgagccgccgcagccagggccacctccccccgccgattcctcttccgccctcaaccgccggagccgtgcctctgccgctgcgcgccgctccctcctttggccgccggccgccgcgtgccgctgcctctccgtcgcctggagagagaggagaggagagagatgaagacaggggagatggggagagaggaagaagaagatgaagggtgaggatgacatgtggggcccacgtggggcccactattccggatcgaattgccacgtaagcgctacgtcaatgccacgccagatgaagacctgagtcaaattaagccacataggcgccacgtcagccaaaaccacccttaaaaccacaaggacctaatctgcaccggttttaatagttgagggacccagtgtgtctggttttctggttgagggacgaaaatcggattcggattcgtcgacaagttaagagacctcatatgaacttatttcttccttgtttggttcgacctcgatcggggttgagtgggctgtggcggtgaaatcgagcccaaatcgacagttgcagcatggtccaaagcgagcccaaaatcaacaagaaggccggcccaaaggctgaggcccatggacagctgcagccatcaaagccgccccaccaacacaactccccacgaggccccgagcatatcatcgccttcgccgcaaagtcccaacactagcggcgaccggcgaggactccggcggcgacgtgggtgggactgagaagcgccgccgctgacaccagcgagacgaggcggcgacctccgttgacggtaacctacctaccaacctcgccattcctctccaaactgttgtgctgctgtctagatctcccacactacactagttactcctcgtagatctcggctacctggctcaagatccggggtcagatccgggtccggggattttctttgtgccctatggctgtattttggcgtctgtggctgatgacagcgtgtgttctcgagtgcggatgcaatctgagttatataggcaaatggccttgtcaactcgggcagcggcattgctttgctcagtgtgtttgaatgtgctgaaattcatgtagtaggctgtaggctgtgcatttcttgatttgcgtcttgcataattcactggtggattttctaaacctaacaagtttaaaattagaccattcaaccaaagacaggaggaataagtgaagctgttgtagtcacagcttatggccgatccaaaatttgttaggaatgtgaatatgtgatgctacaaacatatccttgtaagctaccatgctatttatcatgttccatcatggtgattggtgagcactcatgaaaaattcagatccaaacctagtgttacatgtggatttgtgctctgcaatctatcgccagtaataaaatggttgagtgatccagctactacaaaatcacattgcatactttttttttttgtagattatgcatcctggttttgggtggtgggttcctgatgtcaggaatataaatttagcctgctgatttaggtagcactgccggtgcacactttggtttttgaatacttgtagtcttccagcttcttgtagaactggtacaatgtgggccgtatataagaagggctgtcaactagcacatgctcactaattagtctaaacatttatgtttttattcattcaggtcaggtgcaatcatagaagtagttaatgacaatactttagttgttctaatattatttatgtatggactcaaattaacatgcaaaacatatgagattagtggcatgcattctttttcttaatagtggaaaatacgagataatgataactgtgaagctctgttagtactcttcattactctatttgagtggcagcatatctcatgctagccataaagcaagttctagacgtattctgttgttaattacttgtagctatataacccaacctagtcattccagcttatgtctcttagagatcatgtttattagcacctcaagatttcctctgcacagtatagtaactatcgaaaaagatattatttctttgtttttaattgacaaccttcacgtgctacttatttttgcagagtaaatctataggaaatggctgacggtgaggatatccagcctcttgtctgtgacaatggcactggaatggtcaaggtcaggaacttcatcttttaaaccatctatcatctccaagactccaactgcatttttaccaatttgaattccttaaaattttgcaggctgggtttgctggagatgatgcaccaagggctgtttttcctagcattgttggtcgtcctcgccacactggtgtcatggtagggatggggcagaaggatgcatatgttggtgacgaagcacagtccaagagaggtattctcacgttgaagtacccaattgagcatggtattgtaagcaactgggatgacatggagaagatctggcatcacactttctataatgagcttcgtgttgcacctgaggagcaccctgtgttgctcactgaagctcccttgaaccccaaagccaacagggagaaaatgacacagattatgtttgagacgttcaatgttcctgccatgtatgttgcaatccaagcagtgctttcactctatgctagtggccgaacaacaggtatgtgatgttttacttaacttctttctttccaatttcttggttcttttgcatctatagattcatttagatgagagctcggatgattaagaactattcttatacatttttaatgttggtcagtaggtgttagaattatattatctatgctcaataatagtcgtgcaattatttaatgttggtcagtgcatatggctaatgctgttttaatcaacaggtattgttctggactcgggtgatggtgtgagccatactgttcccatctatgaaggatatgcacttcctcatgcaatccttcgtctggatcttgctggccgtgacctcacggattctcttatgaagatcctcactgaaaggggttactcgttcacaacctctgccgagcgggaaattgtgagggacatcaaggaaaagcttgcatatgttgcacttgattatgagcaagagctggaaactgccaagaacagctcttcaattgagaagagctatgagctgcctgatggccaggtgattaccattggctcagagaggtttaggtgccctgaggtcctcttccaaccatccatgattggtatggagtccgctggaatccatgaaacaacctacaattccatcatgaagtgcgacgtagatatcaggaaggacctgtatggcaacgtagtgctgagtggaggcacaacaatgttccctggcatcgccgaccgtatgagcaaggagatcactgcccttgctccaagcagcatgaagatcaaggttgtcgctccacctgaacgcaagtacagtgtctggataggagggtctatcctggcttctctcagcaccttccagcaggtaagtccttatcattacagcttcttagatgctcaccagaattagttcataactacttcataaccaatccattttgtttatttgtccacaccaagttgtattttaatggttttgctaatgcacatgtgatttgtttgcttggcattgataaaaacagatgtggatatcgaaggatgagtatgatgaatctggcccagcaattgttcacaggaagtgcttctgagtttctcatgctgccctgtgcgtcggtttgtactagaggagaaatagttgcctttatgcagccataaactgcctgtgaattgtacgtcactctcttatgtggttggttgctccagatatcgttgtactatgttcttagctctgtgactgtgaggtcacctctggaacttctctggcttggttggttggatggagttgtgatagctgatagccctggtgttgtttggggtacaaactcatgtggaattttgaactatatatatccgtgtctggtcatctggtgacatgtttgatgcgtttctagtatacctaccaaagtgacaaggcattttgtcccggatggttttcgcattcttattctaagggccgtatagattacctttctttaccagacttctagttttttttttttgaaaaaagaacttttttatctgtatttcgtaaactctaaaactttttaatgttccctccatttgataaatcattttgatttatttttatagtcaaatttctttagttttgatcaaatttatagaaaaataacaacatctatacgaccaaattagtttcgttaaatataacattataatatattttgataatatgttcattttgagttaaaaatattgctatatttttctatatatttgactaaactttgaaatgtttgaataagaaaaaaattaaaacgacttataatataaaacaatatatagtaattcattggttcgtgtcctcgagtaattatcataaattcaatttcatccattatcctattttagactactctaagcatcctttggaacgaaggaaggaatttgaagaaaaaatatgggaaataaaccgatatacccatgaaatcgtatgggcccttagcaatttggtggacgaataccgccctgttaagtataagaggattaacacttaaagaggcaacgtgattagagcgttggctgcgtgattagctggtgttggttctagaagcagggcagcttaagaaggttgtacacgtgggcaaccgcccatctccttctcccttgtaatccgttggtttgattcgattcgctttcccactagccgagccccatcgatcgtattcgcg

SEQ ID NO: 2819 - DNA, 587 bp, Oryza sativa
gatcctctccccggacaactcctcgaggatcttcctgatcccttcgatgggggtgtcgtcgtagttcaacgggtcaacggagagaagcttcatcacgtagcgctagcgccttcccctacctcaagaaccccctcccgatgctggacatcgctgacggatcgtttggctccggcgccgcggcgatgtgctaggactgcggtaaccaagcaaagaaagactgtggccaccaacattgccgcacgtgttgcaaaagccgcggcttcggttgctccatccacgtcaagagcacctaggtgcccaccgctcgccgccgtgagcaccaacagctcactggctcatccccgtcttcccccgcaaccgcctctaccacagccaccgcttccgcctctgcctccaagaagccttgccttctcacctcccaaacgacgacgtcgcacaccttcacctccgatgccaccacgcccgcagctttgacaccacctccagccatcaagtaaaacgccattgataccagcgcatgttcatcaatacatacgcgcaattcggcatgtttgtctcctacgaatctacaaacagctcaaattatt

SEQ ID NO: 2820 - DNA, 683 bp, Oryza sativa
ttcctgcagcccatgtgttaaaaagtcaacggtgtcaaacgttgtgaaacgaagggagtattaatttctggagcgatggacttggcttccgctccaatcgaccatttgaccctgggaatcttggacgaccgcatgatcctctccccggactacttctcgaggatcttcctgatcccttcgctgggggtgtcatcgtaccataacggctgaactgagagaatcgatatcacgtagcgctagcgccttaccctacctaaagaacccgctcccgatgctggacatcgctgaggatcgcttggctcccgcaccgcagcgatgtgctatgactgctggaaccaaaccacgaaagactgtggccaccaacatcgccgtacgtgttgcaaaagccaccgtttctgctgctccatccatgtcaagagcacctaggtgccgaccgctcgccgccgtgagcaccatctgctcactggatcatacccgttttactctgcaaacgtctctaccacaggcaccggttcctcctctgcctccaataagccttggcgattcacctcccgaacgaccacgtcgcacaccttcacctacgatgccaccacgctcgcagttgtgacaccagcttcatccatcaagtagaacgccattgataccagcgcatgtgcattaatacatacgcgcaaattggcatg

SEQ ID NO: 2821 - DNA, 568 bp, Oryza sativa
ttcgcacgaactagacaagttcgtgtcctgaaacgagtattttacaagtctttgtgctaaattgcatccatttagcaagtgtacgtaccaccaatgcaatatactcctcctttaattttatactatggaagcaatgttttagccttagcatgtcagtgttacatactgatcctcagttgtcatttcataaaggcaatccccaggacaattaggttagatggtgatggcaagtgattgctgcaatggccaatcgaagaggtcgaatcgcttcgaagaaacgaagtcagccatcaaggcttagaactcaagaagggtgatctgtttgagatcaaaggaactgatactttacaggctagttccaatttacctcaacaaaagtattatgttttttttttgcagacactgtagttaatatggcacaccattttcttgaagcaggcagatgtggagatagattttgagctgacatccatagatgctgctgatccttttgacccttcctggcttttggacaccgagaagcattgccgagaagcagatgcatcagttcatggcggcttggggccat

SEQ ID NO: 2822 - DNA, 602 bp, Oryza sativa
caaggaataaaggggactgattcagcacatttatatcgttgttagaaccagcgacaccaaagaaagcatgccaaatccaaaggtcatatgacgcaaccgcttcaaggataattgttaggactttatagtcaccacgggtgaattgtcccctccaagctctcggacaactctcccacctccagtgcatgcaatcaatacttcctaacatacccggaaagccacgagattcattaacttgtagtatatgatctatatcctcacttgtgggccgtcgcaagtattgcccaccaaagacctcaactacccctcgtgcaaaagtgtccaagcactctaaggaagtgcttttgccaattagcaagtattcatctaaagcatcagcaggagtgccatatgctaacatacggatcgctgctgtgcacttctgaagtggagaaaggccagtgcgaccagaacaatcttctctttgagtaaagtatggagaccattgacctaaggcttgcacgatacgtaaaaagagatgctttcgcatacgaaatcttgtgcgaaacattctctcagggtagagtggctgatttgcaaagtaatcagccactagacgtcgg

SEQ ID NO: 2823 - DNA, 25622 bp, Oryza sativa
  unsure (1)..(25622): unsure at all n locations
ccagcagacaagggatgagacgatcccagaagcctgggaacatctgcaagaatacgtggccgcatgtcctcaccatggaatggacgactggctcattctgcagagtttctataatggacttactccctcatcccgggatcacctgaacgctgctactgggggtgccttcttctcaaaaccagttagaggggccattgatcttatttagaagatggtatcaaatatggatgttggtaattcttaacgtcattactagaaatataattcccagcaatggcgcagaaatactcctggtatattgtggtcacatatttcatccgcaagcgcactgatataccattgtagcatttcacctgagagtattccaagggtatcgtatttgtttaatcccgtgggaagattataatagagagaatcatagtaataatttatatgttacttgcaataaccaaagtctaagcaggggttaatattcaaagggtagagtgacacacaagcataagactactcactatcatattaaattatctgagctaagtggaaagaaaatagaaaagaatctatttctatacttctaagggtatcgtatttgtttaatcccgtgggaagattataatagagagaatcgtagtaataatttatatgttacttgcaataaccaaagtctaagcaggggttaatattcaaagggtagagtgacacacaagcataagactactcactatcaaattaaattatttgagctaagtggaaagaaaatagaaaataatctatttctatacttctagtatacatattatacatacatcctagcaataagattaactagctaatatcctctttctcatgccctcctggtactttgagaagccgcccctaactgccgagtttcttacgatagctcgtcatgactatacaaccggagctaaatacggaggaataccctccccaggaaattaactaaggattatatacatgcgcggacgaatacccgtactgagctgtcaccatcagcagcccacctctcttccacagcatataaacccaaataatgatacccagtaattagggatgaaaacggttggaaatggtcggaaacggtacattattttattatttttttcgaaaacgaacggaaacggtcgggaaatttccatatttatgaattcatctatttattgtcaacttcaatgccacactgacagaaattaaaaaaaacttaaatttgaaaacggtaacatcggtaaaaatattattattatattagttttgcggaaacggtatctgtacggtcgggaaatttccgtaccgttttcacccctaccagtaatctagacaccacgcctaaattactagatactactctaatatcctcatcatgacttagagtaattgcataagcaaacattatacctgtaccattgcatctcctggataagctagcagtttaatcaacataactcatatataaagtaaaattggtattcatatactcggaaagtattataataccagagttggatacagaagaatattctaaataaagtacaagtcttacataagaacaaaggagagctactagagccatacccgaactcttccgaagacttctggactcagacttctattctattcctactccactagcttgagaatactaaactaagcttgagagagtatgaaagagcttgcttgaggtgtgtggagaaagtgagaagaggagctccttaaataggctgccaatgacggttgtggcaattggaatggtcagaattgcccaatttttattcaacttttattccggaagttttcaaatgagtcacatttcttactgagtcaaaaaattagactaaaatatatgactaaacatactcaagatcaagatcgtgcaaagtgtgtgtgtgatatatggtggaaatgaaatctgaaaaataaagaaaatgcttctcctttgtgcttacttccttctcccaaaatccttctttttcaaacaaggaaagggcatggctacattattttctctcctttttttcatcatcacgctcatgcttgagagagcataactttattattttcataaccaagcctttccctccctcttttctcttttttttgaaaggttttcctttttaggagaagaaagcacataaaagcatggagaatttatttttggtggtagtatggaaatggaatggatagatgcttgctcccagtgtaggagtttagcatgtgcatatatgttggtgtatgatcttgatcatagagcatgagaagtatttacacaagtcacaagaatttgataaagttcaacggaattgcaagtaaccaaaatatatatggcttaatcaatatggaatatttttggctctagtaggaatttatatcaaatgaggaacttcataagttatcattttgaaaaataaaacatccggaattcgagtcaaacttagaacaggatcaaagcaactcttatttactatctcatatctcgcaacaacttagacttagatcagcaaatacagctcatttacctcaggttccaagataattgttggctactcatattcaatttttgagagagtacttacccatgaacccatacatgagagatataaaacatagcaactattcatcagttcaacaaagagaactaagttgtcttacctagcataataaaatctaacctatctttttggtattttctattttgcaaatttttatgttgtttttaggtttataaatgcaattggaaagggaaatatgcaatgtgatacaagttaccttagtggggggagagacatctccctcccaagcttggcttttgctcagggtccttgataaggattgaacccctggaagcggaagtacgcttgaaggtcatcgtgctgttgctgcatcatgttgttgatgttggtgaactgagcatcagcattctgttgccattcttgtgtttgtgctatgtgttcctcaaggttgtgttggttctctcccgtctgcatatcaagggtatccattttcctagtgatttcacccaagtcacaacgagaggaacttgagcgccattcactgggagatggaggcataccacttgatttgggggactggttgttccagactccccactgtatgtcatgaggcgcctgccaccggctctcgctggcactttcccagctcgagactccaatgctatggcgtggagcttgggtctatccgggtgcatccccagttggctcccaaacagcctcatacatctgtacgggtgttgaggacgttgaaccttcatgttcattccttgccatgttgtgtgtcttcctgtatgtgcacgagattcttctatggtatgcaggggaatagttagttcatgacagttgtacaaatgatatcccgcgttaggcaacgtgatttcatttgtacaaccagggaagaagtatatcaaagatctatctactccaggtttaagaatatgccctttcactagataactctcatcaacacagggacgagcggttggaatataagcaatttggtcattggtaaataacccctagtccctttgctatacgagtaatcaaggaagtgcactcaacaagagcagtaaatcttatactctctaaccattaccttatcatacatttcagaggagcaacgttaatcttcctaaccatggcaaacatgataaacatgataatcaattcatcctctctgataggtctaagatcacctctaggaaacaaagtcatagaaatccatttgtgcataagcctaagtgtaggattagggatatcattagtcctaggtttcttgcaaattggagcaccagaaatgtcttctcgaaatctttttttctcaaactcggaaattcctttccgaagatcgattttactgcaatcgtaaaaaccaagaagtgtacttaatcctttccatgaaagtgtatattcatcatggaaaaagcgaaaggaaattacatcttctatttctttcaaagtgcttagaaattgcaaagtaagcaaacgagaaccacgctcatctaccacaacaaatatctgccatccaacagctttccaaatagcacgaaagtcagtatccatacctatctttttcagcagcgccggagcgtatactcgcgtgtgagcatactcccggtctttcagcatgtagtaggcttgtctttcccgatcaccgacaaggtcgaggtcagcgtcgctcaagagacgttacgaaacgtcagcatcctccattgagacatcgatggatgaacgattgctagcctcatcatgatgacttgatggagagccgtgtaacttcttgaacagacggaatagttgtctcttcattctgcacaaaggaacaagaacggactaactcggcgggggttagaataacaagagtttcacccgctgtcatgccccgattttcgttcgggattaaaaatcattaaataatgcattttgtagaaattaaataaaatttaaagcaaattaatcaagtgaaataacgggagaattaaagttttcccctaaaaatcattggccgagaatatttggtaatattataatgatacaaagttcatttaatcaatttaaataaaaagaaaaataaataaattctctctttctctccctcccctcccttttgggctcggcccagttttccctccctcgggccggcctccctccttccctcctcccttctcccttttcggcccgctcggcctctctcccttgaaaagtctacatcgccccctcctggtctcccctctcactcaggctgacagatgggtcatccccaacctcaggcctacaattgtcgttgccgccatggccgcccgagccgccccacgtcgccgcttcccccacccacctcctccaccccacgcgctcttgcctggctgtgggacctcgccgcccacgtccccgctgtcctcacccactccgtcccatgaaaaccaccaccgcttccccgcgacgattccacccacgttgtgccggttactgcccctctcggccccgatcccgccgctccgagcccatataaatgatccccggagcatcctctctcttttccccatttttcccgaacctgtcacactctccctcgctctcgcaacaccgcgtcgcgcgccgccgctcgtcggcgtgctccagctgccggctcccgccgtgttggccgtcgccgcaccgcgccgagccgcacctcggcatccggtctgcctccccgtatccctatcggaaccacctccgcaccgtgtacccaagccatcaccgccgttcgctgcctccggccgccctccaccgccgcttcaaccaccgccactgctcgctgcttgcaccattggcttcgctgtcgcaagagcaaggccgaccgccggagcaccactttcgtcatcgacccaaggccgccgcctcatttgccgcctccggtcgcagattcccgcagttcctgacctcctcgcggtgcgccgtcgcttccctcggccacgcaaggaagagaagaccctcggccaccacctcctcgccgccaggagccgccgtaatgtctccccgctgagtcccgccgcaaacgccgtgctcggccagtgttcctcgccgtgccgcgacgcctctccctcctctaacccctcatctttgctcccctcggccgcacctccgccgcggtaaggagtcgctggagcgccatctccgaccccaacccgagaagcgccgccaccaatcctcgtcgtcggtcgcctccccgtcttcgcctcaccgtccccgtcctctcgatgagccccctctcccttccccgcctcctcccgtgtgcgccgccaccgcccgctgccggcgaccatcaggcgccgccgccctgctcgcccgtggccgcccggcccctttgccgtgccatgcctgcccgtggtcgcccaatcggccgccctagccgatctgggccatccacgtggcctccctatgccacctcgtgtgggtgccctcgtggcaccacgtcggcgccacctccgctcagccgttcgtcgtggccgccacgtgtctgccacgtggtgcaccgcgagccggtgcgcgcgtggacttggtccacggtgcacccgccacccgtgagtcaccgatgggtggggcccgcttgtcggcaccaacccttccccctcggctgacgccaacaattatttaataattgtgcaaaaaaatcgatattaattatagaaattcatttaaatggctcaaaacttctaaaattcatatctaattcatacgaactccatattgagccattcaacttgcaaaattcatctaaaattgagctctatatgttttataattgccatgtactgtttcatgtactgtttgcttggtttttattagagtttttcctcgttttgcgtgccagcgagtagattctgccgtttcggaagatcgtagttgtgtggaaaagagttcagaaggttgttgtgaagaagcaaggcaagtcacacattccccttgagcattttgagcctaatttacaaattttttatcatttgcaaataaacatggattgttttgctaattacatgggatcagggtttacctatatgctcgcttgttccatgtttacttgatatctgtcctttgtcaacctcgggaaataaatcgactagctcatgttacttatgtgacctagtagaaattttatgcttagccatgcttaattaccactagctcagttgatgggataattatagtattagactttctagtatcatgacaagctgcgtgctcgagacaaccggccatgtttcattggtcaagattatccaactaaaatgcaacttattggtgggctatgggtgcatggttttgctagtcgcacccatggcaattataggcgattaaggacatgtgagtccaaggccttgacggtgccttgtagccttttctcgtggtcatccaagcgtttcatgaggaggtccagcttggcagcaagcatctccgtctccttgacggtgtgcatgccttgctaacgggtctggagtcgttcctcgctccagcccatattggagaccattttctctataagatcgatggctactcgaaccgtttttgagaaaaaagctcctctagatgccgctccaggtggtcgcgagacgtaggagtgagtccatcacgaaggacattggttttgctcagtggtatgaattttgataggaatgccgtaggaatgcccaggtgttgatcgtggcatggttggcataaaaccattgcttcgttttcccaaggagggaaaatggaaacaatcgcagcctgacggcgttcggactgacacccttcatggtatacatgctgcagatctccaggaactgttgtagatgggcattggcatcctctttaggcttgctgcagaacgggctagcctgcgccatcatgattaggctggacttcagatcgaaatctacgtctcccatgttgatttacagcccagtatccacgctgtcagcagaaggagcagtgaattcacggagagttttgtcagccatagtcttgaaagttggtagcgctggtatggctggtttctttgtcaggagaattttctgcggagtgatgactcgcggcttgacgctctgaaagaaagcctctggattttccttgaagttttccggcaagttgaaaccagtcatgcactaccctgcttccacaataaaagtgaaaacaaccaaggttagcctgcaaaggacagtggttatacagaggtaaatataaagtattagtaatggtaatctctttataaatcttccccagcaacggcgccagaaattcttgttggtatttcttaatgtcattactagaaatataattcccagcaatggctcagaaatactccttgtatattatggctacagatttcatttgcaagcgcacagatataccattgtagcatttcacccaagagttttccaagagtatcatatttgtttaatcccgtgggaagaacaaaccgcaggccatggtcaaggcattagacttgcacatcacttgcgaggtctgcgggaacgctggcattcggcaaatgattgtcccaggacctgtgaagaagcaaagttcatggggaacaatggctatcatccacaaggaggccaatggtggaatcaggcccgcccattctacctaggaggcaacaacagcaacaacaataacggtaatttcaacaaaaagcttgctacttacgataaaacccttgaaaatataaatgtcaagctagaaggattctcttctgctttccaaaaccagctgagtttcaacaaaatgatagaaactcagctggcgcagctagccacgctagtacctgctaaggaatcaggaaggattccggggcaacccgaaccttccatagaaaatgtgaaggcgatcaccacgaggggaggaaaatccacttgggatccgctataccctaaccatgtagggaccaagcaagccactgaggaagcatagtcttctgatacgactgaaatagaagaggtggcacagctctacaagaccatgccgtaggagtgctgcgacaccttgctattgccttttcctcaaaggcagaagaagccctccatggacgagcaatatgctcgtttcatggatgtcatctagaagatacacatgaacatacggtcgctcatgggtgcaatgcgagtgccaacatacggtcgctatctgaaggacatcctgaataacaagaggctactgcttaccacggggatgtcaagttaacagaggagtgtagtaatgttatactccactggctcctggaaaagaagaaggatccgggttgtaccacaatctcatgctcaattgggacgcaacactggaccaggccttatgtgatcttggagcaagtgccagcgtcgtgccaaaggacattttcgagaagctgaattacacggtgttggtgccaacaccaatgaggctccgactggccgactcctctgtccgctacccagcgggcatcgccgaggatatgctagtgaagatttgggatttcttcatctaggtagacttcgtcgtgcttgacatggactcagataaggaaacatctctgatccttggacgtcgattcttaaccactgcgaaagccagtattgatgtgggagttagtagcatccggttccacaatgctctatggtcaagatcaggtatgggccgaatcctcaaaacatcaaggacgttgaggtcaagccaccaaagacggatagctagatcgctttcatgaagaacttcctgaaaaaaagaagcaaccaagaccaggccccgtccgaagaagacgctggtaaaacctggtgtacatgccaagcagcctgtgagaccggctcccaagaagccgccggccacacctaagaccaaaaaggtgtggtgggtcaaggaaaatacatccgctgcaccaccttcggagacggatgaaaaatcttcacgttgaacagctggaggtatggtcctactcatcggacctaaaatcgacgactccctcgccaataggtaaagttggtatgtatctcatattttctgagcaacatgaaagtaaaatttgtggcattcatcaatgtgactcccacacatgaagccattggaatccaacggctgaatgtggggccagtggttcggccgaaccaggcgagcaacagttaggttcctcccttttgacgccaatggctagtgggtcccacctcacagttacagctatttgatatacactacataaggggtatggccgagagaaggggttcataccattttcaactcatttccactcctcaacttttcttttgctctcaagctagttcaagctttgtctcatgttttagaatcctacatttgcatatacaagtcactttagtgcaaggctaactggtgggcagatcatcttgtgctaacttaacccccgctcgagtttgctttgtgctcttgctcttttccagtcatgaagagatggctctcctgtctgttcaagggatccggctcagaatctagccgccatcaagatgagtcaagtgatcggtcatccgccgacgtgtcgatggaggatacggacgcagtaccgcaactctagagaactccaataagtccaaaaatcatgttttggtgctttttgaactttttcgtacagctggaaaacatcgcacccacatgtgccaatatatgccaatattagcattaattgacaaaaattcgccgcgcgagtcacggagtgattttttgacacggacgtttccaatacacttcaatatgtgcaaaaatcatgtcttggtgctttttgaactttttcgttccagtgaaaaacatcacacccacgtgtgccaatattggcattaattgacaaaagttcaccgcgcgaatcacggagtcattttttgccacgaacgcacccaatacactcaaataagtccaaaaatcatgttttggtgctttttgaactttttcgttccggtgaaaaacatcgcacccacgtatgccaatattggcattaattgacaaaagtttttcgcgcgagtcatgaagtgttttttgccacgagcgcacccaatacactccaacatgtccaaaaatcatgttttggtaccttttgaactttttcgttccggtgaaaaacattgcacccacgtgtgccaatactggcattaattgactaaagttcgtcgcgcgagtcactaagtgatttttttgccacgaacgcaccctatacactccaataagtccaaaaatcatgttttggtgctttttgaactttttcattctggtgaaaaacatcgcacccacgtgtgccaatattagcattaattgacaaaagttcgccgcgggagtcacgaagtgattttttgccacgagcgcaaccaatacactccaataagtccaaaaatcatgttttggtgctttttgaaatttttcattccggtgaaaaccatcgcacccacatgtgcaaatatatgcaaatattagcattagttgacaaaagttccccacacgagtcacggagtaatttttcgacacagacgcacccaatacactccaatatgttcgaaaaatcatgttttggtgctttttaaactttttctttccggtgaaaaacatcgcatccacatgtgccaatatctaccaatattagcattaattgacaaaagttcccacgcaagtcacggagtgatttgttgacacagacgcatccaatacactccaatatgtcgtccaaaaatcatgttttggtgtttttcaaaactttttcgttccagtgaaaaacatcacacccacatgtgccaatatatgtcgataatataactaattgacaatagctcgccgcacaagtcacgaattgattttttgccatgaacgcacccaatacactataataagtccaaaaatcgtattttggagctttttgaacgtttttgttccggtgaaaaacatagcacccacgtgtgccaatattagcattaattgataaatgttcgccgtgcgagtcacgaaatgatattttgccatgaatgcacccaatatactccaataagtccaaaaatcatgttttggttctttttgaactttttcgttccggtgaaaaacatcgcacccacatgtgtcactattggcattaattgacaaaagttcacagataagtcacgaagtgttttttgccacgaatgctcccaatacactccaataagtccaaaaatcatgttttggtaatttttaaactttttcgttccaatgaaaaatattgcacacacatatgccaatatatgccaatattatcaataatcgacaaacgttcgccgcgggattcacaaagtgattttttggcacgaacgcaccccatacactccaataagtccaaaaatcgtgttttggtgctttttgaattttttcgttccggtgaaaaacattgtacccatgtgtgccaatattggaattaattgtcaaaatttcgcgagtcacgaagtgattttttgccatgagtgcatccaatattagcattaattgacaaaagttcgctgcgggagtcatgaagttattttttgccacgaacacacccgatacactgcaataagtccaaaaatcatgttttggtaatttttgaactttttcgttccagtgaaaaacattggacacagatgtgccaatatatgccaatattatcattaatcgacaaaagttcgccgcgggatttacgaagtgatcttttggcacgaacacaccccatacactccaataagtccaaaaatcatgtttaggtgccttttgaactttttcgttccggtgaaaaatattttacccacgtgtgccaatattggcattaattgactaaagttcgctgcgtgagtcactaagtgattttttgccacgaaagcacccaatacactccaataagtccaaaaatcatgtttggtgcttttcatacaaattgacagaagatcgccgcgcgagtcacgaagtgattttttgccatgagcgcatccaatacactccaataagaccaaaaatattgttttggtgccttttcagctttctcgttccggtgaaaaacatcgcacccaaatgtgctaatttatgcgaatattataattaattgacaaaagttcaccgcggaagtcatgaagtgattttttgccacgaacgcacccaatacactccaatatgtccaaaaatcatgtttttgtgctttttgaactttcttgtccggtgaaaaacattgcacccacgtgtgccaatattggcattaattgactaaagttcgctgcacgagccactaagtgattttttgccacgaaagcacccaatacactctaataagtccaaaaatcatgtttggtgcttttcgtactaattgacataagatcgccgcacaagtcacgaactgattttttgccacaaacgcacccaatacactccaatatatccaaaaatcatgttttggtacattttgatctttttcattccggtgaaaaacattgcacccacgtttgccaatatatgccaatattagcattaattgacaaaagttcgccgcgggagtcatgaagttattttttgccacgaacgcacccaatacacattaataagtccaaaaatcatgttttggtgttttttgaacnnnnnnnnnnnnnnnnnnnnnnnnnnnnnnacgtgtgccaaaattggctttaattgataaatgttcgccgcacgagtcatgaagtgatactttgccacgaccactaatggttgctcttctctagcatgaaaagtggacatgttcaattcattaatggcacactcatcttgattaattgcagcaccattaaaattacctttggttctctcttcggatgatgtaggtgcatcagtcttctcttcttccttcgtgagtgttgtagatgtcgaaattataagcacataatgatttaatttattccataaataaataatgacattgcagatgtaaactagattgaatgcatcattagatctacacatgactaagcagtaaaacatgaacagatcaaatatgcgcaacatgtcgaaccggttgctcggcaggaactactcgcggttgcgggcgtcgacgaaggcgcgcaacacgcgagcggagaggaaggcgagccgtcgcggacaaacagggagcagtcgcgcgaagcgcttcccaaaaaccttattgccgccttctcccagtgtaggacgtcgaaggcagaggttccagagacctgctctcctgatcgcaggtgcacgcctgcgagcgggatggagtagttaacagcgacggcgcagcacagaggaggaggcaaaccctagattgatttcgtgtgtgttgcgtgaaggcggcggctcggtttatatagagataggtcgcttgatcagggcgcccgcacaatctccactccgcgtaaccgaaccggataagtcgcgcgtaacttatccggactccacgccgttttcacgcaccagatttttcggaatgtttctaaaacaaaagaaatccgaatttcccgcagcaaaacaaaactgcaaaaggaggctgcatctgcgcaagggtgaagagccaattttgcagaccattcgacgcgtacgtcgtgcacgcgcgccgcctaccctgccaggccaggccaggccaggcgagcgagcgcgcgcatgtgctttccctcttctctccaccacacatgcttcaagtggctaggagggcatcctcccttttaaggaggtccccctctcctagaataagcaaggtggtactaaactccacatgcatgccatcccatgaggtgggcttttgtgattttccaaagaattaatcttcgaatgtgccttagcccatatattaattccaacaatcccccaccaaatctcaaaatcccactgagatttgcctttttccaatgtattgttaatataccagcggttcgatggagaccgattaaggttgaacatccacctagaactccaagctacacttactcacaacttgaacaatggactacgccttgaattgcaagtcttgtgcaagcaagtttcactcagagtcttatctggtactagaccgtctgtagactacccctcgggtggagcgtataagtcaaactcctaggtctttagtaagcttcctagaagattcacccaaaatttccatagactgcgaccaacagtcaagcttacaaaggtgagttctttcaagaatgctctgcaggacagcatcttcgctaattaaagccaacataactcattaaggcatagccaacctgccttgcagctcacgagagtacatgcatcttcacttagagagggtatagatcggtactctcctctagtttactaatggtttgttcttcccaggttctaattcacgggatctccgatcacatagactgggttaccaccatagtataactcacatgggtctcaaacccatctccttcgatgcattatctatcacatttcgtgatagtcccttcgtgaagggatctgccaggtttctagctgtttggatgtaatccaacattataactccggagtttctcaatttcctgacagacttcaatcgtcttttcacatgtctagacgatttcatattatccttagaactattcattttgacaattaccgtttgattgtcaaagttcataaggatagccggcaccggtttttcaacaataggcagatccattaatagatcacgcagccattctgcctcaacagtagcagtatccagtgccgtcagttctgcttccatggttgacctcgtcaaaatggtctgtttgcaagacctccacgaaacagtaccaccacctagtgtgaagacatatccactcgtggctttaatctcatccagatcagagatccagttagaatcactataaccctccagtaccgcaggatacccagtatagtgaagccctaattccatagtacctttcagatagcgcattactcgctcaagcgcacgccagtgatcatctcccggattagaggtaaaccggctcaacttgctcacggcaaaggagatatcaggcctagttgcactagccaggtacatcagcgagccaatgatttgggagtattccagtagattcctagcaattcttttgttcttgcgaagcaacaagctaggatcataatgtgttggagaaggcttactatcaatgtagccaaagcgattcaagatcttctccacataatgggactgcaaaagtgtaatcccattctcacctctaattagcttaatgtttaagataacatcaactactcccaaatccttcatatcaaaattttgagacaagaatgatttaacctcatttatcatctcaaggtttgtcccaaatatcagtatgtcgtcaacatacaagcacataataactccctcacccccaccatggcgatagtacacacatttgtttgcctcattgactgcaaagcctgcagatgtcaatgttttgtcaaatttctcatgccattgcttaggagcttgtttcagaccatacaaagacttcaacaatttgcacattttgccttcttgaccttcaactacaaacccatcaggttgatccatatagatctcctcatccagctctccattaagaaaagctgtcttaacgtccatttgatgaacgagaagaccatgtgaggctgctagggaaagtagcacacgaattgtggtcaatctagcaataggtgagtaagtgtcaaagaaatcttcgccttctttctgagtatagcccttagcaacaaccgagccttgtactttttaatagtaccgtcaagcctaagcttcttcttgaacacccacttgcaccccacaggtttacacccatagggtcgctctgtcacctcccaagtcccgttagcgataatggaatccatttcactacggacagcctccttccagtagtctgcattaggagatgcatatgcttctgaaattgacttaggagtgtcatccacgaggtacacagtgaaatcatcaccaaaggacttagccgtcctttgtctcttactccttcgagaagcttcactgacatcctcctcagtgacatgttcatgtgtatgttcagtttgttctggtggtgtgattgaactgggaattacttcagagggttggctcgaactactatgtgtatccttcattgggaaaaagctttcaaagaaggtagcatcacgagactccataattgtaccaacatgcatgtcaggtacctcagatttaactattaaaaatctataggcaatgctgtgatgagcatatcccagtaagacacactccacagtcttaggtccatgtttgcgcttcttcgttattggtacattgactttcgccaagcacccccatgtgcgcaaataagaaagtgatggttttctcccaatccatatctcatatggtgttttgtccttatttctgttaggaactatgtttaacacatgatttgaggtcaacaatgcctccccccaccatgccttaggtagtcccgcggtgtccaacatggcattcaccaagtcagtcagtgtgcggttcttcttttcagcaatcccattagactcgagagaatagggaggcgtcctctcatatataatgccatgttcttcacagaataagtcaaactcgtttgagaaaaactctccaccacgatcagacctaagcttttttatctttctgtcaagttgattttcaacttctgccttataaattttaaaatagtctagagcctcgtctttcgttttcaacaagtacacatagaaaaatctagtagcatcatcaatcaacgtcatgaaatatcgttttccacccttcgtcaacaccccattcatttcacaaagatctgaatgtaggagttctagtggtgccaagtttctctcctcggcaatcttgtgaggcttgcgaggttgcttcgattgcacacaactatggcacttagaacctttgacaatggaaaacttaggaattaaacacatgctggaaagccgagacatcaagccaaaattaatatgacataaacgtgagtgccaaacattagcctcatcatccacactgccacaaatatggttcacagacttattgcagaaatcagaaagggaaaagcgaaacaggcctccgcactcataacctttaccaataaaatatctatgtttacacatgactactttattagactcaaaaaacaacttaaatccgtctctagtcagacaggagccactaacaagattcctgtctatagaagggacatgctgcacgttcttcagctgcacgatctttcccgaggtaaacatcagatctaccgtgccaacaccatgaacagaagcatgtgacccattccccattaggacggtggaaccccgtgcgacctgataagaagaaaacaatgagatgtcagcacaaacatgtacattggccccagtatcaacccaccaattagtagactgattaattgaaaaaacagtaggaaaattaccatacccacttccatctccagtattgccaatggtcacattagtagacttagaagtctgccctgcaggtgccttcatccccttgcgctgtggacacttcctagctagatgaccaggttgcccacacacaaagcaagtcctctcatgttggttaggattgttgttgttcttcttctgcttcttgaagttggtggtctgttgagctttgtatttccccttgctcttgttcttggccttgtgcacaacattggcactgcactgcccaccatcgcccttagacgcggtgtctttttcccgagctttctcctcaacatcaagagacgctatcaacccctcaacggagtattcctgtctcttgtgtttgagtgcagtaccgaaacctctccaagatggaggtagtttcgcaataatacacccggccacaaatttgtctggtaagacacacttaaggagttcaagttccttagccatggtttgtatctcatgagcctgttcgactacagaacggttgtcagccatcttgtagtcatgaaactgctgcatgatatatagatcattgctagcatcagtagcaccgaatttagtattcagtgcatcccacaactccttagcgtcggtcatatgcatatacacctcgaccagacgatcgccaagccactaagaatgcatcccacaaagagagtagtggcctcatcaaattctttctgctgatcagcattaagaacgcccataggcttgtcagtactcacccagaagcatttcatagctgtcagccacagagtgaccctgatctgccatctcttaaagtgcacaccggtgaatttatccggcctcagcgcatcggcaaaaccagccatagtaaaatcaccgcgcctataataaggtttttggattgtcgaaattataagcacaaaatgatttaatttattccataaataaatcatgacattgaagatgtaaactagattgaatgcatcattagatctacacatgtaaactaagcagtaaaacatgaacagatcaaatatgcgcaacatgtcgaacacataccgaggtggcggaaagatcggttgctcggcaggaactactcgtggttgcgggcgtcgacgaaggcgcgcagcacgcgagcggagaggaaggcgagccgtcgcggacgaacagggagcagtctcgcgaagcgcttcccaaaaaccttattgccgccttctcccggtgcaggacgtcgaaggcagaggttccggagacttgctctcccgatcgcaggtgcacgcctgcgagcaggatggagtagttaacagcgacggcgcagtacagaggaggaggcaaaccctagattgatttcgtgtgtgttgcgtgaaggcggcggctcggtttatatagagataggtcgcttgatcagggcgcccgcacgatctccactccgcgtaaccgaaccggataagtcgcgcgtaacttatccggactccacgctgttttcacgcaccggatttttcggaatgtttctaaaacaaaacaaatccgaatttcccgcagcaaaacaaaactgcaaaaggaggctgcatctgcgcaagggtgaagagccaattttgcagaccattcgacgcgtacgtcgtgcacgcgcgccgcctaccctgccaggccaggccaggccaggcgagcgagcgcgcgcatgtgctttccctcttctctccaccacacatgcttcaagtggctaggagggcatcctcccttttaaggaggtccccctctcctagaataagcaaggtggtactaaactccacatgcatgccatcccatgaggtgggcttttgtgattttccaaagaattaatcttcgaatgggccttagcccatatattaattccaacagtagatggcatctcgatcatattgcacttctcctcatggtgaatattctgagctcccttcaaaatgtcagtaataggaggcacaagcatagctcgtttctcccttgggttctttaaaatattgctctcaacactgcaagcaagcatgaacaagtggcctatatgaatatatgtcacgttaataagcccagcttgaatatcagaattaagccctctaaaagatctagtcattttgttctcattgctttcttttaaaccactataagtgatacaaattttaaagttatgaaagtactcccgcatggttttgtcaccttgttttagttgctctaatttctcaaggagagtacgtttataatacgaaaacacaaaatttttcctcatcattgttttgcattcatcccaagtttcaagcttattgccaacagtataccaccaaaaagatgcagaaccggtacatttattattagcagccttaatcatttgagcattagagaaatcatactcatcaaattgtttgtctactgctagcagcagaatcatacttaccatcaaaaactggcaatttagattctacccttgcaagatcattatcatgtacctcatatgtgatgcatgaagaagtcgctatatctcgttgatggtgaagatgttgatgttgagcatgaccatctcgtttccccttgcgcaatcctgccatggttagtagcaaacaagaaacatacacaagaatatgcacgctcctaccaactactaggtagtggcagctgaaatatcatacacacttaagcttttcaccaagctcttacaagtacttaccaaagcaagcggaatggtgacgtacaccgactcaaccaagcaccccaatggagtttggatgtatcgatgccttggcaaacacttgttgtacgactgcaatcaaatctgtggagctctgggtaggcttaaatatgtaacaaaggaatagcaaatgctcaatctagaaaatacaaagttgaatgatcgttcaaagtcaagtaccgtgctcgtcctaggctagaatgtactagagacgcgagcctagacacaaacgatacgacaaaatagcactaggaacaatttatgcacaactctgatatatgaaagcaaactcaaagatacaactgatttttctcttttccttctttcttctttcttatttttcttttctttttcttttctttttttggtgcggcttttttttctttgtttttttacgcacctttctaccttttctcactttttttatgatttttttttaccaaaaacagacttaaggacctcaatgcaagattacagggactcaaatgtaaatataatatatacagggactcaagtgtaaaagtctagaccaaaaaaagaactatacaaaaatggaatgtggaatttatgccggttccgtttttccaaacagatctcgaaaccgacaccaaacaaaaattcaccaagctgtctaacaaatcacggtaccaattgaaaccgagacgagatgagaaggatggagtcggactttcctagtcacggtggtgatgggtgcggtaggtggaagggttcagcctgcccccccacgagtggaaaccgaatccaatcaaaaaaaactttccttttgttttctttcctttttttttcctttcaccccaccgaatccaaacagatctgctatattcgtttttgcaaacagatttccaatgcgacactcgaaaaagaaaatcaccaatgtatctatatgggaagccatgtcatagatgcaaactgagagaaaagggaggagtcgaactcactcggcctgttaatgtgaagggcaccacgaccgaataaaaggaaaagtcgcatgcaaggaaaccgaatccggttaagatagaaaccgatccaatctactaccaaaaactgatctaatctaatatcgtccttccttcttcctcacacgcaacatcacaggcgtaccatcacggcacagccactgaacagaagctatgcaactcaagaactcaaaaactaaccgacagaaacttctgaaaactacaaaaatagtaccgtggcaccaagccgattccattttcgtaggtctcgacgacaacagagacacggaggcgacgacgactatggtataaaacatgaccagaactcgaaactctaaacgaactagatgctaagaccggcaactacgactcgacgatgcaacagaaaactcaacaaagcaaaaattgaaatggacaatgcaatggcacaagtatggctaggtataggatacaattttttttgtatggcaattttctggttataggaagataaaaactcaccgagcaatgaaagctctgataccacctgatgaaccctgagctccactcgagttactcaaggctgttgttggcccgatctttcagagagttgatgataactccgatttgggagaaacattgacaacccgactataaccatactagacgttgttgtgttgcgccttagcgatcgatacacctctccgtgggttgttgatcttgccggtgtagatcaaccgtattcctataagcaaatcgaataaacaatcaagaacaagataaagccaataattgcaaataggaattgactacaaatgataagttggggttccgtaacgagtaaacaggcgatctaaccgatcacgggattacacggcaaagtagcaaagctaaactttaatctaaacaaaacccaagtaaccctgaaggggtacctacctaactataggggtgggaggacgatcaaggggtgccaatggtcgttctccacctggttggggcacaccgcacatgggccccacttgggccgaggtctcaaacanagttacaagccctaggcccaatacaggtgatgcaacaccttgtttatgtgattgcggccaaatgacatggaaattggcgacgaggctacatccattggaaagagggctccgagagctttctatcaagtactcacgggctgaaaacggaggtcgtatgtagattcggcggccgtttgaagtcaacagagtagcaggtggccgaatcggattccagcacttggaggacttcatcttgatatctccttgttcatccatgatgtgagcaatggttgtatccgtccgtagtagtcatggtcacattatcatccttgcccgtgaggggcttgttggaggcatgtcacgagggccttcggctgggtctactaaaaccacaaggaccatgaggtgttggctaagtccaagaggcaaagccataaggaaaagcagctgggcaaaactagatgatgtagaccgaagggtttgccaccaagcccactatcctgacgagccatcactacgggcgaaggccgtaaagcgaagcaggagggttttgcttgagttagaagcggcttcggcagagggcttgggagacaccgcgccccatggaggccttgcgccattaatgggctggcccaaggagttcacttaatagcccgtaaacacaaaggacactgtgtagcctcactaaagtccctatcgtaagggtatccatataaattctcctgtacaaactaaaccctatagggtatgagcctgtattaagactataaatagccccctagggccgtgtaatgggggatcctaaaaaattatcttatcgattaatatattgcttttactattccaacaatctaccgagtgaaccacgtctttcgacgtgacgcggttgtcttttgacaacaagcatgtacctcactcatgtagcatttgcagttacataagtaattaaactataactagagctatcatatatgtaggtgccctcttcttttttgttgttagaaaagaaaggaatttaaaggcaagtaagtataatgttatatctttatggttgtataatagtgagattttcacgaactggatatgtaaatttgccagcttacaatgaatttactgaagttggggtagataaagaagtgaaatattgcaaacaaatcgaggaaccatacatcaagttagagaataacaaattaaattgtagatgaaattcacctagtctagttgttgcgatagattaactcttagctttagcaaaataatccaaaaattgcttttaattggctgtcaaagtattacctaattttacccaacccaattcactgtaagcggaagtacgattgaaggtcatcgtgctgttgttgcatcatgttgttgaagttggcgaactgagcatcagcattctgttgccattcttgtgtttgtgctatgtattccgtgaggttgtactacatctctcccgtctgcacatcaagggtgttcattctccttgtgatttcacccaagttccaacaagaggaactcgagcgccatacacttggagatgaaggtattccacttgatctgggaggttggttgtccccccattgtatgtcatgaggtgcatgccaccggtcctctctggtgcttgcccagcttgagacctcgatgctgtggcgtggagcttgggtccatccgggtgcatccccaattggttcccaacctacctcatatatttgcatgggtgttgatgatgatgaactttctcgttcatttcttgccatgctgcgcgtgtccctgtatgctccacctgcacgagattcttctttggtctgcaagggaatggttagttcacagcagttgtacaaatgataccccacattcggcaatgggatttcatttgtacaaccggggaaaaagtatatcaaagatccatctactccatgtttcaaaatatgccctttcactaaataagtctcatcaatacacggacgagcggctgagataaaagcaatttggtcactaacaacccctagcccttttgctatccgagtaattagagaagtgcactcaacaggagcagagaaccttatactttctaatcattgtcttatcatacatttcacaggagcaactttgatttttctaaccatggcaaacatgataatcaattcattccccctaatgggtctaagatcacctctaggaaacaaagtcatagcaatccacttgagcatgagcctaagtgtaggattatggatatcattcgttctaggtttcttgcaaattggagcaccagaaatatctttgttggtatttcttaacggcattactgatcgataacgaccgtcaacaatcttcccaaaacctattttccttgaacctagaaattcctttctggagatcgattttaaaggaatcgtgaaaaccaagaagtgtactcaatcctttccatgtaagtgtatactttttatggaaaaagcgaaaggaaattccatcttctatttctttcaaagtgcacagaaattgcaaagtaagaaaatgagaaccaggctcatctaccatagcaaatctctgccaaccaatagctttccaaatagcacgaaaataaccatccatacctatctttttcagcagctccggagcgtattctcgcatgtgagcatactcccggtcactcagcatgtagtaggcttgtctttcccgatcactgacaagatcgaggtcggtgtcgttcaggagacgtcgcagagctttggcgtcctccatcgagacatcaactgacgaacgagcactagactcatcatgatgacttgacgaagagccggaccccttgaacaaacgagacaatcgcctcctcattctgcacaacggagcaagaacggactaactcggcgggggtcagaatagcaagagtttcacccgccgattagtttcaccaaagcaacttgtatatatgcaactaagaatttgaatttgagggacactatcaaaccttgaatgaacttgagagcaaacattggagagggaatgaaaatgtgttgaaatggggtgg

SEQ ID NO: 2824 - DNA, 700 bp, Oryza sativa
acaaagttacaagcccattggcccaatacaggagacgcagcaccttgcttttgtgattgcggccaaacgagatagatttccgagatgaggctggatccgttggaaggaggacttcgagagctttccatcaagtactcacgggcccaaaacggagcacgtatgtagatttggcggccgtttgaagtcagcaatgtaacacgtggccgggcccaaaacggagcacgtatgtagatttggcggccgtttgaagtcagcaatgtaacacgtggccgaatcagattgcagcacatggaggacttgatcttgatgtcttcttgttgattcatgatgtgagcaatggtcgtacccatagtagccatggtcacatcatcctccccttcttcacagaaaaccgtcctcggtttttccatatggtgctcttcgcgcagtccactgaaaacaacctgtttcttgcaatcaaaacaagacaaactcgagacaatatgattagcagtaacatgtctctctagcttgcatattttatccggaactacaagatgttctaaatctgaacaaatgtaaactctatgcaccaaaaatattcctctatcattatattcgccaaagatatgaaaaatagcattagttggacatggcaaatcatatataacaaataatttctccttcaaattatcgagctcacaaaaatcatcaaactgaa

SEQ ID NO: 2825 - DNA, 17026 bp, Oryza sativa
  unsure (1)..(17026): unsure at all n locations
gttgggttcgcccggccaaggtcaacctcgtccaacccctcctccgtcgaggttcgccgccggagcccaaccccgtcgtgcgccggggagtgacgccatggccgccgcctttctgccggcgccctcgccctctcgcactctcctctctccctctaacccctctccttttgttcgttaggaggttccggagctcgtcccgccgtcgccatcgtcctccgtcgctcgccgtcgtcgatcgttgtcggtgaggtctctcctcctctttctctctctcccgcaccgtttagccgtcgcgccgccgcttagccgcgtagctgccgcttcgccgagacgccgccgctctccgccgccggtcggtcgccgccggccgccgtcttgcgccgctgccgcatgcgcgccgcgccgtcgcgcgccatggccgccgggccggtttgcgccgtgcccgcgcgcaccggccacgagctcccgccgccgtccgatctacccttggctagattggggccatcggttcggctgtcgcgtggccgccgagaggtgcgccgctcctccccggtccgtggacccgatccgccgtggaccgccctccccgagtcactgccatgcgggtcccgcttgccggcgccccttcctccctctcccgagccgctgaccggtggggcccgcttgccggcgccgcgccccgccttgatgacgtcagccctggaatatattgcgcaataaatgatttaaggttttttcttgtatagtaataaacacagtgattcttttaaattcatnctaattaatcgaagttccccttaaccccattcaagtctcagtaaatcaagaaaaatgtgtagaatccattaaaaatggttttgtttcctgtttcagtagtcttatagcctgtttgcaatgtttgccttgtatgtcgctagattccggctctcccgacgctccggtgtacttcgagatagtcgccgaggttcctccagcagcagagcaaggcaagtcatgcttgtcacttgaatatgttgatcctatattgcaaatgctctattgttttctttcaaatattgcattgttttataatgatactatgggttgtttacctattgtcgtagccatgctgttgatgtaccatgtttctttgtcaacttggggttctaacatgattagagttaggactagggattgcttagccatgcctagttcaactagttcacattggggaaaatcctattaatgtttagactgttggttctaatagttttgttggattagtgacaccgctttggtgttggttaattaaaataaatcacatggtgggctgtgggtgcatggttttgctggtcgcacccatggcagttaaggaccggttcgcgggatgccctggaagaacttatcgtacttaccacaagccagcgtgggcaacggctgggcttgtagtgtagctctcctctagtcgacgcatccaggcaagggtgggcgtgatggagcggggcgggccctgcgacggcctctgtcgcttccggattcacctaggcacgagaggggactgcccgttgcccgctggggacgggggtgaaacctgaggtgtggtgtgcttggctagagggggttatgcgaagggtcctgtcacggcctctttccgatatgtcgtggtggcatgtcggcgcacggaaacgtgtcgtggggctgtgtcttgtggatacagttgtacacctctgatcagagtaaaactattcgaatagccgtgcccgcggttatgggcggtcaaccagattcaccgtgattagtctcaccctagtgtaatcttttgaatttggataatttaggtggatggttgggcctgtcgcaatgtgggttagcgttggacagtggatagttgatactaattaattattacaactgtttaaatctttcaacttctgtttataaatgctcgctttatgcaaatgaaccacttcagctcttctttgatgattccctgcatcatacccctattccggtatgacttgctgagtacagtgggtagtactcagtcttgctctacttttcccaaccccagagttcgagttcgggtcagatgaaggtttctccgaggagtaggcttcgtccgtgccgtcgaggatgcctgtggagtggtgttcctgctgcagttttagtcaaggcttagctcctgttgtctttcttttcttccgctgcatttatgtaagacttttatgatgtttgtaagacgtggatctgaatgtcaacattgtcgtttgtgtacccaggctggtcctggacggggaatttaatgcacattctgcttgaaattctattcgggaatttctgggcgtgacaacagtgtagtgcatgactggtttcaacttgccaaaaaactttaaggaaaatccagaagctttcttccggagcgtcaagccgcaagtcgtcgctccgcagaaaactctaccgacaaagaaaccagccataccagctccaccgaccttcaagactatggctgacaagaccctctatgaattcgctgctccctctactgacaatgtggacattgggctgcagatcaacatgggagatgtggatttcgatctgaagtccagcctcatcacgatggcgcaggctagcccgttctgcggcatgcctaacgaggatgccaatgctcatttgcagtagttcctggagatctgtagcacgtacaccatgaagggtgtcagttcggacaccgtcaggctgcggctgtttccgttttccctcctcgggaaggcgaagcagtggttttatgccaaccgtgctactatcaacacctgggacagatgctctacgacattcctctcgaagttctttccgatgggcaaaaccaacgcccttcatggaagaattccaagtttccagcagacaagggacgagtccattcctaaagcatgggaacaaattcaggaatacgtggccgcctgtcctcatcatgggatggacgactggctgatcctgcagaacttctacaatggactcactcccatgtcccgtgaccacctggacgcggcagctggaggagccttcttctctaagatggttcgaggagccattgatctaatagagaagatggtctccaatatgggttggagcgaggaacgactccaaacccgtcggcgatgcatgtacaccgtcaaggagacagaaatgcttgctaccaagctggacctcctcaggaagcaattggacgatcacgacaaacggtcacaaggcaccgtcaaagccttggacttacacgtcacgtgtgaggtctacggcagcacaggtcattctgggaataactgcctggaaacccgtgaagaggtgatgtacatgggcaacaacaacaacaacgggtatcgtccacaaggagtcaggggtggaaccagccatgcccatactatcaaggaggtaacaataacggtaatttttctaaccaaccctccttgaaggatatcgtctttgcgcaagctaaaaccactgatgctttaagcaaaaagctagctgccaatgacaaggtcatagaaaacattaatgtcaaactagatggcttcgcttctgcttttcaaaactagctgagctttaataagatgatagaaacccagctagctcaattgacttcattagtacctgcaaatgaatctgggaggattctggggcagcccgactcctccattgaaaatgtcaaggcgatcacaacaaggggaggtaagtccactcgtgatccgccatatcctaacactaggagctaacggtatctccaaggaagcgccatctagaaatttggctgacgaagaggttcagccagagaagactgccgacgagtgatactcacagacaggaagaatagggtattggggtacgttggagcagggatctacgtagtacgacatcaaaacagacaaaagacaaggattatactagttcagaccccttatcaggtaatagccctagtctagtttatatgggattgatgacgatgagaacagattacaaagagagtaatcgaacaggtgataccgatgagatcgtagtcgagggattcgacaagatctccccggcgagttggctccgtggactccggcttcgtgaactttggtgggtgtgttggcgaagagatgcgatgtcctttgcctctcccatggggtcccttttatatcgtgggataccttgaccctcaagtaagacttggagatatgtaaaccgacacgatatactagagattttaccctctccgagtaggacttctgcaattccttaacttcgtggagatattttccataatttgaggcgaattcctaacggcgtatacggaaaccaaccgtatacgtgaaggtataccttatcggtatattccataagtcgtaggatagagggtatgcttatccgtaaccctgacagtagcccccgacttcaatttaaatgaattatgtgctcgcacgcgacttctcctgatggagcgttgtcgtactcgttggatcgatctcggttatataaccgtagagacatagagttatcgataacgctttcagggagcctatatgtgcgggttttgaatttaaattgaagtctgaacaacggtccccaatgggcctcagaaattttcggcgaaaatctctcccctttcctcgaaatacgaaccatcagatagtgcgcctatttaatgggattttgggatccatttcgagtccgtttgccaaaaactctcactgttccccagcttccccggactctccgtctccccaatctcctacaccctccatcagcgatcttcttccggcaatctcccccaatggcggacctcgagcaatcttcctccgatgccgccgcgctaaagaagctgtacaccggaggagccgtccctccaaggcaaaccatggcgagggaggtaggaggtactgtcccttctcccgttttaggtcgtatggtagcggtagaggatttcatctgatgtggctttctacctcctccttccgaattcctcttgctgatattaaacttctacgacatttctcttttgcacctaaaccccaactccatcgcttttctgagcatatttgttcatctttgcgaggcctacattggggtagtgcctttccttataaaaagcgaaagcgctggacattaagttgtcgcgtaagtttctatccactatgattttacaattgcattaattgaggcagaagaatgactatagcctcctcggttgtacatattcctaaatggcttattagaaaataaaaattaatttatagataaaacttatatatatttgtttatagcgacttaaaagccaacgctacaaagaaattgcgttgaaaatatcataaaattaacttcataattgacgtttgctttggtttattaggcaaatcgatgaggctccttgttgactaccaatatacgtggaataatggaatattgttaggatgcttccctaaccacaagtgtacgttcaggttaattttgtgagggaaaagttttgcttagtctccataattttcttattttagaaacctttcgaatatttgaaatttgatgaagattttatggaaacaaaatatccatggagctaacagaaatttaaaattaatatttcagactatcgacaacgagacacttataatgagttaatccatgtagttaatagaacattaaaatccactcctaacagaaaataagatccagaaagtattttgttgtcatgctacttttgatgaaatggcgagtcaaaaggataaaagtataacgagaacaattattggcgctagaaatcgcgggaaaatatttttggcggcaagccaaagtgtatttcgcgccaaaagggcaaagcgatataaaccaaactcgccaatccaggaggcgagagagactgagagcgagagatggaaccgtctgtgagaagggagcgcggcgccgtcaagaagccgacgatctcgtcgccgttcgacgccgtcagtgaggatctcctccgactccctaacatggcgtcactcgtcaacgccgccctcgcctgcaagcgctggcgccgcgcggcttccgaccccgccattttccggcgcttcttcccgctccgccgccccccgctcatcggcttcatcctgaccgaccgcggcgactccgtcccctacagctgccccaaccactacttcgtcagcgccaccacccgtaagcccaacctggcgtccgccgccgccgattgcgacatcttcttcgaagacgtccctgatatcgattcgggcgagcaacgcggcggtggctacttcgacgagtggcgcctccgcggctgcgacggcggtcgcctcctcctgtcccgcggctgcggcgggtttgactcgccgtctacgatcccctcgcgcggactgccatcttcttctccgccgcaaaacttccatgggtcgttcctcaaggtcaggtacgcgattgtcgtcgacgacgccgacgcctcgttccgggtcatcggcatcgacggcgacatgttcttcgccgtcttctcctccagcaccggtaaatgggccttgttcgaccacacggcagacctgtacgaattcacccgcagcgacggcatgcccgccggccggttcgtgtactggcggtccaacaacaagaagtgcaggtactacgacaacgacgagcggatcttactgctcgacgtagccaccatggagtggacggtcaccgtggcgccgtttccggtggggtagtcgtactgcatcgccgacttggcggagcacggccggctgtgcctcgtgtccagcaaggaacaaaaccttcagctctgggtccgcagcggcagcagcaatggtggatggagatctcgctgttggatcagttcgggtacttgaagaagctgcggcgtgaggagtggatgaagagggtgcgtgtcctggcagcaaaggctggttatgtctacatggagttctggtccatcaggaagcccaattcctatcttctcgtcctcaacctgaacaccatgaagctggacatcatttgcaacgatgcggacgagcctttcaggggtcctgcacttccattcttcttccgtttggcacctctggcaccaagcccggatgataccaacgatcttcacgttccatctgcatctgcttgatggagtagtaggtaatgttctgtctaatttgtttgtcagattgctccgaaaccaaacctgctcaaccggatcaaagcactaagttctggggattttttttagcaaacgcactgaattcgggactgagatttggtttcggagctctatgttcaaaactcattttccaaaagttatttgatattcttttagggaatgcgcataggcagtcgcaccatttgtattaagagttcataggagagtttagataacatccaacaacccaaaaaacataaaattatttgatatttgtcctgaacctaatactctaatagtacttcagtgcttggttgctgacggctgagcatggcatcccttttaggagaacaatgcctgatttccttagaaatagttctggcttcctctcttggatgacttcggtgtgtagatgtagttacgacactaggcaggcgtcaggccccatacattgtcttacgactttacggagacctgtctatttggcggctaagaaatacggagtaagatgccaattgaacataaattgccttcaaatattagtctgacgctttacgaattcattttcttcttatagtcatggaacattttgctttgacaggtggacagcgataaagtcgtggctggcttcgtcctgcggtcgaaagagtgaatgctatatatcttctggaatttagctggcatatacgtccattgatcttttggtttcggtctgttggatagggtagtgttggcttaatgttgtctaatcttttggctattagatggagaactgttagctgtcttgttaagttggtaaccccagccttttatgttgccttaaaactcctattcagctttcaatagaagctggggtgatatccctttatcaaaaaaggaagtgcttaaccatttcacttttatgattggataacatttggcaactaggtccatcttctctttggggattagcttgtccaagcaatgatcaacgtatttgaaagtattcagttttgctagcttgtggctatggtaaaagagaatttctatgatatgccgtcaacaaagactagtcccttttgttccatctatgcaagtgcaccgttaaatgcccttatgtgcttggaaatgttcaatcagtgttgtgagtgtaagacaactgtcaaatgttcaggcactgagctgagcagcaggtaattgattttttgtctaggttataggttaaaagttcagttcgtagtctttagttggccgcaacagaatttttttttaacagaacacatttcagctctgttggttttaacgaatatacctgcttaacttgtttgatatgcccaacagaaaatactgacatgttacaatcatttttgcgttttcttgcaagttgcaaatagttcagcataattaagctagtaccattttgacaaggaagcgcacttgacaaaatttgggcttatctgtctttagaaacaattttgtagtctgaaacttgcgtggaattgacagccatcacaccgtgcagtcgcgccaggaaagttgcataaacatccagcccattttattgcaaaaacaccatccagcccattttaacactgctagagcgaaattgctacccccactcttcccttttgtcttcccacttcgaactatcctaagaagctgctcaagtcggactcagcttatagccacgtgtggagcgcgacctgtctggtatagtggactacaatccatacataaaggaataagccgtgtcaacgactcacatgagttaggtggtgtttttttgggggataagcttatttaacacctctcaaatattacgtttatctaaaacacatcctccaactttaaaatcggatatccaacacccttcaactgtttaacatttcaatttactcccatcatctaaactaggtggtttttactgatgtggtaattcagtcagcaaaataatatagaactgtggaacctatttgtcagaccaagccttctctttctctcttcctttctcaatctctcctctccctcatgacgcacgggattacaatacgagtgccgccagcttggcaccaaaagcctccctgtggtctggagggttgccaacgtgctccttctcgacgaccgccagagttggaatcctcccgagggataccgccgtccaaaaagaaagatggatttagcaagcttgagctcgaggccaccctgttgacacagtcttctccaacatcagcaagggagggcactgtatttgggactcagggatcgagcgccatgccctattgatcccgttttctccgacctcgacagccatgcctcgagcccaccgtgtcgtgacagtgcgactagggcccagtgtcggggtagccatccagaccctacctacatcaccgccccgtcgatctcgacaccaccgccggatatacgccaccacgccgtcggcaccacatccctgtcctcttctccgcctttggttccttgtctctgactagaggcattgacgattgggcagaagtcatcttctccgttgtgcccacggaacccctccatggtcgcttgtcgctgcctctacctagtcctctgctgatttcaacccatcgtcgctcgatcacacaacaggagagaggaggtagggagctcaacggggatggagtaagggaggaggcggaggacgaggggagagagagcttgctaggagctgttgctcgtgtattatggagcttgtcgagagaggtagtagaggggagggtggggcgggggggaggaatagagagcatgggactaactagtgggatcgcatattgacgtggactacttgttgaggtggcatccatcgtggcttccaattataccaaaaatagccccaaaaatcatgctagggtgtaaaatatacgatattggtagtttaggagtgacatatacccggtttcgcagtttagagaacacaaaagtagagggggaataaaatgtacttatcaattttttaaacagaattaatgagtaatagggtgaaccgtaataattggcatagtttatgcaactttgaaaaacgaacccgaatattctcaacgatattattttcaccaaaaataaactgcagtcgagcatgtatacatggctcagaccaaacatcagttattttatatctaaatcttgattttttttctagaaaaaaagcggactaaaaaaaacatgattaataaaataactagccgttaacgccttcaattccagaatccccatcccaaacgtctcaaaacctcgtcaagaacctgaaaccaaaaattctctctcgcctcgcgcgaaatctcccgtcgatccaccgcggggacaagctctagatctctctcctacgatccaccacgcggagaagctctcgatctctctccttcgatcgatagtttcgtcgcgctaagtcggtggtgatctgatctccgcgttctttcgggggagtttcttgctaggtttttctgggccgagctcgcccatggaggcgccgggctccggctcggtcccaacggcgaagcgccgccggctcgtgccacggcctccgccggtgccgcttgaggtggccggcgcgaggggcccgtacatgccgccgctatgtattaaatccaagaacccgtccgcgaaatgctacgtgagttgctgcaaatgactccccttttcttagcttcttcccccaagttgaattcttggatggatttccgtccgctcgttcgggcctgatggaatgtgtggaaggaatccgttgatgccgcaattatggatgttttaggacttaggaggttctcgatgtcgttcttgataatccgagagatagatttgctctgactcaattttagatgattcgctgattcttgatgtctgcagagccaattatattggtctttgttggcttgttttagatgttgaaattttgtagaggaatctgtgatccgtgccccaatcctggaatgaggaaatgttaatgatgtgggaatataattgatcatgcatgattctttttagagtgcaaaagaaattcgaaatcttggtgattttgtcctatactcaatctgttttttggccaaaaattttgtcaaaagaaaatagtcagtgtaacttgttcagaaccaagttcattcgtcagttgcatcaatattcatcatcaatgttcgaagaaacctagcacaatagtcgagtggaagacaatgccaagtttgccaacattagttacataatccatgccaagcataaatcacagaatctagataacctttagtaatcgatattattcctggacctcaataatatgtttttgaagtaatatactgaatacgctgttcttttgttaaacatgacagtgagaattgctcgtaggtcccaatcctgattttcctttgtattcctcaattttggggttgtcctttcacataaaaatcggtatgaatcagtccagtgttctgttaagcttttttgtggacaaatcgattgtgtgcaataaaaaaacaggtacaaactgttcttgatgttttgacaccaacagtatttctcttcagtgaagtactgaaattttcagtcatgtaggaattgttttcttcttgtgtcacaaattcaatcttgtctcttcaatatttgaactttcaacatagtaatcattgaagtatagttgatagtgcaatggtgcttagacttgtgactagtgttattattttgtattagatcttcaaagtggtaagatgactaatttgtatttctatatttatggtgacagggtgacagattcatacctgataggtcagcaatggacatggatatggcatatttcctcctgacagaacctaagaaggagaaggaaaatactgacatgctatcaccagctgaagaagcttacaagaggcttcttgccgagaaactcctgaacaacagaagccggattcttgcattcaggaacaaaccaccagaacctgaaggaattgtgcaacagctattatatgaaactttgacttccagtcagacaaagcctgctaggaagtgtagacacataccccaggtatgcaaattaatttgttgcttcaaacatatttttaggattttttttaatatacatcattcttagcttagcttaaattttcagtcttctgagaggacgttagatgcccctgggattgttgatgacttctatcttaacatattggactggggatgcaaaaatgtgatgtccattgcgcttgggaacaccttgtacctctggaattcagctgatggatctattatggaccttgtaacaattgacgaagatgatggtcccatcactagtgttagctggtcttgtgatgggcagtggattgccgttggcctcaactcttctgacattcagctgtgggacaccagctctaatcgcatggtcagttatctagagttctagacacttgctctgtattgtaagcagattaacttgtactgatagatatgcatatgtataaatgtggcagctgagaacacttcatggtgtacaccaatcaagggttggttcactggcctggaacaagaacatactgacaactggtggaatggatggaaacattgtaaacaatgatgtcaggatgagatcccatgttgttcatatatatcgagggcatgaggatgaggtatgtgggttgagatggtcaggaagtggccagcaattggcaagtggtggcaacgacaacctggtgcacatatgggatgtatcaatggcatcttctaatctatctctaggtcataaccggtggcttcatagatttggcgatcatttagctgcagtgaaggcccttgcatggtgtccgttccagagcaatttgcttgcatctggtggtggtggagatgatcggtgcatcaggttttggaatacacacactggtttatgtttgaattctgttgatactggatcacaggtgtgcggactactctggaataagaatgaaaaggagctgctaagtgctcacggatatgtacagaattcacttgcattgtggaaatacccttcaatggttaaattggcagaacttgaagaccacactgctcgtgttctttgcctggctcaggtatatctctttctattgtggtatagtaatgatgagtaattgcttatgatttgtttgctgatttcgtttttatgctatatggttgcagagccctgatggatttacagtagcctctgttgcagcagatgagactctaaggttatggaaaatttttgaaacttctgaagatgccaaacccgtattcaagacagtaaacactggaatgtttaacagtttcagccatatcagatgaggtatgctcaattgtactccgcatcgactgtatgttgtgaatcgctgaatcctaaaagggtatcgaaaatatgtatgttctgattggactttcgaaaataagtttacaattgatgaatattctttattagttcttttcattcgttaatcacaaaagcaagtatgctaattgtttaaggattttgtgccaggtgaaaaatgccattttagtgtagatattgacagcaaatcctatctgatttgttttcagcatttcttttcacaacaataaccgtgatgttttccatactttcaaaagattgttataataaaacatttacattgttttccacatacatactgtctgttttatctgtgacattcttttgtcgtattttgttgagagcaataagtcttgtttgtatattggtttcttcgtaagaaaattgtactagtaagttttaccagagtccacaaggatgttttatctgcaattactgttgcactataatgaatttataatcaattattgatacagtttgtccttgtcttccaggataatgtgagagttggaccgtggggaactgactgttcatattttcaggatctcatagcattagttgtaaccatggtcaccggtacgaaaggtggagaactggacatgccagagcttcatgtgtatatatacgtttcatttttttttgcatctggatgataaatgttttctggccggcctactttcttttctgtgctaggctgacaagaaactgtaattggccatttcttttatttgctaggctcacagaaactgtaatcaaaagcaaccgttcatttcatgttggtgtattggttcttgatgccatcatgctactgatttgtttggcaatagatactgccttcgttccataaagaacgagcatagtactccctccgtcatattttaagcgcaaccatgaatctctgtgtccaattttaaccgtatgttttatttaattttttaaaaaaaattaaaacataagttatgcacaaggtattatttatattttatcatctaataacaataaaaatactaatcataaaaaaaatttaaataaaacgggcgatcaaagttggacacgtaaactcatcgctgcgcttaaaatgggacgaaggtagtacaagatatgacacattgatacatcgtaatactatatatgtatgtatgttcagatttatggactaagggagtatgtaataatatctggatgctagtatcttttcctatgtgcagtagagatgttgctatgtttatttctgagcgtgattgtattgcaccagacacatttgcgcgagaatgtttcgtttagatattaccctatgtttgagagtagttttgacatttttttacttgttcatttacaaagaaaaaattcggttccagtgtgctgttactgttgttcacacatttgatcgttagttaatttgagaccacgtacaccgtgagatactgaggttgggcaggaaatagctttcactggtgctgactttctcgaccatagatagatatcagtatccctttcatcttgattgtttctatctacgtaaactgcggcaaaattttattaatcctacttaccacaacgattgtgacgacacatgcatctaccaatctgttggcgttcgacgtaaccagtgactgagtacgtacgtacgtacgtagtgatcgatcagggggcaaaataaaagtgtgtgtgcatatatatatatatatatatatatatatatatatatatatatatatatatatatatatatatatatatataggtaaattaactggtgctacatggagtattggctccaagattcaaattaagtatatacccaatttaaatgagtgtgaattttttttaaatgtttagatatgaacattaacttctttactaacaagttcaaacaagattgaactgagtttaaactttttttttggttagattttggttctaggtatataacatccaaacatataattcgttaggtatgtaataatgaattgtgaaataaagttgagtttgagttgttttgttgttaggtatttgtatgaatcaaattcatatacctagatatcgacttacaatttgtaaatttttaaaaatttgagagaatttgtgtgttttataccttagagcccgggcaccatggagtcccatatgggcatcctatatatatatatatatatatatatatatatatatatatatatatatatatatatatatatatatatatatagcaaatctattctacacccctcccctagaataactattctacaccccctctcccatggaccactcccacctcccccactcttcctagggcccaaatcccccctcccacctcagtcaaagactggtcaaagccccctcccaccggtcaaacccgcccattgactccctcccccgcccacctctttgctgttcatgtctcgcagaaattccgcagtaacataatggtcatcgtgcagtaacatgacaactttctcgcagttacaatattgaaaaatagtcaagatggatctagttttgttaagcactattttacgaacatcatggtgcagacggattagaaaaatactatataacatgagagatattgctctctaaagattgagatttaccctttttttttaagctctcgtctctttagaacagcgttgtaacacaacattcaatgtgcagtaacatgattactttccgcagtaacaacattataaaagcatttttgtctcgatcatcgtgtagtaataggactattgtctcgttgcaatctcgttttaaagcattatggtaaaaatggttctaaaaaataatatgcaatgtgagagatattattttttacagattagaattctaaaagtttatttgtactaagctttgctactatgtatctttgtatggacaaagagaagtacttttagcactttgtgttaacttgtgaccatacacatatacttttttagcacttatattttgcacaaagattggatttaaaaatttaactatgcacaagcagtggtactgtggtaataccattactaccatatgttctttgttactacaatttcatcacgatgttactgtagaatgtgcagtaacggcttataaatttcgcagtatatcgtgttactgcacttttacgataatgtaactaccgaatcatagtaacaagatatgattcgtacagtaacataatgggcttgtgttcataaaatttgggcttgtgttcacaaaatttgaacagatatatagagaaagcaaagaatgatctcaaatcatatagtgtcatagggtgaattggttaggagagtttgctttgaacaataagatcatgagttctagtcttgaattcaccaattttttttaatttttctagaaaatagaaggaaaaatgagagatgggagagagatcgggatggggaagaagagaaaaagcgaaggaaaaaacggagagagagatggatgaagcggagaagggagagagagagagatcgggatcgagagggcagtggggccgggcgtgcaaaaacggaggagagagatataggtaggaggcggggcgggcgcgcccgtgcgcgattgggagagatgcagggccgggcgtgatcgggagggag

SEQ ID NO: 2826 - DNA, 908 bp, Oryza sativa
aatgtcacctcccttgtaacttcaacaatactagaggttttgttgaagacacggtaggcatgtgcatttgactcatagccaagtaagaatcctcgtccaccttaggtgagaacttagatgaacaaggcctcttactcaaaataaagcatctactcccaaagacacgaaaataggaaacatttggtttcttaccactcaagagctcatatgaagttttctttagaattttgtggaggtataggcgattgatggcatggcatgcggtgctcacggcctccgcccaaaagatatccgaagtcttgtactcatcaagcattgctcttgtggcttcaataagagttcggttcttcctctcaacaatgccattttgaggaggatcatagggggcgaagaactcgtgcttgattcccacttcatcaaggaatacctccacttgtgtgttcttgaattctcctccattgtcatacccccctcaattttccggggttaaacttcgtaccctcttgatggtgagatcatagaggttttgggcttgcttggcgaagcgcttgaagacatcttgagcctcactcttgtcatagagaaaatacacccaagtgaagcgggaaaaatcatcaacaatgacaaaaccatacttgttacctccaatacttatgtaagccacgggcccaaataaatccatatgtagaagctcaagagggcgtgttgtagtcatgatgttcttgataggatgtggattcccaacttgttttccggcttggcaagcactacacacacgatctttctcaaatgtgacattagtgagcccgaggatgtgttccccctttagaagagttgccaaattccgcattccaacttgggctaatctacgatgccatagccaacccatggaggatttagcaatcaaa

SEQ ID NO: 2827 - DNA, 596 bp, Oryza sativa
  unsure (1)..(596): unsure at all n locations
tagcaaatgagtcagaaatttaccaacatgcagattagaggtggactaattaaccactagattcgagaatcttgtatcgttgtctctctctctctctctctctctctctctctcttttgtgacatgaggtcgtcaagatgcatggatgcatgcatgaatacacagggcgcagcagcacgtatgctcctccgatccctccatttggcatttgccatgttcttcgatgaaaccgacgtatcaccaactaatggcactgcaagttattgtgatcctcatcaccgatcgatcagctctattgttccgnnnnnnnnnnnnnnnnnnnnnnnnnnnnnntttatagccccttttttaagggaagtcgagatgcatgacgacaaattaaagcacgcaagagcatctgctgctgtctaaatttagcccgtgtgaggtggcgccgtcctatcatatcggatgaatttagagaattaaatatatactactaattacataaataaaactaattcgcgtgataaattttttaagcctaattaatctataattaacacatgtttactgtaacatcacataggctaatcatggattaattagactcaata

SEQ ID NO: 2828 - DNA, 818 bp, Oryza sativa
gtgcaggcgaggacaccagtcggcggcgacgaaggcaagccggtcggtgaagacgtagacgcccaactacggcggcataaaggccagccgtgcaagcggaaacaccagtcggcggcggcgaaggcaagccggtcggtgaagacgtagacgcccaacaacggcggcataaaggccagccgtgcaggcggaaacaccagtcggcggcggcgaaggcaagccggtcggtgaagacgtagacgcccaacaacggcggcatagaggccagccgtgcaggcggaaacaccagtcggcggcggcgaaggcaagccggtcggtgaagacgtagacgcccaacaacggcggcataaaggccagccgtgcaggcgaggacatcggtcggcggcgacgaaggcaagccggtcggtaaagacgtagacgcccaacaacggcggcataataggccagccgtgcaggcggaaacaccagtcggcggcagtcgaggcggccggtcggtgaagacgtagacgcccaacaacggcggcataataagtcagccgtgcaggcggaagcaccagccggcggcagacgaggcagccggtcggtgaagacgtagacgcccaacaacggcggcataaaggccagccgtgcaggcggaaacaccagtcggcggcggtcgaggcggccggtcggtgaagacgtagacgcccaacaacggcggcataaaggccagccgtgcaggcggaaacaccagtcggcagcggcgaaggcaagccggtcggtgaagacgtagacgcccaacaacggcggcataataggccagccgtgcaggcggaaacacc

SEQ ID NO: 2829 - DNA, 54912 bp, Oryza sativa
  unsure (1)..(54912): unsure at all n locations
gactcagtgagcagattccaagcttgtgggggtataaaggtgcaacccgcagctagctaggattggtcattatctacttgttcttgtataatagataaattttatgctaaatttatgccctcgtggcagatcatgcggtttcttttctatttgctgcgtccggcagctagatttgacgtcattttaattgtttttatcggatgttaattacgtcatttttcggttgaatgccggtaatttttttttttggggtgtaattgaggtttgaaaagaatatggaaaagatggcaggacctaattgcattgacgcccatagagaagataacctagaactcactcgatcagatatgccactcactggtatggtcaatggtcaaacagtcctccataaaaaaatccggtcaaattagctatcaaaatgtagacatctaaagtttggagtttatttagcgtgtccccttaactttacgggaacagacaataatattccccgaggaacagaagaagtaaaaaattatatgaaaaaatgatcatccggtacacacactgtttagtactccagtctgagcattatcacgcagacattctcaggcctcactcgattacagttgtgttttagttcacactaaaattaaaaatttgatttaaattggaacgatgtgatagaaaatttggaagtttatgtgtgtagaaaagttttaatgtgatagaaaagttagaagtttgaaaaattattttggtactaaacaaggcgtacttggaaatttatgcggatgtagctcaggtttacggagttttgcctacctaatagtctggtaacggcagatcgtgcaaaggatcaaaagtggttctgagtttgaacttgcgagacggaccaaacttggggcaaggcttccttttttacttttcttcaaactgtatgattgcttcgcacgtacaacgtttaaataccgtttctactttcttgacattccagggccaattagtttcggtactttcatttggcatatatacgaaaatatacaccaccatgcaaaatggtaggcacagaggtcagaaattagactcccggccgttatcttaattaaaaagaatctaaactacttctggtcagggacaaatttctaatttagctaaaaagattgctcagttttagagcatctccaatagcctctccaattgactcatttagccattctacctaaaaaaacatactccaacggcttctccaactcactagccaagctatttggctggccaaatcctcctcatcactagctacatttggtcagtctatttggttggccaatggtgagtcccacactgccaatctcctccatccccctctctctctcatccgtctctttcctacccaacctctggacgccggcgtacttctacgggaggcggcaagctcgagcacaacaaccagacgaggaggcacggggaggagcatctacgggaggcgaagacgacgcccgcccgccgctcgccgcggcccgccgcagccgttggccttcgctcgtcccgcattcgtcggcctccgcctcgccgtggcctgctgccccgccgccgcggccgccggccttcgcctcgctgcggcccgccgcccagccgccccgccgccggcctccgccttgctgcagaccgctgccccgccgtcggcctccgcctcgctgcggaccgccaccccgccccgcggtcgccggcctccgcctcgctgcggcccgccgccctaccgccgcggccgccggcctccgcctcgctgcggaccgccggccgctgtcctccgcttcgctgtgccggctccgcccacccctccgtcaccccgcacgctcgccgtcgccgcatcggaggaaagggtgtcgggaggaggcagcagtagtagtagaaggaagggagatgtatgagtgaggaaaatggggtggaagaggaggaagaaggttaataggagactgacatatgggtcaaatttgtcatagacttgtaatggagagggtagatagagaggctgttggagcaatcaatgactctgactagccaaatcagatggagagttggctatatgcgtgtttggagagtctattttagagaggctgttggatatgctcttatacgttatactttgtattcctcgtgtcccccgagcactagggggccgagcgcgggggagatgtgtctcaagcatatatcacgaggagctgtgcccgaggataggggtaccttgagcagtcccgctcgagggccgatgtgcccccagcatagttcacgggggtcgtgctgggggattggtggcagggatgtcttaagagcaggtacgataagctgactaggcgggctgcaaaaatatgccacatcatcttattcctatgtggaggaaagagaatagatgagagagaaggaagcgggcgactaatctgtcgccgggcgatacacttttctcaacgcgctaccgctcgattgcagcccgaccctggtgataaaaaacgcggtttgtgggacccgcacaccacagccgatcccgcaacgctccctccgcttccccctcgacgcatatgcggcgcgcgatctctgcctcctcgacgcccgctcgatctccgntttcctccagcgcgccatctctggatgcagtcaggctaccggcgtgggcggccaggtgcagcggcgtgctcccaggccgggaaagcgtggggcacgagacgtcgtccttgtcgaacagcaggtgcacgcatccagacggccttgcctgggacccctgagctaggtgcaccagcatggcacccgcgtccctgacgtagacgaagcgagagaagctcgtaagtcagcaacggtccggtccctgcttgggataataatattatgggttaatctagttagttgctatggtatttgagttatctattagtgcttgtagtttccatactacatagaacttggtttatatggtagtggtagtgtttgatgaataaaattcatgtcacagcacaaatggctacagggatataattcactcttgatcctacacattgacatgtacatgttataattaattatttgattataagatgtagtcatccaatgaataagctattgtacctatagttggctttaggagtgggctattagccagcagtgggctatactattagccttgctctaagtagcatatcaaatcatttcatttgaatgacttctatttcctctgttatttagtaaagatatcaaggtaaaaaatgaaatattctctttcagtcacccaggggcggatccagaaacaaaaaattagggggggggctcaattacacagtttcttcaacctccagccatttagggacctttagtttatcattcatggttaaaaaaatgaaaggggtgctccgggggtatccatggatcttgtgggtgtagaggggccctgcacccacgttggatccgtccctgcagtcaccttattggtcaaattttaaatattgatttgcttagacttcttaagtatccgattggctagagaatgtatggaatttgttcgtgcattaaattagtgctcaagaaatattttcgtcgtagtatacattttgaatcctacgaatgcttaaattttgaaacaaatggagatcttatattgtatacaaaatttaaatcctccaaatgtatattgaggaagaaaaaaaggtacacgaacatattgacgacacggcaggatttcaccggggccaaattaactcgtactacgaactggtagccacgaggcaacgactattgacgcagtttggaagcgagtccccctggcccctggtggtcaagcgtctcggtgatcgcgacgagacatcaccacaccaccgtcccctcgctgcctgcctccacctcacctgtgtgccgcgcgccaaatattccaagtagtgcacagtgcacaccgcgacgcacatacccacccgccggccacgcacgagaccccggttaaccacgcgtgtgtgaaccgcacactcctttccctttcctccgctaattaattcgcccaactaaactactcacctgcgtccactgcgatcgatcgcttaagatgtcagctatatatatactccaagctcggtgagccagcatcaccaccaaccagagctaacatagcagtagctagctagatcgatcgatcgatcgtctctccttgtaggctagctgctatacgagagcatgtgcttgccgttctcgtcctgctttggcggcaagaacgagctggacttcggcgaaaccagcagggaccccgactaccatcccctctcaaccacgcccagcggcaacagctaccaaggtggtgacgccaccgaaacgaggtatgcctaccagcagcaacggaagcccgccgccgcaccgtccaccgacgggtcggcgaaggcgccgcctctcgctgccgctgggtggagcaacaacaaggtcgctcatcacgcttaggcacaccgccaatggcagatacacaatcgctagccgctcctgcgatcttgattcaggtatttacatggtagcagctggattagcttcgcctgcttcagttatgtatagtacaagctttggcagttaaccagtcgtttaaattagctgcccttttgtttttcttctgcatgctggttcttccatctgatgaaaatggaaggcgactggaattatattagctgccgttttgttctgttggtcctcccatctgctgaaaatggaaggcacctgggagcagagttcatcactcatgtggtactccacacaaggtccaggcaacttttgttagcagaggtctttgtcagttttgttggctttgtgcttgtaggcttgtagctcccttcttcttgtatgatataatcgaagtggatcttgtgtacattcagtcctaatttcagctttggttgctatttggaattgtggatcttttcttcagtcaattttaactttacagacttgcatgcaaatgccaaatgccagtctcgttgagagcaaccatacaacagacaacactgtgaattcctgtttaaactcggacgaattctcgctatctcgtcgttgtcacaaacattgatccggaagagcatcgaggaaactgtttattgacagtgcttaaaggtcatcacaattgccaggattaattcagcctaactaaatcgcattcacctgaactagcatcctacacacaagaaaatcaatgtcatgaatatctcttctcagtgttgacgtcatttttcgtgcatgtcgattacgtcatatttcaccaggatgccatgctagtagaatggttataattgaggtttaaaaataatcgagataggaatagcaaagacctaattgcaccctttccctgtgcatccctgagctcagatgcctctcagaactggtcagtggtcaaatagtcttccctgaaaaaaaaaacacggtcaaatgagctatcaaagtgtagaaatttgaaatatttctacctcatgactttggagtctatcagtgtgtccccttaactttgagggaaaagacaatattccccggccattagagagaaacagctggtacacacactatcctgtcagtgaagcctttatctggccttcgtcgattactatgcagaagattaacaactgcatcatttgcttatcaactgcactttcaaagttttaaaattccaaacttaatatcaaagttgattatgtttcgtggtttattttttatattggcttttaaatcattaaggatatacatatataaccgtttggcatataaaatttgtattatgttgctagacgtaggccaaacgattaagctgtaaaatttgcggagtttttggctgcctaagtttggtcacgcaagattctgcaaaaatggttctaagttggaaatttttttttgaaagaatcggcaagctgccaatttcattgaatttaggaggagtaaactttacaagtgaaaaacaaaaaagcaaagctcaggaccttcggtccgagcaattaaaaagaaagtcaagtactcagatctctcacgcctgctaaggaccacgatttggcctcctctttgattttggccagaaggctacccatcgaaagctccttttgctgaaaggttctgcggttcctttcattccagatttcccaggctaccaggagcgttagtgtgcgcagagctttctttggagcgtcttttgtgtttgcggtagcctcccaccactccgataccgttgaagcttggtgccacaggctagggtttaattgttcgcatgctgtccactctgctatcgccccccagattctccgggtgtatctacactccgcgaggaggtggatggctgtctcttggcgatggcgacataagggacagatggatccattcggccaacccctggtggccagtctgttggatgtccagactctgttttggatgatcaaccatgcgaaggttttgcacttatgcggcgcccacggcttccaaatcaggttattgaagtttgtagctgtggtgcctaggagttgtgctttgtaagccgatgtcgtcgtgtattcgccgtggctggtgagcttccaagttattttgtcctcttcgtgctcaatcaggtgcagattctgcactacgctccagacttcgatgagctggtcaattagctctatcgaccagccagtgttctccggtaggtcaagatcttgcatccattgatctgagagcgaagcctgttggagcgtgctggtctttttcttggaggccgcgtagactagaggggctacgtccttcagtcttctcccttgcagccaacccgagtcccagaagctaacttttgtgccgtctccaaccgttatagatgttgcggctgcaaaaagtagcttgtcgatgtcgtcacatggcgttcctgaaccaacccacgcctttaccggtgatctccactcgtgccatagccaccgcagccttaaggctcttgcgaatttctccaagtttaggatgcctagacctcctgaggcagttgggaggtaggttcgtgaccagttgattttgcacttccacccgtcaatgcttcacctcccgcccataggaaccttctcctttgtttgtccaaagcttctaggggctccttggatgttttcaggcccgtcaggaggaatacttgctgcgaggtaagcaccgatttaactagggttgaacgccccgctaagttggaaaatcacatgaatgtttccttttagctttacattattatttttgtttaaatactttttgttcatttcgacatcccaatgcattattagtttaatagtttcgatactttcatctacagtgatatgtgtgttgcataatgttaggatagaggtcgaaagttagatcaaatgcagtgttaaattgaaaggtgtatcagagagaaggtcatggtgccgaccctatacattgtgaattttttaaagcatgtctcagcctaagagtagagagatagtacgcctgattctagcagagagaaaatgtgcttagtagagagagtatgtcacatacattgttccacaatgttagagcatatatcacatacattgtcacatacattgtgtctactagtagcacatagccacctaccggctgcaattttcccttcgctctatttttaatgtggtgggtcctataataattcctaaagctatttttatcttttcgcttatgcttatacttattagctaaaatctaaattttcaaccttaaatttgacgttgattttagggttttttcatcgaagtttacttttcagcctttgcttttaggtcgctaagaacacgtatataagttttatttataaattactttttgtttgcaaatatatcgtttggcgaataagccaaacgatgggaccttttgtacgatggaacaattttctcaggctgctaaggatctactatggttgatatgggtcccatctttactagtatctcacatgaattatacactaagggatgctcttccacttccatcgtcttagggcatccacaatgtgttgagaaatcaggtaataggcattcaatgctcctctacaacctggtaatagccattgtggaactagtaaataagtagtaccgggtagtatgcttactaccgatagcaagggaataaataatgttgtttacacaatcgagacacagagagttcaggatgaaagtatctttacttatgaatggggggggttttttttggaaacaggtggagaatattttattggtggaccccaccttaaaatctcatacacattgtgctgcctgcgtacaactactacctgtgacccaaaacctgacactaatgctcacttcaattttatacattggtgttgcccttaaaagaacacactagttatggtgagggaataaattcctactccgttcatttttcctgtgcatggacaggcatatccaaggcaagattatttcgctggtgtcaaacttgtcaagctgccagtaactagtatagtaagggacggatcagctcagtttccagtcgtgcgagccgagcatacgacggtcgaggccctggtgattgcaacgagacaccagcacggcatcgccgccgccgccgccgccgccgtttgctctgatacagattctcgtgggagcacctggtcgccgcccctgcctgccaaagttggcctgggtggttccccgcggcatcagctccacagtccacaccacgtcacgcgatgctgatgctgccggccgcccccgcgcgcgcgacacgcacatatgtacagtacagcaggcagcgcgagcccgcggacgcgcgcgaggcgtcaggcgccttcggttaagctgcggtttggggtcacgggctcacgtctcaaaggtcgcgcgacgcaacgtagcggaactagccgtctgaaccggaacttcgctggaacagacgagatcccctgaggagggggaaaaaaacgagcaataatggagtacctcgtccaattatcgtcatgaattatttacttgaaggttttataaaaacacgttttcttcctgaaaaacttatttaacggtattgattggatcactcatcctaagctactctatctggtcatataaacaataaaaactagatgaatccccgcgcattgctgtgggaatttagtatgataaaaaaaataacgtgtaagatagctagataacatcagattaagtaaattaatgtggtttatgataatttaaacttaaattgtagaatagtgattcaaacgtaaaaagtaaggtggtatgactttacgaaagaagaaaagtaggaagatagtttggaccgtagattaatcatctaaagactaaaagcaattgatgtgatacgacttagttagaggaaaaaaaggagaaatataatttggaccatagattaatcatttaagcactaactaaatgaaaatgaactatataagtatataggatatcataaaacataataaagatacacattgatgcatgatgtttaaatgtgatgattgtagtggatgatgatgtggcatcttgttaattagtggatgatgatgtgacatcttgttagtgaataatgatgttgcatctttgcatgttaagcttaaggagttagtgggggtctgcttaacgggtccgtttcccacttgcttgtacaagacttggaagaaaaaatagttagaattgtgataagaaggtaagaacaccacttacctgccccacttacatctaggataaatatttgacacagttaactttggacataacgtttgaccatctgtcttatctaaaaaatatgtaatcacattgtttttggcttgttttattatgagaagtaaaaattatgttaaaattttttgagatggcgccccaccatcctcttcatattgttatggggatcattcttgttgttaagtatttaagcatacatttattattatgatgatcttttgattgagtattatttccagttgtactgctgacatgacgttgtattgatcgtatatacacgtaacgtctgacaattttagatgtattgatcgtatatacacgtaacgtatgacaattttagtctgtttatgagccaagttcgtactgactttgcaaatatttctgacatccgaaacaatctgcactgcatccgtcctaaatccacttaagaaatactccttcggtcctaaaataagttcatttttttctcctcctgtttgttctaaagtaagttcatttttaatacaaatttattggaagtaaataaagtgaggataatactaatgggatttgatggagctaagggtattctaattctttttaactttgtattggtacgtgtgaaatgagtgaaaaatatggtatacaaacaactctaatgggaacaattaattgcttatccgtggccttgatcaattactgtgcaaaagtacccggatgaagccaaaggtttgtctgagttttggctacctaaagtttggtcacaccagattatgcaaagtggttataaattgaaaatcgtcttccattatagctttggatcgaatgcttttgtttattttgacatccgatgccaatgtgtgctaactgcataactataggtacagaggtcagaagttacggttccatcgtcttaaaaaaaaattctaatataaattctccgtataataataagagaataagttcctactccgttcagtttctccccggtgtcaaacttgtcaagctggtaagcgaggatcgactctgtccccaagcgagcaaacaacggtaaggtcagcccggtgcataatatgattgcaaccaaacgtaccccaccaccgtcccccgccgctccggtagattcttgtcgagcagcatgcgaggccgcccgccgcccctgcctgcccaatccgcctgtctctctctcgttcccctccaatccaccacgacgcgccgatgccgatgccaataacgatgccgccccgcgcgcgcgcacgtacgtacgcacgcgacaccgcccaccacagcaacgcacccgcgaatagtcccatgaacgcacgcacgcacgctcgacgcgcctacgttgggttgggttaaggcagcctcggttccacgtacgccgcgcaaccgcaaagcaacgcaacgcaactagccgtctgaaccggaccccgcgagatgccaagactcttccccccaacttaggtcagctcggtctatatatacacataacgctcactgcgccactatcattcgtgtcaaggcatcgccaacaccaacctagtcactagatcatcggcttgtctagcagcagcagtcgagcatgtgcttcaagctgggcacctgctttggcgttggcgttggcggcggcgacgactactaccgaggctacaccaccgtggccaccgacgagacaggccgcaaagccaacaacgacgtcgcaagaaaacccgtcaccgccgccgccgccgcaacgagggatgtctacggccgcgccgccgaccagccgtcgccgaagccgccggccgctgcgaggaacagcaaggtcgctgatgacacgggggtaaagcagccagctgatgctgctgctccggtcatctcgaggtatccgggtcatgtctactagttgcatttactacatggtaacgcacttggataatttgcagacaatcgagagagtttagtgcagagagtttttctgttctgtttggtcctcccatctgctgagaaatggaaggcacacatgggagcagagttagttccgtcttggagtcttgtgtgtgacaaaaggttcagagaacttttgttagtacttagtacaggtatttgtcagttttgttggcttgtgtagttgcttgttcttgtagctgcctcctcctcctcctccttgtatcatataatcaagtggatcgatcttgtgttcattcagtgctaatgtcagcttttgctatgtggaacctcttcttactttacagacttgtgtattgtgctagtgcagtgttgttcagaacaacctgataatgagtactaccagatgacattgagaattcctgtttaaattccaattaattatgactctttcatcgtttgcacaaacattgtgattggaataggatgggcaaactgtttattgcaagtgctttaaagttgataaattatcaattgttctgtgtattcacttgaactagcatatactacccagcaagaacatcaattgttctgtgcataaagtactcactattggatgttggacattaaaagcgagggtacaaggctacaggaagacaaaagtttatgccggcaaataaaaaagggacatggagataacaactgacactgtatttacacataagaagatggatacctccttttctctatacggttcttctgtttctctgttcagggttcttgacatgtggacagctgcagttttattgatgaaatcctaagaagattttcctatgtgcatatacttgtgctcgtccaatagcagctcctttaagccactcgttccttttctccttttcaacttattccatttgttatgccttgtgtttaaccatttccgaagagcatcggaatacagatatagatactgaggtaaaaatctatcatccatattcatcacatcaacttgtctgcgtgtgcaggaaatggaaaaggagtgcttctttcctccttttatttgtgtttgtggaacagtgaaagtgaattagttgctttctgtaagttttttttttaacagctgttataccctaaatcattaagtgttagtatattatattccaaacataggttcatgaagtggtaaagagtaaagactgctttctggctgaacacctaaacagagaattcggtgcgattctaccagaaaggcaaagacggcgcatgtttactatcccatccataataaaccaccaaagtatgcgacatttcttatgtggtaagtgtatttaataatgccaatcatgctttttcgacaagattaacaaaacatacaacagaccgcatttgcactcatggtgtaaagtagagaattcagcctagtgctttagcctctaacttagcaattaagatcttgatctattctctttagcttggaataagaccaagaatggagaatcaagcggttattcgatggagattgcgctcttgcctaagaactgacagagttaggaacactacaccgttggacggtgcaacctggaagacatgttgaaggcccatgtgactgtcattttcggacctccattatgtttcgttttttaactcaggaataagttcccaatcagtacttccactagcaactaaaacacactaagacatggaaacgatttggacgcaacaggtagacgtagacctggggacgactacgctagcatatgctaactttatgatttcacacatgatagttggataattcagtatgaggcttgagctctagttgctaatatttgttgattacaagcatagaaggtttagtcatgcttactgtacatgccgcttcctcggttttcaacatgctagggatgttacacacgaccagcttccagatcatttcttgatgtcctgctattgtgtagtctagatagctcaacatgatgcccacacactgactgctggctttctgcattgtgggagttggccacttgaagctcctcaagcatatggaagtatgcatacggtccccaaccttaagatgaaaaggaagagagccactttcaaaaaggaatattcaaatttgcttaaggaagagagaaaccattccttggtgaacgaatttgcttaagaaagctgaaaaaccttgatgatggtatggaggtggaaagaagtgcaagtaacagagcatcgccatgataaatcctgaaacatatcaattcaatgtgatcattatgagtatgaaagtgtgcaatacgtatgtggagaaggacagggggagaagaacagacctagtaggccgccagcaaacacatcctcccagtggtgtcgatagtcatctattctagaaatcccgacgagtgaagcaataagaaggggaagaatcataatgcaaagtttggcaacatgaccttggcgatcaaacaccttaattttgccagataggtagagtgacagaaatccaagtccagcaaaagaccctggaagcattatttgtgtaaaataatctagtcatggatttagaaaatcagtgtacaaattacttcacagtttttcatgtaacaatggaagtggtattcacatggtattcacctgacataactatgatcatgccagacagacaataagacatacaacacgaggatccagactatcgagtcaaggtccagccgtccaggtacaaaacattatttttgaaacaatggtacaaaacattataataactgagctacgggtaggatacgcagcacttgttgacaacctttaaccagtgattgatgcttgatacctcaaactaccagctactaggaaatgcaaacttatccatcaaaaatcacatccagtgtagatacgcactaaagttacaaacttacacgacgtgtgtccactaggaaaactcttgcgtccatcctttaagaagcttttctctccatgacaaatcacatcacctgtcacttgatcatataactgagataaaattaccagaacagtgccttgtcagtttcaaaattgacaaataacaagcaacataaaatggtagaactatttgtgcataaacatttgaggaaaactctacctgctttccatcaggaaaacaccgccaaaagaagtctggcctaggtcttcctactgcattctttaccacagtagttacaactgcagttatcagcaccgagtaaagcacacctgcagaattaacattctgatgagtttctcggtatatgaaattcagaactttgtattcagaagtagtgaaccatcagaagaaaatggagacatcgacaatcacctaatgttgcgtgatgaagatcatagacatctctcctagcgatataaacggatagaaagataattacagggcaaactatggatattatctgccaagaggaccgggtatccaatatcagcgatgaatgtgtgtattgagtttgtataaggaaatggaaatgcagaggttcggatacatacaggaacaccccatgctggtacagtgctttgtttcaccgggtaactaacataagtcatcatatccttcccaacaaaccggctaaatggaggagcgaaatgcagggcaatcacaactgcagcaagtaaaataagaacgacccaatcatgcaggtgatttctggccaatctaactccatgtgtctgaatcgtgtgagggcccagctgaacctccctcctcccatcctgttgaaaattaatacttataccaagaacatcagtattctacaagcaggcgtaccataattaagcctagatatgaccagcatttgagtttcaggaggtaaacataacttgcattactgcaacatgagataagttcaactaggatgttaattagattatattgcttcacatctaaatgtgaacatcatatctgaacatgagtcctattgagtattggccccaattttgattctgaggcaaatcctaacgaaacttggtttcatgtaataatcgcatcataaatattccaacacgttactcaagacttacgacgaaggggaaaattgcaggccacagattagagcaagtttaatagtacagctcactaattacaattagtcaatgttaaagctaacatgtatagtaggttggctataaggttatctttatttttttcatcctctctctttctctcaccatgaatttaatgcatatttcttggagtttgtgtgcagttagctcttgcatgagagccaacactccccacttttgtttatctctctcttctacataaacatatagcttgcttatagcccactattatccttgctcttacaggaagcagcattagactaattgcctaacaccctatgcaagaggaaggtcagatacagattacacattaggggcaaaaagcaacactgaaatcacaagcatcgccaactaagtatccgatcaatcaatgtaaagcgcattaggatttaggaatttcatgcgtctcaatggtgcgaggaatttcagatgtaaagagtactatacatctgtcaaatcgaacatccttttgcaaagcacatcagagcagtcaagagttgaacagaatgcaaagagctcattggtctcaccgtattctctccacgcattgaggactgcagaacaaaatcaccgcagatggatgcgaacctgtgccccaagtcagtacaaattccccgggtttccactgaaccaagcaaccaacttcctcagaattttcttcaagacatcagtattgcattcgcagcgtattccaaatccctaaatccaaaagcacaattagatagagaaaaaaaaacttttattgacagctttaaagtttaaaccgctcctaaaccctaactgcctagcatacgagctgaataaccaggactgtaaaaaccgaaaaaagaatgcaatggttgtggtgcgtacctagtagcgatggaagcgagaactcaacgagctcattggggaagaagaagaagaaaatcctcttttcattcgatcgagtctttttttttgagagagacgatcgagtttttttagtagagtcgtgtggaaggggacgaggcgagaaacggagaaaagaaacttcgcgagcatcgggaatcgtgagagagtgaattccggtcggctgcgcctaaagcggtggcgacatgggctgggaattccgcatcatcatggccttctcctttcgtatgggctgaaaccaagcccacaatataactaggtctgcttacaatctgggccaactaagcctaccaatgcaaagagtctctctcttatctttctttttctttttcttttttgacatggcaatgcaaagaaaatcatactggttctttcaacaatgacggctgctctcaaaagaaaatcctatatgaaatccccgcaaagaaaaaaagaaaagaataaatcctttatataaaaaaagagaaaaatcaaccgatttggattggcttgcggcggtgatgctcctgcaggatgccacgtgcttcgtacacgccggaacagcgtcacacgtacgcctctgacgtggcagcctgccgtttcatgtgcaagactgcagcaaacacagtacagccttagtactgtagtatacgtactaatcctgtttcttcttcgtcatagaactgttgattttatctgtttaaaagaaaggggtttttccaaatccaaaatcacgacgaggtctagctggaaaatggagaagaggacgcggcctaattttgcaggggagcaaagagagattcgattctctttaagctgctcgttgccctgtcaggatgtggggcccgcataatatatgctcctcctcgtaggatccacctcatcgttggatcaatttgacattgcatgattcgctgagacaacaagagtccgtcgcttgcacgtttgcatcttggaatcacatcctcactcctcagaatagttcattttcttctcccccgactatctcaaaataagttttttttttcaaaacgagaataaatacattaaaatagatttaaaaagaataactatattatgaattaaagaaaatgaggtactctaactttacatggatatgtataggatgggtgaaaaataaatttattttgggatggtgtgtatcctgtaaattttacctatagctttagggtcccttcgttttggaggaaaaacataggaattttagagaatttcaattatataggaaaaattgctatgaatgcatttgaatcaaagtatattcctatggaatggacaattctatagagattttggaggaaacttaacgagagctcaaagctattggaaaatttcttttgagtttatctctcttattcgatttctatgtttttcttacggtccaattaaacggtcattcatctgtgttttcttgtattttacaattctctattttacactttcattcatgttagaattctgtgttttttctatttcttcattttttttttcattcctactatttaaaacggtccttcgtttgtccaatttggacatatataaaacctcaaacttacatttttaaaagaaaataataaaaatgttttatatccatgggctcagatcatattagctgagttaatttcacataactcagatcagacggtagagataaatcaactgcttcttaaacagtttcagcagcaaaaggcatgggccctgatggagtatatgcagccagagacatcacatggatgcatgagtttctccttgagagatcgatgggtccataagactactctaatccagttgacaagaaaactagtagagcctattgtgctatcctgattgctctctacacacatccatatacaccggtcactttcagcaccattatacaactctgcacacaagttaacacacatagattaagtgatctacaaggttcagaagtaggtttatggagtgctgcaatgatgagagaagaaacggtagctgcacattgaactccactcagtttcctgaagatggtgagggagaagattaattagtttatcatgttatccaatccatgtcaacgtcgtatgaactaacatggaaaactaagtcaacgactaaggctgtcgtgcatacaaagcctatgttgagcctactagacaccaaaagaatcacaaaggaacaatctttttagctgaacaattcttctcatgtgcctgatactatcgcttcattacttaaatcaaaggaaatttaatggttactgtatactcatcctaatatatatcctccaggtatctaattacaatgtactaacagatttgcaaggagtacaaaacatgaaagaaaatgatatgtgggtgctttaccctttgttcttaagaaattagcatagatgcatgcatgacctgatgtccattaagcccacttgccaaaaataagtttttgctggtacaccaaacatgtcctcatataattgtttttctaattactaaaccaaagggcctctcatcacccatgttctggtaagattcccattatgatgagcatccattaattattgacactgagcttctttttaaactaggagtttatgttcattagatggcaccaggagtacgaatttggagtgtcttttcaaaaaagaagtacaaatttgcattacacagggtgcagagaaagtatggtgcactgtttagccatgtgcacagcagtttatcaacaaaacctttgtctagcacgcaggtaagctgttttacttagcggcattcattcttgcgcgtaaaatcaaagcgaaactctgcaaaagtgctaattaagcatcttcagattattattgttgctgttgctgaatatagactgaaagccagaatatgagatgaccttcttttgctccagttatgctctttctaatttgaaccaaacaaggtggggtgcagaccaaacatcaccttggttcgaatgattgaaatgataatatttcagaaattggataggcagtagtgaagagaaatatgctacagaacagttgcatgaaaaaacaacaggaatgcgtcgttgtcacagagcaatcgacaatcctgtgttgtgttgcctagaatgagcccaatcctgcatgcacgtatacgtcgtcttctccgtttcatacttgagagacttcgaggtggtcgaattggcactcatggagatggagaggtgtagcaattgtcgccatggataatgctggatattggagaaggaacattggggtggggccctcccgttgttatggcccactctgactaatccatttggtccatcaccctgatcagctgataccatgatggcccggtcacccaatcctattggcccatgtcggatggtgggccccacatgcatctcatcaacttcacaaataaatgggcgtagtaaataatactccttagttcaacctaatatagacgtgatatatctaagattaagattgtcaatatctcaattagtattctagtatcttatgatactacgattcacgaagaagaaatgatactgatcccttcgtatcataattttcatagcatctcgatctaactattcatttccacacgattttacgaaatcttagatagtatcctgatactacgatcctactaaatattatttaaaataaggtggattaaaaataatgtaaataaatatgctcaagtttacctaaaaaccaattaaatttataaaaaacaatatatatactttaatttatacaaatagtatatattttatataaaaatatgtaatttctacaatctaatggtatcctgatcctaggatactataatactataaatcacgtaatactaaagatcagaaaaacaattctacatagtattgattacgactatgaatttgtattatgatgcatttatatttggacagaggagtcatgtattactgaggctaattatcgcgtcagttaaaacagttggatggaagtgttagctgcaccaggagatcgatcagctgttgtgtgcatcagcagagcaacctgtatgtctctttacctaattttgctgctggtaaaaacattcactaagcacatgtaggttctgctaattggagtacctaacaaatgcaatacgagataaatggcttcttttttacacgatcaaagttcttgcacaaagtgcataatgatatgacctttccctataagagatcaagcaatcagatatctgcaccaaattttttttttagaaaaaaaaaagcagaggtagctttcagctcgagagagaaactgggacgtgtaggagaaagcaggtggctggtcataatcgccattcaccatcaaaatgctgagtcttttctatcataggatcaacaccaaccacctctgcaattgccggactatttaatcggcagctagcgacttttgaccgagggatacacaaactcacactaatttgtcgccgttggataacgatcggacggcacggtaacattgtcacatgcatatatctctcacgtcgcaagaaatttcacacgagactatatttccatctgtttatttgtctgttactgttgttgctgttcaatgatcacttgcatgcgcatcggatgtgaagttgtgaacatgaccgatcgactatggtattggacaattcccatcgtgcttgaattcacccgccattggggacttgtggatgtccatgtccaattggtgagtgttttgctcatatcttcttattggggttatgctatatatactgatgtagcactagttatgcatgaaacaagatttcactgaaatggggcatgagtagatgattaattatctttcatctttaatttgcttgtggatatgaaatgtgttctttcatggacatgaggtaactcggatggcgatgggtttgtcctccttgatatatactaacgcttgctagtttccttaattcttattcagttatagagttgctttctgacgatgtttttttcgctttatgcgtacatgaacgacaacttgataaatatacgagttgcctacgcattcaagcgacaagaggagaggggttgttgcatcagcaatcgctgattgctagctccaaattaaaaaggtcatggctcgatctctgccagaaaaacaaagcagatagataaatctatcaatcttcaatcgtcgacagttcttcacaagtactcgtaccagtactatctagcgtactagtacagtagtacgtgttagggttatccctaactgcgaattaattaaattaattagtagtaatttgttgcgcttgtcagtaagtaaattcgtcagcaacgtagtaaggcatactacgtacgagcgcaccatcatcatccagcactaggggggacaatccgtattgatttgttcaacgaacacacacgccgatcggtggaaagtgagaaaaaagacggtgaatccatgcgacgaccggcctgcgcatgcataatcgtcgattcgatcgatcgatccaaagtattcagtcaagacctgatcgcagccatgttcgcggagaccaattattcagtcaagtctgtcaagacggggaactactacacactactagtgcagaagagcataaaagcagctagctaatgcactagtattaactagtatcgcggcgtacgtctctcaccggttggtgcatcagttgtgtgaggagtgaagaatcgaagctgcccggccggccagcacgaaggcgtacgttgccaggtagcagctggacacacagcgcggcagcacgtactcgcgagagcgagacacgaccacgcacgcacgcacgcagcgtcacgaacgcggagaggccctcgcgcgcggccgctccacggctcggcacgcgggcggggacgccgtggatgcgcgcgcgggggagtcgagcgagacgtgcggcttcctagcgcggagtacgggggaattcgctggatagatcggccgtttgacgcgacgttctccttttccatccgctgcgtcagtcatcggatgtcgtggcagacgccgtgtgcgctgcctctccgggcggacgaggggcactcgcctcgcccccgcgtccgactctgatccgcacatgtaggacccggcagccgggtgatgggttggattattggattggattgggcgaggcgttcgcttcgagcaaaatccgcccatcgattcatcgtgtcggcccagtcacggaaaaggaacactctctactgtactactctacatacgtgatcgatcagtgcgtccgtgctagctgtgcatccatcaatggatcgattatacatgatgacataggatcgatagagagaaacaaaaaatgagatatgaacaacacgctatctgtatcacgagtcatctttaacaatatccatctcatcattttattgcctgccgaaaaatattcagttcagcctccacaccgctcggtcgccctgccccgggggcgacgcgggcggcgaaacaagccgtgccgcccctgcccctctcctcccccctcccgcctcgccgctgcccaagccgcaaggacggcagcggcgaggcactccctccctcgctcgcggtcttcatggtcggggcgtcggcaaaatcggagcggagggcaagacgccggcgccaagggaagccgccggcggcgtccagatccggcgctgggaaacatggatccaggccccccatggccggatttgttgctccgggcggcggggagccgagctagcgcgtgggcggcatcagcggtgtggttggcggccggtggcatgcatgctgctagcggggttgtacacgaggcgttcggtggcgagccggacgaggcggcggcatggacgaggtttcgcggcggcggcatgcatgctgctggcgacctcagccggcggcggtggcgtaggggttggggggcgaggtggctagatccgcctccctacccaggctcagtgcacggcggcggttgtagcagcggtggtcatgcaacagggtgcggctgcatggagggaacggggaggccgactcccgtgtggcgacggcgacgacgtctatggcggctgcgtggctgtggctagggcggcgaccgtcgcggctgttgtggaaatagtcggcgtgggtgtgggcggcagcaagtggaggcggggaaggagtctaccggtgagatgcacggcgcgcaggcctgacggcctcgggcggcttgctggtgtggaggcgaccgtggtgcggtggtaggaggcacggttgtggtgaccgtggctacacaaccatggctaaggtggggcgaggcatggcggccttggacggctagccgagggcgtggcagacggctgcatctggccggcacggcaacgtttggaggaggggtcggatccggcttggcgcagagtggcgcagccgatggcagcggaggccggctcagcgcgagaggcgcgggcgacggagatggaggccggcttggcgcgagaggcgcggccggcggtggaggaggcgacctcagtgtaaggaggagctgccggtgggtgtggcgcggtcttcggtgcacgaagactagccggcggggggcgtcggtgcagtggtcccacatgtcggtagaggttgagtggtggaggagcatcggtgcgttagccgtggatttgcaggtggtgaacggcgggtgaaaacctagcccggccttggccggaccggcaacgatagttaattccccctcctgagggcgttgtcgtgctgtctcacccccttaagggtgtttgccgggtgaaagcccagtcggagcttctttgagcctcgacggacggcggcagcagttttccgtcgcttctcttcttgaagacgtcgttttggcatcccctagctgaaacctctagatcgattggtccaagctcgctctaggagttgggctttgtgttggttgtgagggcttgggcgatcccgtttgtgttcctttattggtctagcggcggttggtcacgcttagcggcggccggtccggtactaaccttcttccggcttgtgtgttggtgctgtcggtgtgtggtggaatttttttcctttttcctggttacgacccttcagggttgtaatcttgtaatttttttctgctttatcaatataacttcgcaccgtctcgtgcgagtcgttcaaaaaaaatcagttccattttattaattcattttattaattcgtcatcagtcatgcattcatgtagtccaatatttccatctgatgtaatcatcctgaaacagcgcgacacatgatattgttattttcctctcctactccagcacgtacatacgtacatcacccaagctctcgttgaccaatcgattgctagcgttttaggttgctctaatctgcaacccattgcattgatccatcatgatgatctatcgattgtacctactatcttttactatgtctcaacatatagcagcaccaacacataattaattaaccggttaagatacccttctccaacaaaagcacatccgttgttaattaactaagttagttcagttcttctggtgcgtacccttttgccacgcaagaactaccttagctttttctccagctggtgcttgctattactctatacgcgatacctaacttatacgtcaaattatatcaatatcaaaagattttaaaagtacgcaatttatataagaatgctgctcgatcggaaattaggcgtttcgatcagctggcctgcactgtacgtaagcttggagtctacttcatttatctcgacagaaattagttgctctcaatgtctccatcatttttcgtttgatatcctctacgacatgtacggagtatatctgtatatgtaaaaatatttctgattaatccatactcgaaaaacatttttttttcttttactgatacagtaaagtcgatttgatctgttgatgtgatcagcctggctgtcagcccggttgttcaattcccaagaaggttaacgtttctgcttgtccaacggccaatcacaaatcttggatcttgcatttgtagcattacttttgtaattcttcggcaggtttccattgctcagttccttttttaaaaaaattgtaccagtacgattctactgttccatcggtgtcaaatgcaatgaaccttgctaatttgttgtttcaagctgtcacgaatatattaagtcatccgatgatcttagagcatgttcattttaatgccatttttaaccttactaaattttggtaaagttaccaaaatagtggttgtatttaatttgctgccaaattaattttggtaactatataagaaatcttgccaaaattttggtaaatatgctaaaattttgtcaatgctaaaatttggtaatgttttttttcatcaaagtaaacatgcccttagtaagaagaaaggaataaaattctttgctttgttgttttctcaacatcttattgctttagatttatattctcagagagaaaataaagtcgttgccgtggaaatcagactaataccattggcaaagggcatcatctacactgatattctttcaattttgtgttgacaagtaacaaatacagtacatactgaagctcgaatttgaaaaaaaaaatgctgtcttgtttagggactttcacttagtaattcaactattttaaaacaggttaaatagctcagtctcacttttcccttacaagtacaatttaatggtatctcaataaatattaagggcttctttgatttggaggaaaaatatatgaattttgaaggatttcaatcttacatgaaaaattcatataaatcactttgaaccatatccaatcctattagcaagagcttaaagcccttagaaaattttcttcgagtctatctctctcatccgaattataatgtattttatatcaagagttatcaatgagaaaaaaaaacaaccattatcattgtaactaaaccctaaaattcgaagccaaaataaatcttagatcctcctaaatctaaaagattcatttcactgctagaacctagaaggtctgtcatctaaaataaaacagaaatggttgagcctttccttttggttaacggaggaatagggaaagaaaaccgctccaggtgagccgccgtgcggcagctagatcacagggccgcaaacaataattcgcgatatttccttcaagtgggccccaccaccttcgtcttccccctttcctcagcctcctccgcgtttatattccccgtccactccgccaaaagcccctcttccgatcttcttcttcttcccccaaaaatctaattaaaatcccctcccccaaaaacccctctcacccgaatttcctcatggactcggtgccggccgccggagtcggcgtcggcggcggcggcgcgggcgcgggctacccggagtccacggagtcatccccacgcagccggggcggcgactcgtgggacgagcccttcccttcctccgccgcggcggcggccgcggctgccgggggagggaggctccgcctcatgtgcagcttcggcgggcggatcgtgccgcgccccacggacaagtcgctgtgctacctcggcggggagacccggatcgtggccgtcgagcggaacgcctcgctggccgacgtccacgcgcggctctcccgctcgctcctcggcggccagccgtttactctcaagtaccagctccccaacgaggacctcgactcgctcatctcggtctccaccgacgaggacctcgataacctcgtcgacgagtacgaccgcatcgccgccacctcctccggcggcggctcctcccgcacgtcgcggatccgcctcttcctcttcccggccaagcccgagtcatcctcctccctcggctccctcctcgacgactcctccaagtccgagtcatggttcgtcgacgccctcaacagcgccatctccggctccctcgacggcatcccgcgcgggatctccaccgactccgcctcagtcaactgcctcctcggcctcgaggacgactcctccacgcactcccgcggcggcccgcctaactcttctcccgccgaggaacagcgcgccaaccagcagaagctcgccgcggccgcggccgttgctgcggcgaggcacccgcacgacgtgcagtccgtgccggactcgccgatgattgacaagaactcctcgttcggatcaacgtcctctgcgccatcgctgtcgaatctaccgccgatacgggtgcggcccgaggatcgcccgccggatagccgactcgccccgcaggttcccgttgaggatcacttcgcccagatggggatctccgatcagccggtgcagcctgtaattgggggatacatgcagccgccgccacaggtgccgatccccaacatggctgtccccagcatctccccctcggatgcgtccagccgagtgttctccgacgatgacaagtccgatcacggcggcggcggaggtcggaagccgcagccacccaagccggaggttccacctgtcgctgaccccaccaacaggtaagccatttgtttttcgattcttatactggattagtaatatgcttggattggctgtatggaaggaaaccttatgctggctatgtgttcgatcaaatgtttcagagccatgtactacaacgatagatcgcctcctgctgaattgaagcgtgacatgccggttggaactgatgctgccagctatcgtgtgcctgtgccagcccaagatgctgctgccgccgccgccgctgcggctgctgctgcccagcaacccccagctgggtatgtgtatgcacagatgcatgcgccgccaccgcagcagcaacccccaccaccacagcagcaacagccagtcccacagcaatatgtcactgcacaaaatcagcatttcattcacaatccagctactggcacattcatcccaatccaatcctattaccaccatccggtccctcagcaagcaccacagccgcccatgccgcagcctgtgccacagccacaacaatcacacgctttcgacccaaatactggcatgtattacattcccatgcgcacgaatgcgcctcaggcatatagcatgcctcctggtgccgctgctgtgccgcctcccacccttgttgacactacaccaaaaccaaccgtgccaattcctcagatggccgtgaagcagcctgaactgcagcaacctggtttgtaccgaactaccgcagcacctacccctgtaccagcgtctaatgctcctgcgtatgctgggatgggctaccaccatgttattcaaacacaccatcatccagcgccacagcctgcagcgactgtggcaggcaattttggatatgactatggtgatcccacgcgagcacaggtcttctactcgcaggcagcggcaccaccaacattgccacctcagtatcagcccatgggctcgcccgatgctggccaggctgacctgaaacaggcccgggcttcatagctcaaggatttgtgaactctggtatgttgagaatcctagaagtgtagttatcctgccgttaattatcactattgttattacatgttacatgagtcagttggcaaccagtggatggatgatggcattaggcagctgtgcatttgggatcaaaataagatgaaaatgggatggtagttcttgtgttgggtgaaactcaagagggtgtttgtgattggttctggagatgccaatcgccaatgctggagcaagtggcggggagtggcttccaattccaattgccgtcttcttattttttaaaaaaataaatatatagtgtctaaagaactcggtacaaattctgaatcaagaactcatcatttgtgtagccctttgtatatttgaacctggaagttattgaggttgaaatgtcagataaaagtgtcattactttgcttgtagaaacttcatttgagttaaatatcatatatatacatcattcctgtctctgtattttgccattgatgttgatatgtttcttatggtttattacattgacttgaatcttgctgctattgggtcatcacagttccgtgtgtgtttttcctttgggccagttgcttttgaattggaacttattggctcgcaagtccaggtgatttgtttcttttcaatgtatatcgctttctgtagactgcccgcttgcaaatcaagtcagcatgaacatctatcctgttcattctataacgtaatgttacgggcacggagacagaagattgtgcatttatatggactgcgagccttcagtatcagtcccatgtattactaggttatcaaatgagcatatatattttttgacgcaaaaaatgagcatatttgcttagctgctaattcattactttttttactgtggatttctaatttgtataagtaatcctgattttcttgcaaaatttgtataagtaatcctgattttcttgcaaggaggaattcaccctgctatgatttgccaatatgatggatgcactaattcagtggggggtatttgtaagagttgctaggtctttctcagttgattttcgcatccgctgaagccgcgcatatatttggcacgagataatctgttgatacgccaccatggtactcctaggttgcacctggcctgttattttagcacataattatgcgtttctaatgtggtgtgatttgccggggatcatattctttttcggtagcgagatcccagtgccgctttgcgatctcgaagcgatggttgtaatcgattgcttggactaaagaggcaacactttcttttctttcttttggagccacgctagcttaagatatagggtaatgctaggtggttgatcgatgggatgatcattgatctcgcccttgcctttacggcttgtctgctaaataatttaagcgttgtgtgtagtatatgattacatgtgtatctctcggtggccaagtcgaagcacagctctgcccatgcgcaattagtttggtacgataaaatgatctcacgaacaccactttacggctatctttctactcttgagtacagtatattcaatccaaagggagatctatgcccattaatcaatctctccacttgcaaactcgcaatcccttcctctttctggttctcgtttcagaaactcacctctcctctccacttgcaattccttcctctcctctcagttctcgtttcagaaacttgtttgggtgtgcagtgttcttgacatgggattaccgctgtgtgtatggtggttcctacaaaactgcgcgagttgttttgggtgaggcgcacgatcgaactgtgggaggaggcgttggatccggggaatccaggaggacgcggcacgaggcccgggtacgcaatccaagctggagatgggcgccacacacttgcacgtggcgtctgcgccctcccacaccctcgctcccctgctgctgctgctgcgtcgtcaaactgatgcccacctgagcagatcgacgagaggtgcgcgcgtctcgggcggagccgacgccgacgccgacgacgaggagcaagtgaacaagcgcatgtgtgtgtggacggtggatcgggtgattctcctgctgcgccaccatcgcatcgtgagtcgggaaacatggagttttggacggtgcgccgtatccattctccggcttctcgccgtgtccgagaactccagtacacgcaggtgaggtaggggccaacgccacgctgccgctgcgtgccgtgcctttgcccacatggggggtactactactactactgctactcgacatggcagattggcaggcagagagaccagtagtgcagtactgcgatgcaaggggaaagccaggcaagcgtgcctcccaaaagcccagatgcgtgtgcatggttttcctctcctctcctccccggcgcagcaacagcagcaatcatacatggctttagatgggtacattgccaccattgcatctctcctcttttgactgcctgcccaaaggccaaaaacctggctggctggctggctggctccatttgtcggaggagagatatacatactgtgtgcctgcgccaagtattaccagctgctgtgacatcaagctggagctaggggatccatccatcagcttaatcaatcaataatcatcattgatcatcacccactacgacgtactgtactacgtgtatgtacattttgaccggcggtttcggcgacctacctctcatctcaattctgacaggcagaccgtcgtgcgatcggcctacctaatcctgcttcctgttcttcaggctttcagctggacggaccacgcatcacatactccatacctggccttaattgctactaccagtagagtacatatggtttggttgatctaatccttgctgaaaactgctgatatccatagatcagtttctatatatatactgtagccgactctggtagtaccggtagatagcagatagacgggtgagcgagctagtcataaagaaacacacatggtgctgtccttcatcacatatacactttgtggcctatgtcatggtgcatcatgatgtgtctgcatcttgttcttcttggcgtgatcgatatatggagatacttaaggaatgagtaggtattaggtacatgtatatatatacattggagttttgcgagatcacatccaaatatcttaacccctaggggagaatgagagagatggatatgagatgatcgtccaagggaagatcatggctgttggtcattaccctcaggcagagggaatataatcttttaccggataggtgtgtgtctctgtcctgtccggcctcgccattaatgggtggagcccatgtgtttcgcagtcggtcaatattgccatgcctagtagtactgtcctcttgatcttcttcccatggtgatcagatcagacaagatcaaaggcgatcgtgaaagcgaaaagaacggagaacgaaagctgtgtatgttactatgaacaatattaatggaagaacagctttgtaacagccttttctttcctttcggatgtacatgcacggatcatattcttaatccggtttaaagagcgttatatgtacacatcacatgcatgtgatgttaggtcatgcacggtcgatcgatgctgcaatcttaattggtctcgatcgatcgatctccttggttgattagttgctgatcaattgattcaatttgcagtggctcctctccctcttgggatcttcttgaaaacaccagaatcgatgtcgccgacgtggctccggagatcgtgcaccgccgtcgacaccaggtggtcgacctcgctctcgtaattctcgtacatcacaggcagcgtcatggtgcctagcacaactgcgaacagaacacagccatgatcagaaaactaccatgagcttatatatctctgacgcatgatcaagagatcaatcagaaatggagttctctgaagaattaactgggagtttctgaagaaatgggtatcagttacctaggtacaggagagtcagggagctgaagcagcttgcgatcactgacgctatgaacagggagaacaccgtctgaaacatgcacaggagcagataacgtatcatattgatacaggaagtatcaatctttgtgtgcagtagcagacactcaccaagatgaacattttgatgtcctttccacaagcaatgtcgtagagcctgtgcacgaaccaagttagcctgctgtgcaaggccaggatcacttgcctggtggttctctccgacacaaaaatttcagggattcttggagccggcctgcagttaccatctcaaaacttagaactttccaggattgagaacgatacagcccatgaaaaacgaaatcttgggctaatttggtagtatcaaatggccgtgctttgtgtaaattaaatgggctttatccttgatgaggcccagattttcagataaaatggaagaacagagagagggaggaagagtgagtggcttacaggttgaagaaagcagaagcattggcccatatgaagacgacgagcatgccgagcatggcgaggtagcatgccagcgacaggaaatggtactccgccacctcgaacagataccatgccaccgtcgctccggcgacgatggacgccgacaccctcctctccctccacaggatgatgtctgcagctgcattcatcaccaatgcaaattcagaacagatacacttcgagtgattcacatcgattgcaatgagctcgtttaagcaaatccatgaataatgtactagctcgcaagaactgatcagaattatcaaaattagtcacctttgtgtccacctagggcgtcatgcagtggcctttccctgccgaagagcttggttgtcctgtgagttcgtacagttatagccattctgttgatatccgaatttgatgtggcaatacaactgcccaggatttgttcttataatcggcttcgccattgcattgtcaatgaacaaggcgtccattgcctgggaaaagcaaggcataactttggctcctggcttctgttatcggtattgatcctttggtgtccaagtgtgattgtttggggttgggatctgatccaattcttgtgattttggattctgtatgatcgcgtttttttgtttggttgttgaaatgtgcgttacttgtattggagaatgagacttttcagttgaaattctgtggagtaaaatgagcaaacttgggagcttctgtacgagcatctctcaaagacttcttacaaatgcaacctctggatttcagatttggtgcttgaaaattcttagcgatcaacttgaaaacttgagaataaagtttgtgcaagtgagaaagattcggcattaaacctttaaacaactaaaaaaagtacaaggttctttcagcaggtacgtttgtaaacatatacagtatacttgtgtagaactattgattcagaaatactgttactactgtactactactcttcagtggagtgatcagaaattcagaatacttgcatgattcaagtaagaactgaacagaatttcactctttttgtactgtgactgtgacctgttgttgatgatttgaataatttcaaacgattttatatttttgttgaaaccaagcacacctttatgttttgctatcgtcctattgttcatcccaatgaaacaaaagttccactggagtactacatagtgtcgttcgaatgatcaaatctgacaacagcctgattgaacattcagatcttcaaacaacggacagtaagcgttttcatctaccgcgtctgtccttacatactatttaacatgtcaactcacaagcaatttgcaagagattagatccagaatgatattctttggagtgacatgacctggccaagatgcttatatggtggcttttggcctgcttaaattattaaaccaccatgacaaattgacaaagacacaatgcctttccccattagcaaaagtaggagtatactatggtgccaatcacatgatacacgttagagcagacggccgcagcgtcaaatatccgcatctaacctcataatcactcactgtatagcagtagtagtagcagaaatagttcgtctctttggtcccacattaaggtgtagggtgcggttgttgcgtcgtggagaaaacgatgcttttttgctttgtaaatcatgttgtttagtaagtctaatgggtcatttgcattgtatagttgcagtactactagtatatcgttgatcagtgcgttcttatctgcttatcccttaatctggccttgggcgtttgcaaggggcaggttttacacaggcacagtgccagtgacagcgtaattaacgacttaatcacactgttttttctctcccgagtacttaattacactttgttagtgctaaactgctaattatttgtttcggccgacggcgactggccgcggaggaggaggtggttgccgacttgccgtcaactgagacggacgttttggcgggagtatcacgggagggcccacctgtcatcgagctgttcagggctaatcgccacgtttcgacggtaacccggacgtcaggttcggctcgctccacgacgaaacgcgcgacggacaaaggccacgtcagatggccctgtaggtcacaggcagcgcgggcccacctgtcatccgcgtggcccacgtgtcctcgacggcatcgatcggggcccaccacaattacaggtgggacccgcaggaggtcccatggcactgtttgcaagacattgttgccggcttcctaattttgttttctgcacgcttttaaaactgctaaatattaaatttttaataagtttttatacgaaaattgtttaaaaaattatattaatttattttttaaaaaattatagcaattattaatgtaccgctccgttttcatttttgggttgggaacatgttcatgcgaacacacctgttcacgaacagtatacagtacttggctgtagcgggcatcttgtcctggcatgtggggcccagtagcagtgacggggacagatcacgtgggcccacatgtcagtgtaccatgtcaaacctgcgcaccaactcctactctataaaggaaaaactcgtggtcgtcttcctcctcgagccattccacaaaattcggcaaaatccagtgctccagtcagtggcagtggcagtggccatggactccgccatctccacctcctcgtccttctcgcctctcaggttgtctcagaatcatgggagcatcatgagcggtagcaccagggctcaggtgctcccggtgggcaggcagcagcagcagccacccgccggcggcgccacccgcctccgcgccgtctcgccgtcgccgtcgccgacaccgcccgcgccgcagccggcggagacgttcgggttcgatgccctcaaggaggccttctccgtcgacgtggtggcggccgaggcgcggccgctcaacgtgcccctggccgcgcccttcaccatcgcgtcgtcgcggctggacgccgtgtccaacgttgccgtccgggtggagctccggagcggcgcggtcgggtggggggaggcgcccgtgctcccctccgtcaccgccgaggaccagcccggcgcgctcgccgcggccacccgggcgtgcggcgctctggccggcgcgcccgccgcgcccctcggcgccgtgctccaggacgtcgccagtgccctcccgggacacgacttcgcctcggtgagacatttcacgcaatcccgtcgaacacctgactccaatttcaccttaatcgtcgtagtctgatactctgatctaagataattactgtcacgggattcacgttgatgagtcacaactgtgcctttctttcttggcgttttctctgcagtagctgcctaatttgtgtgctggaattttgtgagaggtcattctctctggtaattggagtgttggatactgccgatatttccttgaaagcaaaagatagttttgctacaaatatgtggttgctaagtgataatacaggctcatgcccatcatatggcaacacgactcgtaattcataatcgcacatgagataaatcctagatgaacaatccaagttactcctgtaaagacccttttgggaaaaaaaaagttacctgtaaagaaccatgaattacaagcctacaataacagaggtttcacatccaaaatcaggttcacctgttcttttttaattcacatacaagtgcaataatgtaaggcatcatcaaatggttctggcctttcttttaggactacactatttcgttgtttgtttggtacaagatttatccattgatgtctattcaattgtgctcttctccaatgaaggctagagcaggagtggagatggctttgattgatgcaattgctaacagtatccgcatccctttgtggagattatttggaggggcgtcagacagtgtcacaacagatatcacggtatggccatctcagcatcctctgcattgattacagaaagcattctttcttatgaaaatcgttaatttcttctacttttgaatttagattccaatcgtgacaccaaatgaagctgctcagttagccgcaaaatatcgaggacagggatttcagactctgaagctcaaagtcgggaagaacttaaactcagatatagaagttttgaaggctatacggcttgcccatccagattgttcatttatcttggatgcaaatgaaggatacacagctaatcaagcaattgaagctcttgatagactaaacggtttgtacccctgtaaattgtaaagcttcctatattctgaaaatctttgcttttttttttgcggggaaaaaatcttagctatttaatatctgagccgtccaatcttctcctattaagctatttttttgttactgccattggtttcagaaatgggagtgactccagtattgtttgagcaaccagttcatcgagatgactgggaaggtctccgcgatgttagcattgttgccaaggagaaatacagagttgctgttgcagctgatgaaagttgtcgtagtttgcttgatgctcagaaaataatggatggaaatcttgctcatgttattaacatcaagctagcaaagctagggattcttggagcccttgaagtaattgatgctgcaagaaaagcccgcattgcgctgatgataggcggtatggttgagactaggatcgctatgggctttgctggtcatcttgcagctggtcttggttgtttcaggtttgtgtgataattatataatcattttttttccagccaaagacattgccaccagtatgattaaaatgaaaaaaaaaatgtcacattttcctgggtttctagaccttacttctgtcaaaatagccactgatgttttcccccctcttgtgaattcagttttgttgacctggacacacctcttttactgtctgaagatccagtgttcggtggctatgaaggtacaaaaacattttatttcaatctcctttgtacaatgttcgatggttaagtgaaaaaaactgttgaatgtagttcatatgacttactcaactaaacttctttcatcagtttctggacctgtatacaagtttacaaatgctcgaggccatggtggtttccttcacttagacaacaacggcttggtaagaagcatttcactcttgctgtttaagttaaatcttcatgtcctgcaatagcattgtttctagtatccaaatgtaataaaatgaagaaaacagtttttccttcaaaagcatgaacgaaacagtttggaaccaaattataatcaaatttacctatcaaacatggtaacaaccagaggcacctattcagattgaccagtataaaatggtgttcttattttaatgcaaatggtctcctcagtgactaaaaagatgtataactgattggtatatcattttattttacagaaataaggaatgccctagccctttgggagcttcacagacaacggtgacacgttcaatgaacaattaattgttcattatttaccttcaacaataatcaattggagttgaaaccaaaggagcagttgtaaacttgtaatcctatatgaccttgaagaggctaattattgttgccagtccagttaggcctgaaatatttgatcagtctgtagatggataaaataatgaggcattttcagctggccttgttgttctgttcgataaataaattactaaatatggtataaaagaccttatgtatgcagcctcaaatatgctcaagtacaatgtattatgcttacttttggtgttacctgcttcagtgctactcatacttgacaagttgctgccgccgcctagctcccttgccaccgtcgccctgctgccgctcgtcgccgtgcgcccccctgctgccgtcaagaagacatgggaggagagagtggtaaagaaggaagagaccgaggagagtatgacaagtgggcctcactttattttttttaattttttttatgactgagatgacacatgggcatcacgttagcgaattggacagtcaaaatatccggtattgtgattgacagatacgaatcagatgagacctataatttaaggtactaagagtggacttattttccacaattgacagccatccatgtttatgtgacctgattaggcctgcgccatctctccggaagagagctcaaacggcccgtcatgtcatccgatctctctccatatacagttgggcgggaaaggggaagcggagtacgtctggcactccggcctataatgttgggcccaactgacggcgagcctccggggagcggcccaatcaattattcataatccggctggacattgcacgagacagcctcagttttatgcgattaaactttgaccttaggtctgtactgatgtacatgaatccaattagcccggagccccggacacagaaatttgatctcaaatttgttcttacatagcagaggagcaattcttcttcttcctcctgtctactgaggcagctgggaagatcagcctgaagtggttcatttggacaggtattgcggccgtggtgtcacccactgtgtgcttcctccagaaaacctgggtgctagaagcggttctcctcttacacctttgtttcttttgccacttcccgattgaccaagaaggtgtccacggccgagatttgatttgtttttttgtctagttcttgtaatcgtttttgcttttgctgtactcctctactcgtctcttgtttgtttggaccataaaaatctgtggatcagaatggcacattgacacctcaataacgaaaacgaccaacatatatccagttcttattatcttcttccctttcagttcaggaagatgacgttaagtcagtgagctgctcctgcagatgcattgcacttagacagacgcgaagtcaaacaagcatgagcaaatgaagaacagaaacacgataatattatctcgtaaacatttgcattaacatttgataatatcaatcatgtcgtcatgagaatgatcaaacaaacaaacaagcaggagcacacagcatggtgtgatggagagcgaggcaagagagattcatggagcgggagcagcggagtgcagcttcctgtcgagcacctcggagcagatggtccccatgatgtggtagaaggaggcgaggtcggagagctggtcgatggacatcttcgccatgagcgccctcgccgccgcctcccgctcctcgttcagcttcagccggttgatgtaccccgacgcgttcctcaccgtcgcgcccatctgcttcagccgcttctcctgctgcacgctcagcgccgccgtgttcgactgctgcaccacacacaccacgccacggcggttagctttgaagtccggcggctggcatccgtgcgcgccggtggaggtgcggtggttgggctgggtttttacctcgaggaactcggcgccggcgtcgaggtcgcgctgctcggccggccgcggcgtgccagcttcggcgccggagacgtacaggttcttggcgagcgagaagctccggacgagcaccttgcgctgcttctccatctcctggttcagcttcggcgaggcgggcatggcggcggcggcggcggccagcttctcctggtacgcgacgacggcgcggacgaacgcctggtaggccatggggcagcccgggtagtcgaactcgtcggagccggccttccgcatgcgctccgggtggaactggagccccatgatgaacttgccctcgccggggttgtacgcgtcggggtcgtagaacccctcgacgaggccgtccggcgcgaacgccatgggcacgaaccgctccgccagccgccgcacgccctggtggtggtagctgttcaccgtcagccggctgtcctcgccgtcgagcgactccgcgaaccactcgtgcagcggcgtgccggggaggacgcgcaccgggtggcggtgcccgtcgtagttgtcgtagttgatgtggcgaacggcggcggcggcggcggggagctcgtggtcgacgtcctggtagagcgtgccgccgcaggcgacgttgagcacctgcgagccgcggcagatgccaaggaaggggatgttgcgctcgagccagcggcgcgcgaggcggagctcgatgaagtccttctcgtggtcgatgccggcgtcgctcgggtgaaggctccgcacagcgtcgagctgctccgccgagagcccccccgaccccgcaccgccgccgccgtacagcgacgggtcgacgtcctcgccctcgcacagcagcacgccatggatgggctcgaacgagtcgagcagcgtgtgcacgccggcgacccgcggcacgatcaccggcactgcgccgtatcccacgatgaggtcgaggtggtactcccctgcgaacatgcatgcgccatgcagcgcatttcagccaacgtcctaaccaacaaaaaaagaaaaatccatggaggaggaggaggaggagatgacgagagctcaccgacgaagtcgacgaacttgttcttgcggacggtgcggcgggagacgatgagcacgcgggggaggatccgggcgagatcaggggagggagacatcgccgctcggctcgacgaacacctgctgctacttaatctctgcaagaaatcaaccgatgatttcaaggcgattactcgagaggattaatcgatcgattgatcgtgtgttgttgatttgctcggatttgggagggctcaggggtggggtgaggtatttatagaaggtaatcaatcggaattgcagcttggattactagacggaatcgatcttatcaccgaattaatttaatcttttttgctttgatgaagcggatgcgcatgtgagtgcgagagctagtgcgactatgtctgggcgccgcgttacagctaccaaggtcaaaggggcaaatgactggaaattgctacatgtccccaagagatgtctatgccttgtcggactgatttcatcagtactagtactggctatgctaatccagcagtactattaaatttctatttaattgtgatgaaactatataattcggattatctttttgtagctataatccacaaatataattgctccgtttaatattacaagtacttatagctggtttggcgtctccttttaatattgtataagtctaacttcattacaaactttgctccagtagtcgctcaccggaaaagaggatgaacttattagagttagagactttgagaagaagatggccgggacatgaatctcccatatcaaattgatacatatactaaaatccgactaaatttcactaaaatgttgaaaaacaagcaaacaacttgtgaggatgttattagttgggatatatatacaaaatacacacaataatttctttagttctaggataaacggtgaatattgcataaatcaaagttgaactaatcatcacaactatgagggaaaaaatggtcgaggagattaagtgattaaatcgtttgcaatccgtgacaaccctgaaagggacatgttaaactagtgctggatgccatcatggaaacaagataaacgtgtgctaggacatacaagctaacaaaagaataaaaggaaccatatggtttttaataaatatgctacatcattttatctctgtggatattatggatttttttaggtccataattcacaacaatagaagtaacaacccatatcatatgccccgatgcttgtctattgatgtggcaactatctctttgctttggttgattatcctagttattctgtactacgctgaacacaaatacatgatggtttttatgtgggcgtttattcattgagttctctatgatttggttcatttatagatctactgctcggtgacccttgacattctattgggcttattggctcacctttgatagattcaaatgctagctctttgtcccaagggttttatagtctgcattgctagcttatatgtgttttatctttgcactagaaaaatttctaggtacacctcttgttttgacccgttatcaatgtattttaagcgaagttaaatattaatatatgcactagtgaactatatctcaaccaattgacaacaaatttatggagggaacttttaagtgtgccacataaccgaaaatatgggtaagaagatatttaaggaagaaattgctagagctcaaatttaaatattgtaaactaatatacaacctcttgttaaacaaaacaaattaaattgtgcatggagtatggcgtcagcaatatatnnnnnnnnnnnnnnnnnnnnnccatgcaatttgccgatttaaaatttcagtagtaagtggccggataactgttggaccaaaattcggatatacaacgtgtatgtacttgataagcatactcatctctaagtagaagatcagcatatgcctattagcaagaagcatgtactactgtcttgggtttgattgtgacaattagttgcgttgtttatgtaaaatttgacaaattctgcgatatgattactagtactactccagtaggtttgacctctaggaatgggaatggagtactcagtgccgacgtgtttggtggttatccaagggaggctgatgcggccagtgacaagcgtctgatgtgtcggtctgagtgcgtgtgcgtttaaatagccctaataaaattagaaccatttcatacacgtttatttattttgccacgttaatttacacggacaatagtgatcactagtgacgtgattataaatatattattcgtctatctgcaagactatgggagaatagactcgagtgaccggtcattttattctacaggaatgaacggcgtgcacagcttataattaaataaagactaaatctttctatcaggttaaaccttctcttctaggataaactaaagaaattgaagagcatttgtaaacatatgcaagcatggggcacgccaaactcatattaagctcgaaaagatactcgcttgtcttttatagtagctgattggttaggtccagtagagtacagagactagcagctgtgtacacagtgcatagggaacgcgatttcggccagcccatgcgatgcacgcttgagactcgcgctgcccatacattgtgtttgtggcttcattcggagatcgcacgtatgagtggagtattctattttaaaataaacaaatttatagcgtatcataataaaaaaaatctacgtctagaattgtagcactaatatttgtttattttgaaacgggagagaaaatcagtgcggatggatgcagtgttacagagtgggggtgtgtcaggtgatctatggggaggcggggatgcatggaagcatcgggtgctgcaaagtgcgaatccaacgacgaactacgggcagatcggtcacgtacacgatagatgcagatgcaggtggtatctggggtgctctgaactgccgcctgccggcggcttggcttgccgcgtcgcgagccgaccggttgccatccaggggaggtgactcctggacttggacgctccaaatcatttggagcacgcactcctgtctctgtctgcttgcctgaatcctcacttgctcagtgcagaactgcagaccacaaattttaacaatgcgatcttttctgaaaactaattttacaaatgaaccgtggccaaaacttattttaaaaatgaccatttttttcagcgccaaatcgtatggcgctgaacttagacacctcagcgccaaatagccggcgctgacattggcacgccgactcagcttctcatccgcgatgacacgacattcagcaccagttgacgtggcgctgaggtgtctaaattcagcgtctctgaaataagttttggctacggtttatttataaaattagttttcgaaaatggttgaattgtcataatttgtgcagtgcagacagtggctcactagtcactactcaccggagaagtcacctacctacctcctcttcttctaccagaagagccattctttttctagcaagatcactacctaatgctgaatattctaggattgatcatggttcatggaccagtttttaccacctgcaaaattcagagttaacacagcccaaaggggccatcaactctgatgcacctgagaagccggagaacggaagaagtgaaccccccaaaaaagaaaaaaaacatttcgtcctaattgtgtttgttctcaaaatcagctgtgatatgtcggttgattttgagaatcccagcatttcctaatcaaacaaaacacaacaatgtatatatgatcctcgtttcagtttctttaagttcgagtctacgaacaagtagtaatgaagactgtgctgaatcatggatccacaggaacagagctagtagcaatgtgcacatcgtgcagcgcgttggagtctgaagagcccattgggcgtcaccggtgacgccatttctcaacaaacaaaagctttgcttcaacttctgtaaccatcatgcaactgcgcacaacaacaaccgtcctggaaagggttaattatcgagttttttttagagtaccttcacgtgttcacagaatcacactaatcgttgtacgctttatttctaaatgctacggccgatttcgctctgtcactcgcaagttcgaagcggcacagaagtacacagctgcttgtgtgttttctgaattctggtaaaaaaaatttcttatatatacagtacattattggctgaacctgtttagatgggactaaagctttcaagtccctatcacatcggtttggacactaattataaatattaaacatatactattaataaaacccatccataaacttggactaactcgcaggacgaatctattgagcctaattaatccatgattagcctatgtgatgctacagtaaataatctctagttatggattaattaggcttaaaaaatttgtctcgcgaattagcttttatttatgtaattagttttataagtagtctatatttaatactctaaattagtatctaaatacagagattaaattaagtccatggatccaaacaatatcttaagcttttgctgaaaccattgcaggaacaaaacaaaaacatcatgcagacatttaccctatgtgatccaactatccaagtacattctgaaccctgacaatctacaaactgaacgagacagaaaaaaaaaagcagagaactgctccgcattctcgggctgcatcgatgggctgtgtttagttcgcgaaaagaaatttttcaggtgtcacattggatgtttaaccggatgttagaaagggttttcaaacacaaatgaaaaaactaatttcataactcgcctggaaaccgcaagacaaatttttttaacctaattaagccgtaattagtacatgtgagttactgtagcatttatggttaatcatgaaatgattagtctcaaaagattcgtctcgtgattagtttttgtttttacctatatttaatactttatgcatgtgtcaaaaatttgatgtgatgtttttgggaaaaagattttgggaactaaaccgggtctcaatggagatcactaaactgaagcaggtgatcaccgttgagtcatcttctgtacacgacgcggcaaccttgagcctgtacgatgggaggcacatcgccgtcgtcacggggacgccgcgctatcgcggatcgccgctgttgcctttttggctcctgggtttcgccgcctgagaaagatcagtttcaacgtcacgtcacgcgtcacggctcaagcatcagcaggaaagcaactgaagaaagcaagtgtagcttcttcagagattttctgaagtttttgtgcacgtgcgagctgcgtggagagaggatgatgtgtgaggaagcagcctgcagccgtccagatcacgcagtgttggtcctgtcgaaatcctgtatattggatagtacctgcaaatcatcatcagacgtttacagttctgcaatttagcatcagaagctttaaacttttgagctagtctcagtgatcattatctgaagaagacgactcctaaacatcattcaacacaagtacctccaacagtagaggttagcttattcttttttctttcttaaaaaaaaaacatagccgattccattttaattatatgattccgaagattttcttgatgtgggaagcgcgtgggacgcggtggagaataggcggaagcgagattaatctgataccatgaaagcgtaggtgagtaagcccgataattagattgattatagacatgactacatatagggacggtacattcttatatctataaccaacttataaaaacagaattgggatatgattaaaccgaaccggatacaatacaatatatctctaacagtgagcagtaaagacaccagtgcagatgaacgatattgggccgccacatggcccatggctgcggcccatacggtaatcccagccgcctgcgtcaccttctgaatcgtagccgcacgcgcgccaccatccaacggttgccttggacccagcaggggtcggagaatttccccaaacggctcgtccccctcctccccgtcaccgtcaccgtcaccgtctcgtctccgtctccgccgctcgtcgtcgacccttcgtcgagccgccgccgccgccgccgatccttctcctcccacctcgcccgcgccgatggagcagctcaacgccaagctctacgacaagtacaccgccctcaaggtatacataccgcctcgtctcttcccccattctgtaaccctacccatggacacggatttgatttcttctcaatacgtttcgcactgccgctcttgatgcgcgtagaagcggaagctgctcgacgaggggctggaccagaagcgggctgccgacatcaaggagctccagcaaggtaaaccgaggaggcggatgtatttcgtcggtttttcgaagggaggagggtttaagacctgggagggagagaaatgcacatcttttggaattgggaggaatttctgttaggttgttgacttcgctccgttttgttgtttctgatgatgcagccatgaaagattgggtcgccgacctccagggcgagaacgagcgcctcattgccaagctgtaagattcaaatgctgctcctgcggcgatagggtttcacgcgttcgtgctgttttgggcttccgctgtttcggggaaatgatgcctgatccgttgctttctcttcttttgttaatttcttgatgatgccaggacccaaaaggagcagcagcttgtggaggtccagacacttttgctcgatgagactaggaagagtaagaattctttttgctaagattataattttataaggaaatggttggtagtatgcaagtataaagtataaaccatgattgggtggaggtggaactgatgtgcgtctttggaaatggagggaaacaatctgttgctgattgaaagcactatttggtctgagttctgtcttccatttactttggtattaatgaagttgacttaattcaattttgtttacaaaacatgcagcaaaggagctcaatagtgaaatattgaagcttcagtgtctcctggctgagaagaatgatgcaaaccatatagctacagggtctcctgacacaaccgctgaaatgattatagaaaatcaaactccaattccacctgcaaagaagacaccaaagtcaaagagcagggagagaaatatccacttcattgaaaaagcgactgttccttgtaatggctttcaggaggaaggaagagatgtaagttttccgtaacaggaactacttattagtgaagtacaagtatgcaatagaatgagtgtgttgagctcttctaatttctgtttatgatttggattggttttgtagcttgattcctgtagaaggcatatgagcatctcaggttagtggtaatatacacacatgcagtagtgaattgtttgaacttaaaagtatgttgtttgcagggagtgcgacagaagaaagctccagtacctgtatgtttcatatgctggctgaatcagtagttgggatgaaattttcagtgaagaaccaaacagaaggattttcactttcagtctcccatgaagctagtggtatttggaacatcaaattttatgctattattttagccacagcatagtactggaatatctcatcatagttattattcatcatgttttacttgtgttcatttctctttcacattcatttgattttgcatatagccacctccatgtttgccaagctagctgagtattcaagcaaacagttatgcaaagaacaatcttcaacctgaaaaatgtcctttaaaccaccagaagagttgtgtgaatacatattttaatgctttaatatctttgtcaagcatgtacacatctctttggagcttagccgtttgtagcagaacttgtataccagcatacagtgtagttacatgttgggtgcagaacctgaggatcatgtcaccaatgttagaacatttgatttgtaaagatcataatcaagtgtaaggaacgaattacatttctaactgaattttttaaactgttgtaggctacagtttcaccctgacatgggtagaccaacctggtggcggtgaatggtcatatcagtactcgtcgttgggcaccctggacaggattgctatgggctggatgaaggaggacataaaattcagcagggccatgtgtcctgtattctttcagcagatatcgcgcatcctcagacaaggctaagctcaactgggaagcttagtttggattttagaggtcctgacttttgctagacagtggactgaaactgacttgttttaggagtgacacgaggctttatgtatcctttcgtttggcctttgttgttcctgttgtgaacataacaattagcaagtgattcgagatgttggtcgcctggttgccgtatgtctttatgtatagcccctgatttgaactctgatggttctgaaaataagagcttcgacattgctgtccaatatatcatactcggtgtgaattttgaatgggtgcctgtggaaaatgattcggaatacaaactttgcgtatgagagtaagacgtccaaattgttactgaacccttcaagaatttaaccaagcaaggagtcgtttgggcaggtaatgaggatttcacgtaggcaagtgccaggtcaactggcctaaggtctggtcccccattcggttcggtatggtggccttagagttaccgacttaagaataatttattagagccttacgtctgagatggctagggtttgaataaagagcaccaaacaaaccttggatcggaactgaaacaccctatgatgaattggataaggacttgtttgtggtgtcgactaaattccttattggtgatgggcgaaaggcgagattatgggaatcaaattggattggtggccaaagcctaaagagcctggcgtcaaacctctatcggcactccaagaggaagaactgcactgtccaagatacaatgcaacaaggaagatggatcaatgacatccgccataccctcaccgtgaccctttttacatagtatctgcgaatttgggtggtcctagcacgtgaacccccccccccccccactaacggagggtgtgaaggactcaattgtccagaaatggacacccaatatggaatataacggaaaatccgcctaccatttccacggcaaagctgacttgggaggtgggaggtgtgggctccagcaaaatgtaagatcttcagctagctcgcactgcaaaaccgggtgtagacagcagaccggttgcaactcaggggatggccaaataactattatttttcagctttgcttcagaacaattgaccatctgttgtttgaatgtccaatctcgaagtaaatatggtttggcatcctaaaatggctacgacaagggcacatcatcctgaggtggaacaccagcatagactgttggattggtgactacaagggacaagcctcccggaggaaacaaaacaaaaagggtttatcagcgtattttgctgaaggttcagtattttgctgaagtaactatgaacacaatgccaaccatatctgttgtttttttagtagaaaggcatgagttctgtctctcttttttttatattaagaagggaagcaagcggtacagagttcagtcaaatttctcaacaaacaaaactttgcttcaacttctttaaccatcatgcaactgtgcacaacacaaccatcatggaaaggattaattatcacgagttcacagaatcacactgatcttcgtacacttgtattccaaatgctacgatggacttcgttgttgtctgtcactcacaagttagaagcagtacaacagaagtacacagctgcttgagtgttactcgtatctgagttttggtacaacaaaatatcacgtttaaacataaacactagaccagctggcataaaagaaaacacatttttaattgtcttctaattctatatacattcttggttaatctttctctgaaaccattactggaaaacaaaaacaggatgcacgctttgtgatccaactatccgagtacagtctgaaccctgacaatatacgaactgaatgagacacacaaaaaaaaaaaaaaagaacacagagaacttctctgcactctcaggttggcaggcgatctccatcgactcatcatcttctggacacgacgcggcgagcggcgaagaagcggtgatccgggtggtgaactccgaggaggccgagccaggcgtcggcggcgtgcgagagggaggcgaccagctgcctgtctcgcccgcccggtgcccacgccgcgaccttgagtctgtacgacgccatggcgaacgtcgggaggcacatcgccgtcgtcacggggacgccgctgttgttgccttttggctccgggcagatgccgcctgaaagatcagtttcaacgtcatgtgtcacaggctcaaagcgtacagcaacccaaggaaagatggtccagttgttcggtgttttttctgtgaagtgtttgtgcacctgtgagctgcgtggagaggggatgatatgtgaggaagcaggcgtccagatcgcatagtgttggtcccgtcggaattcggtatattggatacctgcagcgatcatcaggaacgaagaattcagagtcaaatattttactccagttagtctgaactctgaatggtaaacattattcaacacaaggacagtattctgctagtaccatgcgacggacatccaactggttggcgacaaatcacagctcctgagagtattcagctccggaaatcccctggcaagactacaaatctgcacgagttttttgattcagaggagtgacaaaaacacagtcattttcatcagggagaaacgataagagttcttggagtaattgttggcatgccttgtcagctagcggttcacgctggtagggaggctcggattccagaaactcgaagatgagctgctcgtgggaaattctcgttgattcgctttcgtcgctcgatgcttcgctggtggaggtttcgcaggtggtatcttggactgagaacgcatccgtgctgcttggacatgagtcgtgctcaaggtcgctcatctcttcactgcctgtgtcttgacagtagtcgccgtcgctgtcttctccacttggcctacgattggattgaacaaacaccatatcagaaacaacactagggattaacataagctgattccgttttagtgatcctcaggttaaccctctctcctactctcctatctgtttctgttagttatctgtacccgtacggtgctcccagcagttgcgtgactgcgtcagcttgaatcgtagccgcacgcgcgcctccatccaacggttgccttggatccagtgggaacaaaattgcatatactaacagtaaccgctccttggattacatttgtgatttgtatacgatgaattggagacgtattgtaatcactatgggttttgccttcctaatgaagtttcttaagtgcattcaggatacgaactttgcgtatgagaaatccaaattgttactgaagatagtgcagcctcaatggagaagtgtagaaacagagatagggacctatagtaactcgtactactgaatactgattggccctgacactttaagtcaatgctcgcaaactcactcttcagagttcagatggctttacaagacttgttttgtctttatgttcctctctcttttttttgagaattctttatgttcctttctcctgatgcaatggtcacttaagcacctaaaattcattttattttcctgtcctctcataggagacgcaaaatgtaggagtacttctcaaggaatgtattggcaaatgtacttgttctgtaattctgtaattatgaactacattacaacctgaagtgttgttctatttctaaggttgagcattgtgctgaagtaactatgaacacaatgccaccatagctaataaaccatttgtcttaagaacatctacaagaagtgattcaacggtgatttgaggatgtattacctggaatggtagaaatgcctccttaatcttccataaagctggattgcagataagtaagggacgtaatactgcaccacaccgtcactgcaaccattcagaacaattggcacagcgataccatatgcgctgctctctctgaacccatcccagaggtcgcccaaactgaagaatggcagcgcattttcttcatcagattgcttccaaccattcatgctcttctgcaaagataaccatacgaattttttcatgtcacagaagctgaaaagaacctctacttagtcagaaattgttaccgaaatgaattaaggcagttgttttctgtttcttcttagtcagaaattgagttatagaaacaaaaatgaaaaaaaaaacaacatctgttttggaacatacataattccgtattagcagtgaggcaactaatactcttgaaagatcatcttggatagtagtatcagaattcagaaatgggggaaatcaggaaatgcaacagatcgatgcatgggatgaaaagcgtatcaccttggaggagcaggctgtcgtcgggacaaccggcgtggtggcctcgaggaacagctccagattacaccgtctcgccgtcgccggagcgccggcggcggcaaacctccggccacaattcgccatcagctcagcgccctgtgttctgctaatctgttgaattggagctcgaaagcaatacgcgattccgattcagttgcttgtttggtggatggcataggccatagggaggtttagtggagtttaattgagaagaccatataaagcaggtaacggctacgctattaataagctgccgttttggcttccttccagaagtgcgttgaaggtgccgacgcgtggttgaggatggacacgtgtagggctgggatggggttggcaggtcatgagaacgatgggtggaccggccttaatttgggcggtgggagctggctgggcacccatggacggtgtcgtttatggggcaagtgacgcgtaattaattaagccggtgatgctccatcagcggagtccttggccggccggcgccactagctactactactagctacgtcacctcgtacaacttcgtcacgagacgagacgacttcacctagatttttatgggccgtgcgttgcactgcacgaggcggattagccggg

SEQ ID NO: 2830 - DNA, 23655 bp, Oryza sativa
  unsure (1)..(23655): unsure at all n locations
ttgtcgacgatctgctcgactgctcgtcttgctacctcgctttcgtctccgttagacctggccctgtgatggtactaggctggtagcaacacagtcaacacgtcgggcaatgtcgaagtaacgcaggctatgctgctgttaagtcatggtctcatggagcagtggagtgctgaaccagctgatccacgagctgatgtatttgggccgtacagtccgtgatagcccaagcagaaaacaacggcctgcctgcctctaaagatgggtctttctctatccaaaaacggaggcccagctattgtccgtctggcaggccggatgtaaccggcctcctttgcagccccgctttggatggatgccacgtggaaaccccagccatcgaacggatcgctcgtctcggcccaaagcgcagcactaggagagcgtaggctcggctcgagggcacacgctgattctcctttcaggctccctatcggctcgatcgattcgagacgcggagaattttcgacatagcctggcgactctaatcctccgatccggcgccgacggcgtccctgagactgacgtatccataatccatgggagcacctcagaaccacagcggacgtgccgagctccgcagctgccaggtgaccaacacgcggcgaggaataagaatttgttggtgttcctaattaatttggatccagatggaattcttgaagatttgtttctggagcttgaaacgttctgattccagcagctggtggtggtgcatagccgacggccacttcatcacgatccgagaacaatcgatatgatgcgtagcaaacaagatagatcgattgattcataaattggagaagaaccggaatccggcgtcatcgccggaatcagccgtagtcgccgatgtctcggggttcgtccgcgacggccgccaccccgatcggcacaggcgccggttcgtcggcgtcggccacgaaaacgagaagacggctgcgcggagccgacgatgaacctaaaagccgcgtcggactctgagccgagcctacgccctggccgtgctagggcctgggggtggagctgagtcgagcgatccgttcgatcgttggggtttgcacgtggcatacatccagagaggggctgcaaaggaggccggttacatccggtctccaccaaatttttttccgtggaacattcgtcaagcacaagttaaactaaaactgaataggagtagtacatgatttccacagaaaaccataagagaacgaattaatgattcaaacagtaataacgtctaattttgttgttcttgctaatctgctctacatacaaaaccaaagctcccactctggttttctttaatttacagtctactagccagttgtctgcttcaagtatagtcattccatcgccacttttcacgctgtgcttcccggtgttgataaccttgatctgctcgacaaaaacgcatatcgatcttcgtcagcgattgatcatatggaattcagcgttatcagaaaaaaaaaaaacagagtgatcagcaactgatcaacacgacactgaccgctgcgtgaaatccgaggcagaggaggggtagctcgacggccgcgacggggacgacgagttcgagtggtacggccgcggcggcatggcgagctcgtggacgcttctctccagcatctccagcaccttgcccatcgacggcctgttcgccggcacggtctgtatgcaccacagcccgatcagcgccatcttcctcgcgatctcctcgcctcccggtgatccggcgccgccgccggccgtggcggcggcggcggcggcgacgctctgcagcacgccgccgtcctcgagcaggtggtcgtagacccagagcgggaagaacgtgccgctggcgcccttctcggcgtaggccttgacgttgctcccgccgccgaccatctccagcagcagcatcccgtagctgtacacgtcggacttggtcgagatgtcgccgaacccgcgggagaacacctccggcgcgatgaaccctatcgtccccctcgtgtccgccatcgacaggatgctctcctttgggttgcacagcttcgccatcccgaagtcggcgatcttgggccggaatccctcgtcgaggagcacgttgtgcggcttgatgtcgaagtggatgatccgcgtgttgcacccgtcgtgcaggtactccagcccccgcgccacgccgacggcgatctcctgcagcaccttccaccccagaacatccctgtcagggctcgccgtcgccttcgncttcttcgncttcgnncgcgncgncgncgacgtngagtagatgtacttgtccagcgagccattgggcatgtactcgtagacgagggctcgtttggagccctcgaggcagaaaccgagcaggaagacgatgttgacatggctcgtcccgccaatgctgaccacctcgttgaggaactcctcgccgttgggcttgaagtggtgaaggaacttgacggcgacggcgcggcggtcggcgagcgtaccgctgaacaccgtgccgtagccgccctcgccgagccgctggctgaaggacttcgttatcttcttcagctccgagtacctgaacctccggggagctagggatccgtaactctgcagcagcttctccacctttgcagtatccgttctgcttgcaccgtccatggcgttcagaaaactgaaacgattttgcatacgtcggcgacacttgtagacgatggcgatgcatgccaatagcaccaacccagtcgcacagatcgacagtgacactgaaagcgacgaagcaaacaattagtatagattagtaattactaccaagtggtaaatttatctagataattgatcatgacatcattattgaagaaacaattgatcatcatgacatatacgaagaataaaaacaagttgaattatattattttgttggattagttaagcaagaattgaagactgaagcggatgcatacctatcaggatgaccttgttcccggacttctttgcatctgaaagggaagaatcatttcattttagtcaacatatgtacaaaatatcgccagtctattccaaccaattgaaatacattgaacgagcattaatttatttccgagattaatcaaagaaacagttcctgatcaaagactaattgttccacacacagttgcgtcattgatttcctgatgactaattgaaactggttggaccaattaaggtgtctgaactattacttaggaacaattcagacaacagatatcatcgtaaatttgtacatatgtacgacgttgctttattcgaagtatttgtacagtggacagagaccaacatgtatctgacctaaccagctacaggagagtgcagcaacagccgccgcgagcagcaacatatctcgtttgattcagacatgatgaacaaaatgatcaaaataatcagatgaaatcaaacaaaatcgtctcttttcggacacaaaagttagttttagttgaccattttgctcctatcattgtgatttcaaagtcaaagtcgataagtaagcactaacaactaaccaaccacacgtgctggctgtatacgtattctacatgtaaacgttgctgagatcggagaacgtgaaattccggctacttgtagctaaagtatagcttcacagatcacactggggcttatgtggagtccattattggttctcggcaaaagattgtttcatacgatgagatcgtgacagccaccatatgttgattcagtaatttaattagtccaagcccgtgcaaaaagtcattccagttctattgtacttccactattgctagtcctatcaagagccttgtcctgaaagtacacttcacctaattaaaacatgcataaagagatcacctttttttcagttccagaatcacaatctacacttttttttcttattaaaaaagagcaattttacggtccttgagaaggtaccatgaggtaccactttttgtattgtaaatttagtacctcttggtacctagatactatgaggtgccaaattttacactaaattttcggtacctcatggtacctcttcaagaaccataaaattgctcatcagaaaaagggagcatcattaggaaattttaaagaattttggataacgtgaacggtcaccgattgacaaccattgttagattgttaccctccatataaatcacgttcaaaagtcaaaatagcttaatctacttacttccttttgtcagttctaaccaccctggtttttggcacgaccacgcaaatacgaactactactacatgttcgttgatcctaactactgcttgtgctgatcaatcaataaatagttaatttgaattttaatactctcaagtctctaactaatttaatttgagtaatagttatgtatttcccaataatcaaattcagggaaaaaaactgaacgaatttagcacaaagaacagatagatttacacttaccacatatccccgggcgcgatgagccgtcggagcagatgcaggcgaacgcctccgtgtcggcgtcgtagccacactggccgccgctggcattgcacgccatgcagtcgccggcgggcgccctccactccagcatgtagcctccccggagcagctgcgggtagtccgtcgggctcgcccccggcacgccgaccaccggaacggccgcgtagtcgcagcctccggcgaccactctggcggcggtgttgttgtagctcgtgtcgagccggaccacggccttcgctcccgggcacgtgacgttgacgaaccctgccggcggcggcctgctgctgctggtgcagttgaagaggaagacgagctggctgttggccgggctggcggtgaacggcgcgagggtgaggctggcggagacgtcgatcttgggcaccgggcagccgctggcgtcggtctggacgttgtcgttggcgacgacgacggtgcggttggcgtacgacacgccgaggatcttgtacccgctgcggaaggagcgggccagcgacgcgcggctgccgttgtcgcagttcacctggaacgccgcggggccgcacggcgcggacgacgacgacggcggcggcgatgagtccggcagccagaacgggtaggcgatggtcacgttcccgcacctcctcggcgcgcagctcgtgacggccgcctccgccgcgtgccgcggcgcgagcagacatgccgccaggaagggaagcagcagcagcaatggcgtgtccatcgcgacgacggttggtggcgcgatgcggcgaggaagaggcgttgtattataggcgaagcgatcgatggatggatcgaggagacgaggaattttacatgtgtgtagttgacttggtttcgtgcaccacttgcgtcatttgcttggtcactttcttggaccattctctcttcttctggagtagtacggagtatgaaacgaaacgaagatcggtaaggagagttcgttggggttggcagttgccactgctcatattaatctgcatgcgagttaaagttaaaccgcgattggtgcatattatagtacgtgctgattacgtcagcacgcagtgtttggtgagtgtgcaccttcgttgataccagcgtacggaacttcaaaatatttcaaatgcaagttggataaagaaaagcgcagaggaatgcaggtacttgtctcactgggccgttagctgaagagggccagaataggctttacagcccaaactatgggcctaaattctgacccatcacatagtacgggccagaattttgtgatgcgtccgtgcagcccttgttcggttgttcccttctccccggcgccgccgcggcgtcgccgtcggcggcggtgcaaccgtgcaggattgcggccgctgccgtctcgcttcgtgagccgcagcagtaaacgccagctgctcggccgtaggcattgagggagtcgccgaacaacgctagtgttctcctccgctgcgttggtggcggtggtgactggttagggcggcggattggggatggattacaaacacaagcaacggggagccggggagatgggcatcctgtcctgtactttctgcgttgggcgaggcatagatcgagcagatgaactcatcaaaagttcgaaggctgagtagaggtgcccgctgcttcttcgtttcttcagaggaaccgtggaggaatccagtaagtaacttgctctttgctcttttgcgtactacttttccgtgaaaattttggcactatgatgatgctagtttttgagcccatagatcaaactagggaagtgggaaaatgtgataattattggcacggaatcgtaaatcgtagcttctggtagatcaaattgttgaattaaattatgaaacaagttagggggatggacagaattcagaaatatcttcgattcagctaccttaaacacactagtcaatgccatgacccatgaatgtgtgatgatactatgccaaaatttgactgcagatcatctttttgcatagttggtagtcactgtaggatcctttgaattaacgaggcttgtctcctcaacccttagcacttcacttagagcttgtgcagctttggtatttatagtagaactcgtactttctgtgttaatctcctgagctggatgttctctgaaaaacagaaatagcatagatgaaattcactgaaaatattaccagtccaaatcataatgtgtagagaaagtatcttacagtaattcactgaaattttgttttggtggcatttccagttcatccaaacttctctcgaacatatctaaaacctgggttattgtcggccgatgcataggcaatacttgtacacaccacaaaccaattaaagtcatctttttggctatttgctcaacctcacttgtgacttcacaagcttgtaatccatcatccagagcaaagtggtcataaatccaatctggaaaatacttttcacttgaattttcaaccattgacttagcattcttccggcctccgaccatctctagcaacatcattccgtaactataaacatctgactttgttgaaacaattccaaaggatcgatagatcacttcaggagcgataaatccaattgttcctctagcacctgtcattgaaagcttgctctccttggtgcggcacagtttggctaaaccaaaatcagcaatctttgggcaaaaatcctggtctagaaggatattctgaggctttatatcgaaatggatgattcgtgtgttacaactatggtgcaagtattctagcccacgagcaatcccgattgcgattccgtaaagtttttcccaccctagaatttctttgggattttctgaatagatataatcgtctagtgaaccattgggcatgtactcgtaaagaagagctcgttttgacccctccaaacaaaacccaaataagctaacaatattaatatgagaggtcctgccaatgctcataacctcattcacaaattcctctccatttccttttgagtcatgtaagaatttcaccgcaaccagacgaccatcttgtaaccttcctttgaatacaacaccataacctccttctccaagcttataattaagaaatgatgttatctttgttacttctgaatacttgtatcttgttggagctattgatccataagatattatgagggcctcaatgttcctttcactggtgctgctagtctttgtgtaaaggaaataccgtagttgtttccccttcccatgccatattagcacatatatacatggcaagagcaagcctgcagctgctgctgtcaaaactgagattaaaacacatgttatttccttttacaaaatcataatggtatactacgaccatttattttgcgatatcattggcttttcctattaaggatattatttccttaagtttttattttgttattatggtttatgattcaatggtattgtggtaaatgtttttgacatacctattaatatggttctcctgccagttttcttgctgcctgaaacaacagattttatcagcaaaagtaatgtcaagagtagaatatttgatgttgtctcaaaacaaatgaagcatcacgtttgaagttcaatattctttagatgatgcctgatttgttgattgtgttggctggagaataatcacagttacggttagctagaataccaagtattttttttccttcaaatctatatgataaagatagttaattagaagaaaggtatgtgccatgatcccagccgtagaagtaaaagaacggctcagattcggccaaatccactcggtggagttggccccagcttcaggggatctgaacccttctggccagatgattcttgtaatttcgtatctcaccttgttggtactgactctatagctgagtaatatacctctcttttcccacaaaaaaaaagtagtatattagtatattttcctcagcaacagtggggtgcgtttccttggtgttgattgccacttcaagatttctggcctaatttgccggctggcatctgtaaaatattgacttatgtgtagatttgcgcgatttctggctacggagaaggacaaacttctatgactgggtcgtctacgtgactacgttcaaagtcctctcgcactttgcagtcgtctctatgtagattatagcatatattgaccgggacgtgatatgtttctctagaaaaattctatagcaaaattgttttaaaatcgtattaatttattttttaaacttaaaataattcatattgaattaactatacgctaatagcatatcgttttatgtattttctcaatctttttttctctcatctcaaacatactcgattgagagactttaaacacatgtgtatttgaaatgggaggaaaagagaagattgagaaaatattatgccattagcatatatatgagtaaatttatagtcattgataagttaccgggaggtatcgtattttctattgtaaaatttggtatctctatgtacctgtagtactagaagatatcaattaggagataccaaaaattgcgctaaaattattattcgtactacgaattaggaggtagaagtatcaaaattaggagacactgtaaaattactcctctcaatatcatacttgggtactacgaattactccattcgtcccaaaaaaaaaaacctaatcttatgtgtccaggttcaaactcaggattgcgtttttttttgggacggagggagtaagccatatggacgaacgtgtaacaatgtttaaagatcattttatgttttcgaaagtagtggaaactggaataggagctcaccggcgcatatcgtccctcgcagctctccgtcggagcagaggcacgcgaacgccgccgcggaatcgttgttgtaccggcactgcccgccgctcgcgttacaggcgtcgcagtcgccgaacccattcttctgccactccaacacgaaccccttcttgaagagcgggctgtagttggtccccgccgtcaagttcaccggcgactccggccacagcaccggcaggtacgagtacgtgcagttcccggctttgatcgccggtggcttgtcacggtcgtagctcccgccgaggtacgcgtagataggcttactgcagttggagatggtggcgttcacaaggccgtcgatctccggtggctccgtgccgttgcagctgtagaggaagcagatggcccggttgctgctgctaatcgtgaacgggctgagagctagactggacgatatgttgaagtcggtgcggcacacgccgtcgccgccgtcggcgacccttttgtgtccagcaacgaatgaactgttggtgtagtcgatgccgaggacgaggatttgcgagcccctcaacgacgccacgccatcgcggctacaccacaactcgaaggacgggtggccacaggcggcaatggccaacgacgaccggttgaggtcgggaccgcttagccagaatgggtacttgatggtgaggtcgccgcatgttgccggctcgcagacggcgtgtgcgtggtggcacaggaggagcaacgtagccaagagcgggaagaacagcaacttcgggttcatctagccactcaaatggtggagctagcagctgcctgcaggctactacacatggaggagtggagaaaagcagaaaactggaaggggaggaaaaggtctagcttgagaaataacattgccattgccttgttttgcttgacctttttccgatcagttagacgtcattttaatcaacacaagtggaaaagtcgccgtcgcctcttttttttttttttttttgagggaacaccggtggggactccacacctgaattaaattaaataaaaccacaatccaaactgtacaagtacaagaacagcaagaggagatacagagttacagcagttggaggggggaggagaggatcgaaagccagataggcagaacaaagtggtcacatgggttgaaacgattaacccagagcctagcatcctgaatgcagttgtggaaaagtcaccatcgcctcttaacttctgaggaggggggaaatgacaatttcaatcttctaagggcattaatagtgcgccacccattttactcagcttggggctaccacataggatgaagacacaagaagaataatacttgccacaagtctcacagtgctatgtagtctcaaagagtagccacacaaataaaaaaaatcgtttctctctcccttatcctcagtccgctcccaaccatctccgcccacgcgcctcgccccttctcctctcgccgcgcctcccctttctcctccggcgcggcggcggcgtcgagccacccaactgcggcgtggagcggcgcggcggacgacggcggtggcgtggagcggcgcggcggacgggtggcagcacgaacggcccgagcggtgacgtcgatgctggtcagcagggcggctcgagcgcctcccctccttcttctcttccggccaccctagatcgaggggcggctcggccgacggcggggctgttcgagcgcttctccatctccgcccgcgcgccttccctttctcctccggcgcggcggcggtgccgcgccaccgagttgtggcgtcgagcggcggcagcggcggcggggtggtcgagcggcggcctgagctacgcggcaccgggcggcggtctaggagcccctggtggcacggcggcgcggcgcagatcgagccgccgcccaccacaaccactccctccatccccgctccggccacctccctgggctccctcccctccccgtcccctccggcggcgctgggcacgggcgtcaccctctcctctccccggcggacgacgatggcggcgccgtcgagctcgccagatccgccctcggacagtgacggcaccgagctcgccagatccgtcctcggtcggcagcgacgacgacgatggtagtggtccatctttccttcctcccttctctctggcgagctcgggtggtggcctcgccggcgacgaccgccgcccccttgcacggggccatgccctctccggcgatgctctcctctccccggcggcatcgggcggtggaagcgaggcagggttgggggcggcaggacgacgcggcccacgagtgtgggccccacctgcgaaacaaaggaggaatggagagccaaagttggcttcgcggtcttgggcaagccacgcggattgccgacgtggggacgaatattcggtttctaggggtgaggctgaatgccacatgggagcattgtgaatggcctaatcgcgatgcctgattaatttatggtacatgccgtaatcagttactagcaaactattttcttctctagtgtagtctgtaggccgatagaaccgccctcaaccaatcatctcttattataacccactaaattctaaatcttaacaggtaaaatgtcacatcattatccattaacaattattatttaagcatcatacaaacatgctatattatctataattttataatttattaaattttagagatataaaatacaagcatgttaaatcatcccacataattcacataatatttcagtatatatctccatcattttttaatgtttatattgtttaaggtatcttacacattatttttttgacttattatcatcatagtaaactcccacagcaatgcgcagggtttcacctagtcaatatggaaattgttggcgcctccgaaagtgcaagttattctcatgactcgtcattcaaaatacagtgtggacgacggacagattggaacgaagagggtggcaaaatcagaaggtttgcccgttatgctatatggccgacgagtatgcggatcatctactggcgaaatatagggccacactgacatacaattggataagtgggatgaccgttactcagtcaaacactggtggaacctagtgcttgagtcccctaataaccccgtctaccatttcgaactccggtgatcctagtatcttgggaagtatggtgcaagcgtaatgcaacaatcttccgccacaaagcctcaacgccggcctcaatcctagccaagagattaaggaggaagctggagcataggcgaaagtagaagcaactagactctaagagtttggaattttaggagatatcatctaaggtttctttttctgggtctatcattctttacaagctctgtatatatctttgtatatttttctcctactctatattgataggaggcaaagcttttgccactattggagaaaccatctttgctgggttggccaaaaactacaatggccccggtttgaatagaaaccgggactaaagatgattttttgtcccggttttaaactttataggccctagatgatctttagtctcggttcattttttgtccgaggctatacagtatataatccctatgacttatcctcccaaactcctcatcttcatattccttcttatcctcccaaactcctctctcttatccttatcctctttctcagagtgagcgagcgaggtcggcggagctgggagggtaggcggccggccgggggtgggggcggcgagatggaggccggccggcggcggctcggcgcggggcggcgggatgggagaccggccggcaacggccagatgtgggacggtgggatagaggccggccgtcggcaaccgggcgtggggcctcgcccggcctaaggggaggcgacgggatgggtggccggccggcggcgggatgggaggccggcccggtttgatttgtttgagtttctcttgattttttgatgatttgtggatgttgttgatttgtgaatatatatgtgaatgtgtttgtgaatgtttatgtgaataaatttgtgatgatgtgttgtgaatgaatttgtgatgttgtgaatgaacttgtcatgatctgtgtgaatgaatttgtgatgttgtggatgaatttgtgatatgtgttgtgaatcaatatgaaaggaggaaaaaaaacggaggaaaaaaaaatagttccggttggtatcaatcgggactaaggatgcatctttactccgggtattttaaccggaactgatagcgatctttagttccagattcgtagtccagatttgctactcgggactatagagggttgcaaaccgggacttaaaaaaaggtttgtgcagcagtgtgccctcctttcaatttttttgtctcctccaggctaagcgaaaagtcggtgatggttctgagcaggagcgcgtggtagatggaattatcttggcaccgacttgcaaattttcatagaaaacaaataagtacagattaactttggtataaccagctttacacacacagttcagatattagccatctctcggcaaatcatcacaactgtttcaggccttccaactgctcttaaaccgattaaacttcaattttttttaatgactcacacaagacagtgcaaagttcatattgatagagcagaaaaaaaaattcaagattacaaccctagaagaccgtaaccaggaaaagaaaaaagtataccgtctcccacacaccgacagcaccaaacacaaacccaggaaaaaaccagcaccggactggccgccgctaagcgtgatcaatcgccgcaaggccaacaaaggagctacaaaagggatcgcccaaaacccaatccttacaaccgacacaaaacctcactctatccacatctcagggattcagggagagagggtgagagagaagaatggaaccgctctccccgtaggccctccgatgtgaccaacttgtacaaactaggacgtcgataaaagaggaagagactctagaacgagcttgcaacaattgtttgggtggtttcggcaagggcgttgcctagacgacgtctccagggagagaaacgacgaaagtaccgccgccgccgaccgtcgaggttagaagaatcttgactgggctttcgcccgacaaccccactagaggaggtgagacggcacgacaacgcccttaggagggtagtgacgctcgagcgccatcgttgccggcctggctgggtttgcacccaccatccacacctacctatccaccgttgacgccccgatgctccaccgccatcaaatcctctgccggcgcgcacgcatcactgcatcgacgcccctcgccggccagtcgccgcatgccgccatcagcagcacccgctgccatcaacctgccgggacgcgccggcctccctctccctgccgccgggcgtgccggcctcttgcgggacgtgacgacctccctgtcatctcccacaacgccctcctcctccgccagccgctcccgcgcctactcccacgtggttgccgcgcctggcaccacacgcacagctcctgcacctaccaccgcagcacgcatcctcctgtcgtgggctgtcgtgactgccagtcgcccacggtccacgatcgccggtcgtcgtcgtcctcctcctcccgtccacggtcgccgtccggcccgtcgcccgtgcatgccgaagccgtggacaccacctccagctactatcggcgccggcctccctcagtcgcgccaaacgacgacgcatccggcccgtcgcccgccactgctcgcgccgtctcccgctacagcctcccgtcgcccttcgtcgcgtcagctgtgtgcccccgactgaatccgtcgaggcggcgctagatccggtcgtggggacgccggatccggtcgcggcggcaccagatttgcatctccaagccggagactcgccggcgccgccgccgtcttcacggagctcctccttctcacgcaagaggcggagcgtcgctggggcttagccccgctgccaccatcacgactcgccgcccggctttccgggcgacgtgctccggcggcggtgaggcaaaggagagggggaagaggggcggcgtcggatggctagggtttcgccccgagccgcccacgtgaggacaacgcggagctctaatgtgctcccttaaacttcaatttgaaacagatgagcaacgctaaagacctttgctgcaaaatactgtatttgcacctaagatattctgttatttgagtttgaacacgcaaaggaattgccacgggatgaagtcattcaaaccagagaaggggaggaaagattagcaggtgggttaaatattgatcattccttttccttgattttgacttttacatggagtaaaaaggcaatgtcggtaaatgattctgattaacggatatcggttgcgatcaatggtccagcctggtggagtcacctactcacctctcaccattctgtcatcttgtgtttctggttcttctgccctacaagtatcaagcgatcttaccactaaaaactactagaggaatattatctgaatccatcactaacacgtccattatttttaagttccttttgaacgcagtataatgaatttgtatgtagttgatggacccttttagagatgacacttggtattgtgtgagtactatcggcactcaccagttgacaatgctggttaaactgattcgcgaataccgatcggtatgttttatctacggttcagcccaaatgagtacgaaatggtcaaactgatagtatattcatttcggctgcttatgcgcggtaaaagaaatacagaggtttcaacgagtcgcgggacaaattactcaccgcatgtcgccggctgcaggcggccaccggggcagaagcacccgaacgccatggcgccggcgtcgtagcgtcactccccgccgctgccgttgcacgccgcgcagtcgcccggcacccccggccactcgagcagaaacccgcgcctcacgaaccccgcgtagtctcccgccgatctcagctccgaccatggcagcacgggcaccaccgagtacaggcaacccaccgtgtccaccgcccgcttggggccaccgggatcatacatccggttcagggacatgaaccactcgccgccgccgctgaaaccggtgcagttcaccggaagcgaccccgtcggcggcgtccgcgagcagttcgcggagaagaggagctccgagttggcgcggctgacggcgagcagcgagagcacgaggatgctggacatgttgaaccgggtggcggcgcatgctgagctgtcgaccaggttggcatggaaggccattacggagctgttgccgtagtggatggcgaggacgcggaggtaggagccgttcaggctgggcggcgtcgcggtcgcgccggtggggtcgtcgtcgcaggtgacggcgaaggtagggtggccacagtatgcaggctgccggccgcgcagccagaacgggtacttgatggtcaggccgccgcatgccgccggcgcgcagctctcgccgaccaccggctgcgcgcgcgtcgcggtggcaagcaaagtgaagagcgctaccaccactagtagcatatcttaggaaaaaatttgaaaatatactttattttttttatattttgcgtttatatacctggctgtgattaatttgcaaaaatatacccaatccgcggaacggttgcgcgggagcgaggataaaccagccggtcccgctggccggggacgcggtaccgcgccggtcccgcgggctgggtgagcgctgcaacgctcccgcatgccggatgtgcgggaccggcgctcccacatgccgccagccatctcggttcccgaattggatccaatctcctatgcacggaaaacggagcaagccattagcacataattaattaagtattaggtaaattttttttcaaaaatggattaatatgatttttttaaacaacttttatatagaaactttttacaaaaagtacaccgtttaggagtttgaaaagcgtgcgcgcggatgagttggaaaaattaggggaagaatacatctccaacaacacgcggcctgttcggttccgcgcgttggaacctcgggacagcctcggtcccgcgccgctgttctgcggcaccgactcgctatcccgtgggctccatcgctcccgcgcaatggcgtcgcggtaccgactcggtcccgcagtccagtagtgcgggaccggctcggtcgcgcatcccggttccgcgtgaccggctcgggttccgctcccgcatcctcagtctgcggttcgtcctcgctcccgcgcatccgttccgcggattaggtatatttttgcaaattaatcacagccaggtatataaacgcaaaatatgaaaaaataaagtatattttcaattttgtttcgcatatcttattgctccgtagttcgtatgagattggagcaaataccaaaagcttgagtagactatatattttcatggagagtgtactgtgtacaaatacaatccggagggatagggcttctacgaccgtattttttcaatctacattagcgttgaccgacgaaaaatatagcatccgcagcagtaccagctggctgcgactgctgcgtcgccggaacgcctgaaagtctcaaatcgccaattcacgttgaattgtatgctttgctgccggcctgaccaaaccaccgatcgaacaacagggcctaatacgtgcattttcgattttgcctgttaatttccctccttttcttttattatctctactactataaattctccttacattctcttatcccaccacgcgcaacacatttgtatcttcagtgtgtaaccaccagatccaatatattattctctgtaatacttttagttcatctctaataatacggccttcatccgttacaatatactagcatattacactactggaaaaagcattttcgctggtgggggaaacgtgtcttcccatacagacggccggtcttttaaagaaagaggtagtagtagataccagcatacttgatttcttttttaaaggaaaaaaaaggccttgtttgtcacgtgatgagtgatgactacatccagcaagagattcggctcctaccagtgcattgaacttccattgcaatttgggccgttgatcaactaggccttttccgcgtcgttttcttttggaacaagttcacttcgtgaccttcaaaaagtgatcgaaatctaatccacggccctaaaccacaaaaccggatatctcgaccccctaacttttaaaatcagtgcaatttgactccctaggcggttttggagggcggtttcgctgacgtggcgcctatgtgacagtattgactcggtcttctttccatgtggcgttgacgtggcgcttacgtgacgttagaaataaaaaatgtgtgtgggaactatttgttattctcgcacaaaaatatattgtgggacccattgacatgtggggcccacatgtcatactctaactctttctcttcccttcacaagtgttctcttcccttcacaagcggtggcggtcgagggaggccggcacattagagcaggcggcggtggcggcagtggtcggtggggccagatcttcctcctccctttctccctccctcatctctttctcccctgtttctcttcacgggagctaggggtagattcacaatgggggcgggagggggggtcttgagactccagtaccgcccctaggacagtggagacccccctaaggccccactaattttttttccatagatccataggatgtggggactggaggttcgatttatgctgatgtactttattcagtccccactactattttttttctagatccgcccctgacgggagcagcagcgacagacgggggtcgggtttggcggcggcggcaaatgagggccggagcggcggcgatggcagccgcgacagcagcgtggcggcggacgttgcccgccgtcgccgccttccttccgccgccgcgcccgccgtcgccgtcgtgctctacacggcctggttgtggcggtggtgatggagcccctcatcaccgtcgcctgccgcgccgcccatcttcgcctccgtcgctccggctccccgcacgaacatggcaccgcccttgagctcgagaaaggcataggagcccttcccctgcgtaggccggcaccgggtagtggggcgaggacgtcctcgaggggaacggcggcggggggaaactggcggcgtgtcactgcggcgcgcgagaggggaaggatgagtggttctagctgtggctgaacgacgcggtggcgagcgaccccgaccaagccccctgcctcgccgagcagatgagcctcgtctactaccccgtcgcgacgactagcgcaacgccgacggtgtcatcaccagggtcccctcctgcgcctccacctgcccttgcttgcccgccctcttgccgccgccggctcccgcgtgtcgctgccgccgccactggcccccgtcagccgtcacacagccgccgctcgccgaagggaagagaaagagagagggggaggatgaagagagcatgatttatgtggtccccacatgtcgggtggatcccacccacacttttggtggatgacaaatgggtcccacacatatttttttatttctaacgccaactaagcgccacgttaacgtcacgtggaaagaagactggtcaatactgccacgtaggagccatgtcagcgaaaccgccctccaaaaccatcgagggagtcaaattgctccagttttaagagttggggggggtttcaaaatatccggttttgtagtttagggccacggattaaattttgatcagttttgagggtcacaaagtgaacttattccttttcttttcggtctcttttgtcaaggcgtaaattctggcccactctatcttatgggcctcaatttctatgatggggtcgcaccctattttctggagatttggaccgagccgtgctgcctagtgcccttggtcaccacggcggcgcggcgtgtcgctaggattgcggctgctgcagtcctgccgtctcgcctcgtgagcggcagcagtaaacgccggccgcccgtaggaacggagggagtcggtgaacaaagccagcttccgccccaagccgcgatggtggcggtggttactggttactggttaggatggcggattggggatggtgtcgctgaagagaggtagtgagcgatagaggagatcttgatttggccagaagcttatcaagagttcgaagattgaagaggggctcccgctactttgtttcttcagagaatcagagaagaccttaaggtaaaagtaaataaattgctctttgattgtgcactattttccctggaaaagtttggtgctgtgagcctgtgacgatggtagttgtcgagctccaagatcaatcgaggaaaatgtgataattttggcacttagctctaaatcgtagccatggattgatcaaattgttgaattgcttatgaagcaattagggggggataaacggaattcagaaatatcttcgattcagctcccttaaagacactactacactaggcaatgccatgaatgtgtgatgatacaataccaaaatttgacttgtgtcttactttctgtatactgcagatcatcttgttgcatagttggtagtcactgtagggtcttttgaattcacgaggcttgtctcctcaacctttagcactccactaagcttgtgcagctttggtatttccagtagaactcttactttctgtattcagctcatgaactgaatggtctctgaaaaacagaaatagcatagatgaacttcactgaaaatattaccagtccacataaaaatgtgtagagaaagtgtcttacagtaattcactgaaattttgttttggtggcatttccagttcatccaaacctctctcgaacatatctaaaacctgggttattgttggtcgatgcataggtaatacttgtacacaccacaaaccaattaaagtcatctttttggcaatttgctcaacctcacttgtgacttgacaagcttgtaatccgtcatccagagcaaagtgatcataaatccaatctggaaaatacttttcacttgaattttcaaccatttgtttcgcatttttccggcctccgaccatctctagcagcatcattccataactgtaaacatctgactttgttgaaacaactccaaaggttcgatagataccttcaggagcgatgaatccaattgttcctctagcacctgtcattgaaagcttgctctccttggtacggcacagtttggctaaaccaaaatcagcaatctttgggcaaaaatcctggtctagaaggatgttttgaggctttatatcgaaatggatgattcgtgtgttacaactatggtgcaagtattctagcccacggccaaccctgattgcaattccgtaaagtttttcccaccctagaatttctttgggattttctgaataaatatagttgtccaaagaaccattgggcatgtactcataaacaagagctcgttttgagccctccaaacaaaacccaaataagctaacgatattaatatgagaggtcctgccaatgctcataacctcattcacaaactcctctccatttccttttgagtcatgcaagaatttcacagcaaccatacgaccatcttgtaaccttcctttgaatacgacaccataacctccttctccaagcttataattaagaaatgatgttatctttgttacctctgaatacttgtatcttgttggagctatggatccataagattctatgagggcctcaatgttcctttcactggtgctgctagtctttgtgcaaaggagatgccgtagttttttccccttcctatgccatatcagcacatatagacatggtaagagcaagcctgctgctgctgctgtcaaaactgagattaaaactcatgttatttccttttacaagatcataatggtatatcatggccatttaatttgcatgaacatcattagcttttcctattaatctaaaaaaagtgcaaggtgacaaaagctacaaacaaggtaaaagggcttctatattttatccaaatcaaccagtcatttataagattacacaaattaaggatatgtgtttgcgtaatattttaggttattatggcttctgattcaatggtaaatgtttttaacatacctattagtatgatcttcctgccagttttcttggttcctgcaataaccacgaacttaattaacaaaagtaatatagtagaacatttgatattgtcccaaaacaaatgaagtatcacgttggaagttcacattctttagatgatctatacatatcttcaagttagtgaactaatcctttgaacgataaatcctaggtttgatacaagggataattaacaattacgtaggtcatcttgtctggatgaacattctatgtggagaacaactcctctatttcattgcgttccttgtgaaacttaacatgatggacagaagtaataccctgttttgaaattcaactagctgggtggcccgcgcaattgcgcggctagcacccaaataaaatcatatattttttagcatgattttacttaaaatttattaaatagctatctcatgtcttaagagtttgaaagattaaaccttatcatccccgtgtttctaattatatatatttttttaatagtcacaccagttgctaccccttatgacatctccttctttatttgcttgttcgatctaccactatttctattcattctccttgaaacctttaaaaattgtatcttatagtttttagagtttattatcatgttgggtttcgtttttataattttcagacgtctcgtcaaacgttgccattatacttctctatggctcgtccactgtctcttttcttaattgtcattgagattttaaaaatcgaacataattatcgtttcggttcatttttgctttctagaaatcccgccaaaccgtcagcggctttgccattgtacttctctacggctcgcccgctgcgtcccttctttattgtcattgagattttaaaatcgaacatgattatcattgtttttttttactttttagaagttcggaacctttaaaaattgaaccttgtagtttttagagtttattgtctcgttgggtttcattttttataattttttagaagtctcgtcaaacgatgccactatgctcctctatggttcgtccgccgcctactctttctttattatcattgtgattctaaaaattgagcataactatcggtggaattcattttttattttctagaagtcacgtcaaacatcagcggctctgaaactatactactatacaccccgcccactgcttctcatttttattgccattgagatttaaaaattgaatatgattatcaatggggtttattttttattttttactttctagtagtcc

SEQ ID NO: 2831 - DNA, 6406 bp, Oryza sativa
cacaagttttagttatttataaattgtattcctaattgaaatcttatttttctttttctaatttcagaacttattttttttcaaattttaattaatatcgtattgtgttcttttagtatttttatttgtattttttattttcaatttcagttgtttcaaaattgtattcctacttgaactctcttttaatttttctaattttgaatattattttattttttattctgaattttatctaatctcgtattgggttcttatatggattcttatttgaatattgcttatttttaattccaaatttcagctaattttaaattgtattcctacttgaactcttcttttttttctaattttggattttatttttttattcccaattttaattaatctcgtaattgggttcttatatggactctttttttaatattccttattttaattccgattttcagctattttataattgtattcctaattggactatccttttcttttctaatttttattttattttatttttattttaaattttgattaatctagtattaggttcttatatggaaacttctttcaatattgcttatttttaattccgaatttcagctattttaaaattgtatttctacttgggtctctttttttctttctaattttggattttattttatttttatttcgaattttgattaatctcgtattgggttcttatatggaaacttctttcaatattgcttatttttaatttcgaatttcagctatttttagattgtatttctacttggactctccttttctttttttttctccgattaatgtgggaatttctagcccccacagcgaacgtggtgccttctttcaaagctgtattttattataaattaaattttagttgttaaaaataatatcattggatattcatttaaatttaattttatatgattatgattttgttgctacaatgaaaaatttaaagttaaagtttagtttttaagaccgtactaaatttgaacacgccttagcgagttggacggagagatgtatctctaccgatgcataagttttctggtctatttactctttttttcatccataggtaaaaaaaaatatcacattttaattctaattataccggctccaaaatatatatgcacgcactgtgtttgaatcctaatcacctgatctgttgattgatccttagtatccatctaggataaggaaagaatcaaagtaggagtacgtccacctatttggacttgtattctagaacttgatcagtgttgtccgtttgatctagcagttgttttctattcagacttctattatcaaagttaatctacaccatcaaagtctagtcccagtataatctaacagtctagatttttcttttttctctgattaacgtgggaatttctagcccccacagcgaacgtggtgactcctttcaaagctgttttaataatataactagctgagtggcccgcgcaattgcgcggctagcacccatataaaatttatatttttaatacctttactcaaagtttattaaatagttatctcgttgtcttaagactttgaaagaccaaaccttatcatcatcgtgtttctaattttatagtttttaaaagccacatcagttgctaccccttacttctgtcatatccttctttatttgcttgctcggtctaccactgtttctattcaatctctttggaacctttaaaaattggatcttatagtttttagagtttattgtcctgttgggttttatttttataatttctagaagtcccgtaaaacgctgccgccattatactcctctacggccatccactgcatcttctttttattgtcattgttattttaaaaatcgaacataattatcgttttgattcatttatttttactttctataagttccagcaaaacgtcggcgacgttgttgcagtactcctctacggcttgccagctaccgcctttctttattgtcattgagattttaagatcaaacataattatcattggggtttatttattttactttttagaagcccgaacctttaaaaattggaccttatattttttgagtttattgtctcattgggttttatttttttataatttttagaaatcccgtcaaaccctgccactattctcccttacaacctgtccgccacctaatttttattgtcattaggattataaaaatcgaagataactataattggaatttattttttttactttctagaaatctcaccaaccatcggtggctttgccattgtactcttgtacgacccacctgttgcctctcatttttattgtcattgaaattttaaaaatcaaatataattatcattggggtttatcttttttactttctagaagtcctgccaaacgccttaactgattgcttcacgacttgcccatcgtccttccttttaatcatcattaggattctatttgatgttttattaatagcttttacatgtcccatcaactgccaccacttttctcctttataggtccgtaacttaattaatctcgtaatgtgtttgagatggtcttttcttttaatagtttttatttttatcactaattttagttatttataaattgtattccaagttgaaatcttatttttcttgttctaatttcagattttttttgaatttcaaataatattgtattgtgttcttttaatattttcattttttattttcaatatcagttgttttaaaattgtattactacttgaactctctttttaatttgtccaatttcagaatttattttattttttattccgaattttaattaatctactattgggttcttatatgtactcttatttcaatattgcttatatttaattccgacttttagttgattttaaattgtattcctacctgaactcttcattccttttctttttttcaaatttcaattttttttattttttattccgaattttaataatctcgtattgggtttttatatggactcttctttcaatattgtttaattttaattccgaattttagttattttaaaattatatttctactcgaactcttcttttccttttctttgctattttcacattttattttatttttattctgaattttaattaatctcgtattgggttcttatatggactcttctttcaatagtgcttatttttaattccgaatttcagctatttttaaattatatttctacttggactctccttttctttttcttagattaatgtgggaatttctaacccccgcagcgaacgtggtgcctcctttcaaggttgttttaataatataatagatatatagatagatagataagtaggagagattgtcgccgaaataaacgataaaccttgaagagtttcgatgatgagcctcctgcggcggttcgtgtttaaaaattgaatataactattgttggaattcatttttttattttctagaagtctcgccaaccgtcggcggctatgcaactgtactcctcctatacaccccgcacgctacttctcctttttattgtcattgagattttaaaaatcgaataggattatcaatggggtttttttcttttacattctaaaagtcccggcaaccgccttacccgtttgcttcacggcctgcctgtcgtccctccttttaatcatcattaggattctgtttggtgttttactaaaaattttatatgtcgtattaaccaccgcactttactcttttataggcctgttaattaatttatctcgtcgtgtgttttagatggtcttttttcaatagtctttattttttatcatcaatttttgttatttataaattgtattcctaattgatttatttctttttctaatttcagaatttattttttccaaattttaattaataccatatagtgttcttttaatatttttattttttatttttttgaatttaagttgtttcaaaattgtattcctacttgaactctcttttagtttttctaattttggatattattttatttttttattctgaattttaattaatctcgtattgggtttttatatggattcttgtttcaatattgcttatttttaattctgaatttcagttaattttaaattgtaatcctacttgaactcttattttctttttttgctaattttggatttaatatttattttattccaaatattaactaatatcgtattgggttcttatatggactctcctctcaatattccttatttttaattactaatttcagttatttttaaattgtattcctatttggactctccttttattttcaaatttccaattttattttatttttattattaattttgattaatctcatattgggttattatatggactcttctttccatattgctttttttaatcccgaattcagctatttttgaattgtatttctacttggactctccttttcttttctccaattaatgtgggaatttctagccccacagcgaacgtggtgtctcctttcaaagctcggcctagacctcgtcggcgggagggccgacgccaaggacagtgtaggggtgctccaggtcagcgcgcgcacggggaacccaaggcgactgcgagtaggtgaaggtgcgacggtgccgcttcccagaaagctccggtgaacttaggggctttaagtccgttaagtaacccaaacctttaggttaattgatttggattttaactcttagggttctaacctgaaattagggttcttcgaattttgggaattttgtcgggaaatttcaatctattttattccctcttttcgagttaggggagttttaatattgtttatcctcttttaattttaggaacttcaatctagtttatccctttgctcaattttggtttttcctttttttgctttggcaagcgtttcatcgtgcgggtggggacggaaggcgccgctcggtcccctcggaaagatttagattaagattaagataagataaaattttcaaggacgacggaagtaaattgaatcggattattttttttgttttaatgttttttcgcctttttttcgttattacttgttacggacaacggaaacgctttcaattttgtaagtagaggaaacgctttcaattttgtaagtaagtagaggaaacgctttcaattttgtaagtaagtagatatagagatagagaagatagagatatatagtatcgtgtcacatataatatgataggattcgatttttttccgcgtcacatataatttctttattttggaatcagacagatttgttttttattttttcgtcccttttttaccgcgtccacagaattcgattcatttttttgcccggttttttcacccgatttttccccggttttttttttgcccggttcctttttttaatcggaacgattcttttttttatttttttcgccttttttatttggaatcagacgcctgattttttttcgtccaattcctttttttataataggactgattcttttattttttttttgcccttttttacacagaatcggattttttttcgcccgttttttttctcggtcagatttacggacgacggaaacacctcttgttttttaaggactatatagatagagataacgtgataatttctttagagcgaatatagtacaatttaagtgcataaatattttattatacatgcatgtataattagatttagtgtataactcttatcttctgttttatagataaaattgtagcattgtaatttagtcctaccataatctattggaatagattttaatctacctttgagcgcttaataattaacataatatttgcttgttctttcgtggatgaacgtgcatgactctaattacttccacgccatatgaatatccgattccaattgcaaatctcactaaagatttacaggctcaaaaggccatacgcatgcatgcaaatacatgcatgtccgactcctagtcaaattagtccaaatacatgcgtgtccgattcctagtcaatctctctatatgtttttcttttggactcacgtattttgctggttgatctggaccatcaaaatctacacaaatacaatccaacgacacatatatttctcttttttttttccaattaacgtggaaatttttaacctccacagcgaacgtggtgccttctttcaaggctgttttaataatataactagcatggtagcccgcgcagattgcgcggctagcatcattatattttatctcatataatagcatatatgttttctcattatattattcaaatatattaaaatgacaacaaaattttgaattttacaataactttacgaaactactaatgtgtaatattcatattgtattttatatacgtgttagttattaattatttttaatatctaattttag

SEQ ID NO: 2832 - DNA, 1731 bp, Oryza sativa
ttttttttatattatccaaactttacaaacagggtcatacaagcaaccaaacaagatataacagggccaaataagcaagggcaaaatggcctatttaccccaaaattaacaccgtcaccttacacaaacggaatagggtcagaccggagcttcgtactcgaaaatgagggtcaaataagcaaagttcaaaaaatagggtcaaatcggcaattacaattcaaaacgaggtcaaataagcaattgcccctagaataaatgatctctaaattcccctcgatctcctgcggaagggattaacctaactaaggtcttattagtagtaacttgtgttccattgggttaaaaaggcccggcctatgaagtgaacttcccggcccatcaacatttttcggttttggatactgggcctccttttgtgatgggccgagcccacttcttcggaccttgggaccaatggccttcacggcccatgcgtagcgtcccccacaaccaaacagcaccaccacccggaagccgtgtagatgccgaagcgcccggcgagcggccgccatggccgtgaccggccacagttcagtcgcaggtgtaaacgccgatttcgcggccttagccacgaagggagtcgccgaacaaaggatagtccccaccctgtccggctcggtgatgacggcagttagatcggcggatggggaattgcggcagcggtgagccggtgactgtggggaattacggcagcggcagcagcgccggcaggggaggctgctactgttgttcatacacgagtagccccggcacgttgggcagaagcttatcgaggtcggagagaggtgcccgcttcatctccagaggagacagtaagtaacctacccctttggcctttgctcgagtgctagattctctcacaaattgctgtgatttcgctagtttggacactcgtagatctaattgggtcaatctagcatatgttaatttatccattgaattgtttgcaatatgtcaatttctgaaggaaataatgggaatacttcagaagcgattggaccccggggcttgaatttccggatagatccatagaaaattaaataagttgagattgaagttcttcgtttcaaacatactttgatggaatttggagcatattttcttattccttttggagtcttagtatgtaagagtaagactgactgcaatttaagatattcataaccttgtctttctaaaataataaggaaaccagagtagcttcagccttcttgtttagctgccttcaacaacaagactacagctgagagatgttaagccaaaacgccaaatttcgatggttttgtattaattctgaatactgaaggtcatctttttcacagagttggtagtcattgtaggaattctgaattcacaaggctaatctcttcaacattcagtatttcactaacagcatatgctttgtcagtagcagagcttgtgctttccgcatttaacttgtgaaccggatgttctctgcaaaaagaaatggcatcggtgaatttcatggagaatgcttgtaccaatcagcacaaaaaagtgggaagataatgaggtgtcttacagtgattcacagaagctttgctttgaaggcatgtccagttcgtctaaagctttctcaaacatatctaaaacctgggttattgttggatgatgcataggtaatacttgtacacaccacaagccaattaaagtcatctttttggcgatttc

SEQ ID NO: 2833 - DNA, 665 bp, Oryza sativa
aaggattcgatgatatctcggaccctgaagatatcaacgcatggattagccacgctgtgcagaagcaggcacgggttctggatattgttgtgctgtgtgacaaattgtatctcgaccactccgagtttgcttcccgctatctcacaagaattgagttcaccagtgttgtttgatggaaggattcttcaagcaactcgagatgggctgtccagcatgggaaagtctcttcttagatgaatgcgccgttaatgatgttgagatctcctcccaaacactgaaggttttgaccatcaagaacactctgttctccagtgacaagactactatttcgaccccgagtgttacttatctgaagttgtggaggcctgtggatagcatgtgtgtttaatgacatgccattactagtgacttcattactggtactttatcatgtgcaagactctggtgatttcttccaaaatctcaggagcctttctgctgctaaaagtttggagttcaattatattgggaaagaggtatgcttattggtcttacgcatcccactttccttattatatccatgcatcttaatgtacgtattgatacgaaaaaagaaaacaaactcaagcatgttgcttcttattgacacttcagaattgcactggcaaattaagacgaattcttat

SEQ ID NO: 2834 - DNA, 730 bp, Oryza sativa
cacataatagcacattttaattcttgcacatgatagcaattttaagtctagtaagttctctgcctcaaacatatgggcagtctaaagtcttacatataataggtaaataagccaaccaacaacacataacaccaaaagaactatccaactcatccaagaagcctatgttgatccagggaacttttcactaatgaacatagcaaaccaatgcatcttgttttcaaatggaagtccatcgaatgctctagcaatatgagggttggcaaccaaatgagcatagtaaaatgatctatggacctcctcaaaaccaggaagggttttcaatgtgtcaaataaaccttctggaagcttattgtccggctcggcgacctttagtatagcagaggcaagcttgtcaccaacactagtgaatgcaccaatcagcccgtcatcttcattctcttgtgtttttgctttctttggcttacttgcagatgatgcctccgcacgatcatcagtagtggcaggaccatcattttcttcatcattgtcatcttggacatcctctgttcctaggactgaacttgagtcctttgcatactttcctgtagccatggtgctaccaaatattgtaagcatctcaccatagtgtgcaagaggtttgttaaaataattcgcatcagccttgtgatccttcatgaaacaaaagttaatgtataagcaaatgcaataaaaagttataaaaataaag

SEQ ID NO: 2835 - DNA, 597 bp, Oryza sativa
tttttttttcttatctggttttataatcccatatgttcaccgccgttatatcgatcgtgcgttttctcccccaatttgatttcaaaaatcaattccccactcctctctcatcattttctctatgattttcccttcgattcggctttaattgccggatttaatctctgttttatagttaccgatgatgacggtgatcttccccggtcatttttatcccgagttttatgctctgattcagggaaaacggaaggagtagctcaagtggataaaaaccctcgactaattttggctgaccaagaaagatttagccaaatttgatggggatattttctctggcaaacgtacgggcgcggacacgggattatcttcgggagattgaagatggtagtcatagtcgggaagttgaaggtagttgggtcgaagagaagacaccaaatgaaggaaggtagcggactagcgtagggctgacaaggaagaaaggctttcggctgaaaacccaggaaatattttcattaccttttcttaattataatttatagcgatcccaatattaagatttttattaaccttttcaattatagtgtatactgaatatcc

SEQ ID NO: 2836 - DNA, 701 bp, Oryza sativa
  unsure (1)..(701): unsure at all n locations
tagaatactcaagcttgcgtgcctgtctggctgattctatatgagccgcgtaggcttcacctggctgaccatttacctgaagaggccatcttcacaggtccatcacacatacagtgatggttgttcgcaatacaagctatgtaatcaacattgtccccgtaggccaggaacttgttcatgcccgactgattcgttgccacaacttattctactcataattgctatcactattcatctttatatacggaatggatgaccttcattactcactcacatattgcacagtccaattcatatatactgtcgctcctactcatctatgacgcccttnnnncctctttgtatacggacgtcatgaactacactatcttacacacgaagaccaccttcgctaactggctggtcgttttctacacatccttcagttggaggaacatgcacaccttgacaatgatctccttggtacgacaataccacagcattgggtatatcctcattgtcattatgagccacactccactagtgtctatgagataatttatgaacaactcgacatttcggatgacacttggtgtctaacacataaaatacctttgttgcttgtggtgctagaataaatggatcatctttgtaccacatgctgccatggattatgcttctgaagaacccatcttacttcatacggaacttcttttcatgag

SEQ ID NO: 2837 - DNA, 764 bp, Oryza sativa
cattgtcgtcggccggtgacgcgctgaggacatcgatccaaccatggttgtcggagtcccagtccggcaccgacgacggcgagcacgccattgctctcaccctcttggccggagactctgaagcttcgtaatcttctgctgctgctgtttttttttttgctatgttaatggagacggtgccgagtacttcgatccagccatggtcgtcggagtcccagtccggcaatgtctggccgccggaggatgccattgctatgatccggccggtggggctgttcgacatgtcgtcagcttcctcatcgtctgtcgatgacgacgtctcggactcccacaacgccgccgctgcgtcgagcgcgctcgtcggagacacccatgtcgccttcacgacttctttcttgagaccgcatgactttgagacgaacgggtgctgtagcagctgcgccgccgtgggccggtcgccggcgcgccgttgcatgcaccggcgcaagaagtccttcgcctccggtgacagccatggcggcaggtccggcacggcgtccgtgtacccgatcatccggagagcggcgagcacgtcgtccatgtcgctccacggggcgcggccggtggccatctcgatgacggtgcagcccagcgcccacacgtcggcagccgggccttgctcctcgccgcgcgccacctcgggcgccatgaacgccggcgtgccgccgagcaccggctgcttcgaaccaccgggcatcaccaccctcgcgcacccgaagtcggcg

SEQ ID NO: 2838 - DNA, 714 bp, Oryza sativa
cagtagtccatcaatgaactatctaagttggctattcaatttcacaatgaaactggagcatttcccatttggtaagtcgacatgttcttgttcgctgtaatattgggttgtcaactgaagattcatattcatattttgagaaatctgagtgtttgtctaatttcagttgtcattactgcacataaatttgaaaatcaagacaacctcaaagtcaacatacaaatggaaatgtctccgcaattgttgaaagtcttgcaatagttttttgtgttgtgtttagactggcgtagctacttaaattgcatcaaaagcatcctgacaattaaatcgatgtgctattatggtcttttatcgcataatgttagtgcgctggattgtgttttcatgttttgttggaaattttgtctataacatggcaagggttttctgttgcaacataatcatttcagtatcgtgcagctgacaatggaaaacaatttgcaattgtacccaaaattcaacaatcttgtcagcctgactcttggtcaatggtgtttggatgcgaacttctatggattggttgtcttccttcagaacgcaccaaaactggagaagctaactctggaacttgaaaaggtaaatcgtttcatccatatgtatactgacccttctcgagagatctttcacaaacacacatgtcaatcagggatgtagcttatttgttttctttctata

SEQ ID NO: 2839 - DNA, 895 bp, Oryza sativa
tttagtagtttgaaaagcgtgcgcacgaaaaaagagagggaagtgttgagaacttgatcttgcagacacacccgttggcaaccacaacagattagctacaggtgaaatcgatggaggaggccaatgacagctggctgtagctagctcatgcacgagcaatccccatcaagagagggatccgcaaaataacaatgaatcacaggggcttagaatgctcacaacaatgaaaccatgatcacagaaactaaattcaaacatgatcgatagaaatggtgaagtagtgagactttgatcttatcgacaagaacaatggttcgatccagtagataatgttaggattttagaaagaagaaaaaatgggatttttttaccatgctattcttctactgcaagtcatccgttatcctccttcagctgtgcaaccaagtttgtactcctagcctgcaatcaatgacattgtgcaataattgtatatagaatctcctcttgttccagttccaaattcctcaacactgcacagaccaattgacaactaaaaaaataaaatttaaacaggaaaagtaaggaggtgttgaatgcatcctgcaggaatttcattgtggtcaggcttgttgttagactgctggtaggaagtcagagagtcagatacaaaactgtagtgcataaaatataatctaaatgacccagtgcataccttgaaactgaatttgttatccagacaagcatggaagtcagattccttttccttcaaacgaacatgatcatgaggcctgaattcactatggttcttggtttggcatatattatgaagtgcaactagttggtgctgaaacaaatagtgtgcactacacatctaaccaaaaagaactttaatagtgacaggttaccaatctca

SEQ ID NO: 2840 - DNA, 1760 bp, Oryza sativa
tgggtgttcgatgataagccgtcgccgttgccggaggagatcactgtccctcgtcatcgtcgccgccgtcggaggtggagagcgatgccaagggacgccggccatggccttgcggcgcggggacatggcggcgacaagaagccgcggcatggcgccggcgcggttcactcgccgtcttcccggttccgatggaagcaccggtgatcgccggcgatcgacgtgctttggtttcgctgttgcagagcctttttggcttagttgtttatggatttcttttcgtttgctttgtaaatgtgctgagaatgagatcatcgtctgaaactgaaaatggttaagcctaatcacaaatgtgaatgccttgttgctactttggatctttgatccactggtgttagaacttagaactctcctgaccaagtattaagtatgaggttagtaattaaattagagaccttatccttatttccttagtaatctttttcaatagtgggtatctggtctttgcttcaattgaaactacacgcataataatttacagcttataaaactgctaatatgaaaaagcaaagaaccacacacactccacccaccgtgtacaatgacttctagattcatgtagctagtgatttctttgtagcagtaaactatgctaagtggaatccaattaagatttttcttctgttacaaatgctgacacttacgaatgctcatttaacacacagtcaaaaggaaaaattcagcaacaaatctctagactcattaaaaaatccccagaaagcttacccagtactatgtatttatgggcacaatcatttaaagtctatgagtgacattatatactcacgactctttattttaaaccaagcacccacgacgtactccataatcacactagctaactatacattttcaattttatattttcaccatatcgaaacaaaagtataaactcaattaatggtaaaactagcttctttcgatgttagcatagatttacagtttctggatcaaacaaaaccaatggctctaactaaaaaggtatattcaccacaaaagttgcttaatatatgttcttgacaaaatgaatgttagattactgtttcttcttcctagctaaccggtggtgttccttgtcatgctgactatggctgagaacattggccatatatcatatcaaaggcataaaacagtcagatatgtccaaccatgcatggaaaggcttatatcggcaaacgatatgattatgctgcaaggcgcaatatggttcctttttaaaaagaacaatctggttttgttgttaatttctctacttttgttttgtttatggaaatttctctacgtttttttttacgaaatatttactccagctggagaaacaattttagaggatataactacaccctagaaaatgtccaatagaattatttacctcatattttggagcgaatcagggcatgtacaacatatgaacatgcccacaaattaaacctcagatatgaggtaataaataattctactggaaccatattattatgaggtaaataattctactggaacatattcttctccacagagtaaaatctattggaaccatattctactccacggagtaaatgttccaggtatgaggtaaataattatactgtaacgattgaacatgcaactaattcgtggagaaatgtcaccaactaataaatcaaaccccaggttttttttatgcaacatcacattcttacacttttttgttattaaaacaaact

SEQ ID NO: 2841 - DNA, 761 bp, Oryza sativa
agtccgcgtacatccattgccgatccatctacatgaaatgcaaaaaaaccgtaaaaatattcaacgaaagtgaaacccactaaacagtcatacaataatgacatatcattatacatacaataattataaaataatcccacaaattattctttttgtaattatttttgaagtttttaaactaatatttaatgtgttgtacttcttttaattttcaatttagtttgttttctattattttagattaattttcaatatattttcattctcaactattttataaaaactttttataaattgtaaataaacaaaatttctatacattcttcttccctacacaaattttctctctcatcaacttccaacaaagttttagagacaataatgtgtaccaaacatagcttcaaatgtaatatgacaacaaaaaaaatattggaggatgaagttgctaaccttttagacacctccaatttgtatatgatcaccaaaataaattcacaataaaatttggcaagacctcccctctgaagaattttgaagcttggctcggactggaggaagaagaagacatatataaagatcactactggccctcaccgtcgccgtcgtcgaaggtggagaacaatgccaagggacgccggccatggctatgcggctgtgggacatggcggcgacaagaagccacggaatggcgccagcgcggttcactcgttgtcttcccggttccgatggaagcaccggtgaccgccaacaacgtacttttg

SEQ ID NO: 2842 - DNA, 764 bp, Oryza sativa
atcatttacatgtgagcaccttacgcgtgttgaagtcgtatgctcggaggatgatcccctggtcgaagacgtggtgaacttctttgtaaatagtggactgacctctgctcaggttcatatcatacgccgggtgtagatcaagtacatgtgagcaccttacgtgtgttgaagtcttatgctcggaggatgatcccctggtcaaagacgtggtgaacttctttgtaaatagtggactgacctctgctcaggttcatatcatacgccgggtgtagatcaagtacatgtgagcaccttacgtgtgttgaagtcttatgctcggaggatgatcccctggtcaaagacgtggtgaacttctttgttaatagtggactgacctctgctcaggttcatatcataacatttgttgctccagttgagtccgaaagcacatataaacatgtatactgctcttgtttggtgctatgatatgagtagaaacaatcatgtcttagtagtactatgtaagtgaaaggtctgtcaccttgttctgttgatgttctattgtcctataaccaagacgtactgcaagttgatgcttgagtactctattattttgcctttatattttcccgacgtgatgttatacaccatgactggaattgagatcacctttgcttgtatgactgtaactttagcagtcatataaccatctttggatcaaataacaaggactcagatcgcaccaatgctgacaaacagtattgctcctaaatccaggccgttga

SEQ ID NO: 2843 - DNA, 720 bp, Oryza sativa
acgatgactccctcgccacggttactagcttcgagctcttctacgacgacggcgtgggctccggcctccgcccgctcccggagaccatgtcggacttcctcatgggctccgccttcgagcgtctcctcgaccagctcacccagatcgaagccggcggcctctcccgcgcaagggagaacccgccggcctccaaggcctccatctccatgccgcggggccgcccactcgcccagttcaatcgccggagaggagacagaaaaagtgacgggagtggcatggttttaattttagaaatttcgagtgacatgtagctgatatgatgaatattagtgataattttttaatttggcaaagttgcagtggcatggatcgaattaaccctttaaacaacatcaaatcaaatctaaaattaagtttgaaaatttaaaatgtagcttataagcatacaaacataagtgaaacaaatagggttatatatatgtctccctttaccacctactcctacaacagtggtacgacagcttcacccaaaatctgataagccgatgccactgcatcgaattcttcaggtgcaactgcaccgccattacacgagtctctgaatcgacgatgttggtgccccatgtttgtgaaattttcgatcaaagaatacaatgtgtgacacagattccataaccatgtgtgtgacagtggtgtttcataacaaatatatagttgtat

SEQ ID NO: 2844 - DNA, 1652 bp, Oryza sativa
ctggtgagacaaacacgtcatctcacgggtgaatccattcattgatagtgtggttttgtaaaactacactaataaaatatatgtacttatagtgttaaagtgtgtgtggttttctacaacttggaccataaaatgtgtagttttgtgaaatttactctatttttaaattcgaatccacatcaatttaccgtttcctgggcctttaatgtgctgtgtttgtgttgtgtttcatctctagatacatattacacacgatttttccgtctcacggatcgatttgtccatacactggagttgctgtaagtgctatacttggatttatagatggccataatgtccgatgtccgacggcccagcccacggcacgatattttagcccggcccatgaccgccgggccatgcatgggcctccccaccggcacgttgggccggtccggcatgactgggccagcatggcacaatgggtcggcaggccggacccgacacataaacaatagggagtaaaattgacatattatatgtcacggtccaaagaatgagatgaaaaatagatttattttagctatatacgtgtcagcccaaagagaagagagggaaaatagacttattttagctatatatatgtcacagcccaaagaggagatggaaaataggtttattttaagaaggcacgatgggccacacgttccttcgggccggcactgcacggcctgacagctgatgggtcgtgcctaggctggaggtgcagaccatgagctggcacggcctagcacgaagtgccgatcgggccgtgacgacccgattgctggtggaccgtgcctagccgtgtctgggccgggccgtgccaggcgggtcttatagtcatctatactgggattcgatttcacacgcgagggaaacctattcgcgcgcatgagggatgtatatagaaatatcacgttatatatccgatcagttcccattaaaaaaaggtaatatatccgatcagtttccataaaaaaattatatatatccgtaaagaaaaaagtatatacccgtgcagctacatctcgccttctgtttggcatggggaagagaagacgaccacagacaacgtcgacgcatcaccggtactacctccgccgccgccacggcggcgacctgatcagcgagctcaacgacgacgtcctcgcgcacgtcctcggcctcctgcccaacgccaccgacgtggcgcgcgcgtgcgccgtgtcgcggcggtggcgttgcctccgggcgcgcgttcccagcctgcgcttctctctatctcatctaattaacccatcaggcgacgtgaagcggcaggaggatgtcgaacggttcgtcgccttcgtcaaccgcgtccacgccacgcgccgcgccggcgttgagcagctcacgatctccatcgagctgcacgagggctgctgcgcccgggccgtgccggccgtccacggcgcacacgccaacgcgtggattcggtacgccatggaacagcaaggggtgagatcgttcgccctgaaactcgaccagcccaacctgctgccactgcctgaacagcgacggtcctacgacttcgacgaagacgccgacggtttggtcctggacgagctccctagctcgacgatgctggagtccatggcccactgacctaccta

SEQ ID NO: 2845 - DNA, 37562 bp, Oryza sativa
  unsure (1)..(37562): unsure at all n locations
cgccttgctcaatccactactcctcggaattgggtcaacaattcatcccgaggatcacatccaaatccttggtgtctataaggatcagatccgagggaaaaggaattccctggatctctataggtacggccgggctataatactttgctgtcatagctcctccaggggtggtgatgagcagtgagttcctaagcctttctaaccccagctgatttctccccacgaattgcacagatataaacgagtgggaagctccagagtcaaacaaaatggtagcggggatggaatgaatgaagaacgtaccgatgatgacatctggagttgtctgcacatcctctgcagtaacatggttcacacgaccccgagtggcatcctttccaccattgttggggcggggaggcgcttggccttcctaacgcctcggctttgggaatttatccgcgaagtgcccaggctctaaacagttgaagcacaaacgcggctgaccttgaacatccctgcgtccatgactaggctgcacggccggtgcagggggacggggtgcacggttcccttgctgattctgctgttgctgcggctgtggaacgcgtaccacaaattgaggtcatggcactgggcgaggttgttgctgctgttgttgtgaggaggatccccctggatagggattggtgtagcggatcctttggttagccccctgttgattacggaaattcgccaagcgacgtttgtgtgactccagttccttgtgcttggcctccaggcggatgctcttgtccactacgagctggaaatcagggtaatccccggagaccagacgcacagaaagttcagggtccattcctactagaaacttctcctgcttttcttcatcttcacgaacatcctccagggcgtaccaggccaggttattgaactcatgcaaatactccataacagagcggttgccttgcttcaactcccgaaattccctcttcttaagggccatgactccagctggcacatgggtcctttggaaagcggcggtgaagcgggcccaggtgattggctgtccttctggctgcatagcctggaagtggtcccaccatagtgatgcgggcccttgcagctgatgggttgcgaagataactttttcctcatcattgcactggacggtgtccaactttttcccaacggcatgcaaccagtccaaggcatcaacggggttattggagctagagaaggtaggcgggcggatgtggaggaactcggcaagcttggagtgctgtgggggtggtggtggtggtggtggagcattgtgttgcggcggagtctggatgtggtggaggaaagcagccatcatgttggcctgctgagcgaggatttgggtgaggatggggttggtatcgggtggcggtggtggtggcggagggggaggtggaggtgggctgccatggttgttgtggttgctgccttcggggtgactgccctcaccggtagcagcgcttctcctggttgtcaccatctgaagattccacacagaaccagcaaacagaaagagctgacgattaaaactaaccacccacgactaccataattcttgaatttatttctgctattaaattggttcattaaggttgaagttgcttatgcaaataaaataaagacaggctccgacacaattataccacacaccggtataaccatgccccacacgactctgcaagaaaacaaacaaaaagaacacacgcgcgtgcctactagctgctcgtctacttctgcgacgggccagggcggaaggtgagcaacaacacatcctccgtgctgccaacgccagaggctccctcctcctaaggaaccaagggcgcgggctcgacgcaaggagtctccacgaagcaggtccacgccaagaactgacgaacaagctcaggcctagaggtactcttgcgggcggtgatcttctggctgcggcaaacgcggcggcgcttggggcgacagatctccccctgagcaatcttgagctgacacagctgcgcctccacggcgtccaagtccttcagctgcaaattctcctaacgtagctccaggatcttcatgttgtcctcgaccaacccacggcgcaccatatgatggaagttgatgcggcccgtgtcgtacgcctccaccatgcgtgccaggtgcatgatagtagcgtcatcctccgagctagcgttccggccgtcggcgaccgaaacggaggggtggacgaggtcggcgatggtgcggcaaagccggaggagacgacgccgaggtggcatgggaagcggtccggggcgacgacggcggcggatcggagctcggcggcgacgacggagagagagagcgacggcgcgagctcgattctggcggggagaaatggcggcgagtggcggaaacggacgagggaggtgcggtgagggtttatatagggttgggagtgagagagggcggccggcgaggaaggaaaccggcgcgggggtccctatcggcatcaatggcgccggcgagatttgcgggagcaaatccggccgtttgaacatgggagagagatgagaaaatggagggaaagggagagggaatcacggggaacatttccccccacttaatggcacgcgggaacggtcgggggcggcaggatttgcggcggcggcggcgctaggcgcgggcggagggagcggcgggagcagtgggaggagggggatgatgggtgggccccacccgtcagcgagggtggcggacgagcccgcctgtcagcggcgcacacgtagggagggagggaggccgagtgggccgcggggagagaagagagagggagagggagttgggccgaattcagacctagagagaggggagagggttatagggttttctttttataaaatcttttcaactttgtttatttcttcataattattatttgtgctctgaaaattccactaaaatttatttacacattttaggcttttaggaaatataaaaaaatcctcccagccttatttgacttttaactttacacattttaatttttgatagatttgactaggattttaattattctagacataatttataatttaaaggatatattttagggtacttctgggacgtgacatcacttcactggcgtcatccgcgagcaaaaccgtcatcgtcgaccaatagttggacagggccggcgccttgttcttcttccccacgccgccatcgccatgcccttcttccctcctcctctgcgaaccgacatccgccgcctaaaaatagccggcaaagccccttcttttcccccacaactgagcttcgagctcttcttctctctctctcctccccatgccggccatcggctgatctccctcgttggagcattgccgaccaagccctcgcgccaataccttcgcctcgacgaggcaaacccattccctaaccttccccttcctttctccttccgatattagccaccaccgttacctcccataccggccggagctaagtccttgccatcgccgttccggcctcctctctcactccccctgccggccaccaccctccccggatgcgtgacactcgggaacacgttccaccgccgacgtcgtcgcctcccggtcaccggagcaccggcaccctgtctctccccctctctgtgttgctcgcgctggagaagacaagaaacggaggaggaagaagaagaagaagaagaaaaaggagagagaggacacctgacaggtgggccccagtacagtactatttcgcaattttcatatttaattcaaatcctattctctagaagcccatatctcctgaaccgtagatccgattctagtgaaactaggacctaaattcatctaaattcaaaccctacattttgatacccaatttgctattttataattttatttgaatttattcaaatattgtttgaccttatgcttgcattttcaaatactttcttttatcccaaattactctttagccactaaaaagccgtcggctagaactttacgtcttccatgggggtgttcgcggtctactgggcccgatgtcgaaccgttggttgtaaagcccaacagaaccaaacctaaggtcgaagtgctgctcctggcaccctacgcctcgatgcgtataacggtcggagcttcaccattaaatttttgaggaaaatttaaaactttttgaaagctaaagcatttaagagcataatagttgaacttagagtttgaatcctgtatataaaattaaaacataaagatttgttgggattagattagagctaatccaaaattagattttataatatatcgagttaacaaaacacaattcaaataaattggtttaaccatgaaatagaaatttaactcttttggttttgcatttcaacctaagcaaaatatttgagctaaatgaaaacaaatggaaatataagttttaatcataagaaaaaacctaaatggaaataaatatacttggttgtatgtgcattttattattttaggtttgtttttggatgttcttggtgcgtctcataataggtttcatatgcatgtcgtttctaaagaaaattcctaaaaataaattatgcaacaacaaattgcatctatattctcataaatactacacaacatcttgagtctatattaattttagtttcaaattaataaatatcacatcaaatgtttctcaaataattcgaacaactcatctagaaatttggaaaacagcatatcatttagcctactttgcaccttcaccaaaatttaaccataacttatctagctaaaccatttggtcagaatgttaactatagtgtactctaccacctggtgcaatggcttaattaaattcgaaattaaaccacctgaaatgagagccacaagttgcttaaacaatatttagactgcagtcaacatagtaatttagacctctttactaaattaccatagtaactcaaaaagtaatttaatcttggaacttggcacattgaaccatcaaatcattgtctaccttgcagcaaccttgtctccctaaaattctaatttaaaaggaagagaggagtagggaaataaactacatgttctaggcctcttcttctacatctctcttacatatggggccaagccattgtgggacccatgtgtcatcctcaccacggtgttgacagtgaaatttggtaagcccaaagtcatcatcggcttagagtcactattggctacggcatctcggaatcagccgatgggagttatcaagtcgccaatagtcggattcctgctatattcggttaaggaaattgatctactaaaggaaacttatctagaagagaccgagttcaaagagaatacggcatggcaagttatctattaattaagaatagtttgttagtttccttttatctttagaaaagtgtatttagtgtcctataaggactttatcttttccttttatctttaggaaagtttctttcttgtccgacaatgacttgtatcaacccatgggtataaatatgtacacccggggtctatgtaatctatcttcacggtcaatacaattcggcgcatcgccaccctttttacttctacttttgtttttacattccggcggaacttggcactcgacgcggggctgcatcgtcttcgatctccagcgaagggataagtccaatgttccgtcggtctaggcaattgtatcatctacgtcggcgtcgttcaaggctgcatcagtacattcgacctcttagattgctctggtttggatgatatatttgcctacccatttatcatatgtctctgttaatctagtcttagcatatcaatttagctttatcggctgcttctcgttttagggtttctgccggtatcggctaaatcgcgttgctagattagattagcttagacatctactaccctgaaaatcagtcaacggcttgattgtctagatattgtgtttcttttcatacttagtgctgcatcagttaagtttgacctactaagtcatgcttagaaccgtaatctctagcatgctttttgactgccaataagggtttcatcagggtttcagccggtgagttatctggacgttgcatcggctcataaggattgcatatacatataagttggatttagccgatgacaacaaaggtttcactgtttaatctaatctcgtggatttcatgacatcggaccaccagccgatgtgtgctttaaccttcggatcaatgcttattctattatatcaatactagccgattggtttatactggactatattattgttatattttattatcagtagccgattgtctatatatcattatttactaaagtgttagaatctacattggacgtatagccgattgcttaaaccctatcgctatcggctggtatcagcatcggctattatcggctaccggctggaactactccatcggcttgtcagccgatcggtattttatctgttgtttacatatcttgtcagttgcaggatcaaactgactggcacgcccgcatctcatcaagatttggacctgcacaggagctaagcagatctcccaggccgatgtgttcgattttttcgtcaacacagattggcatgaacaattcttcctcatggccgagaaacaaccaccaccactatctccagctagcccaggctctgttaaggaaaagatgctgaaattaggatcgactgacgtcaatgaaggaaacgtcgtgccgatcgatccagaaaaattcacacctgagcagaagaaagagtttgaagcaatgttgcagcaagcatgggatcagttcttgaactcattcatgcagacccgcaaggggacacttgttcagaagtacaaaataaaagtggttgctgatgatcctgggaccagttcttctaaggatggagatgggaaacaagctctagacgactcggctcagccgagtaacaaaggtgctaccgacgtctctctaggaaatcaaggcgacaattctcaaggagtccatggaatgcaaggtgatggtgcccaagggttgcaaggaggaaatcttaatcagaatagtgatgcggcataagattttttcagtaatttccaagaccgggttgactacgctgtgcatcatgctttgatcaatcaatctagggtgttagtcaataccttatcaaacatgatgaagtcaatagccgatggttcaatagctgagcatcaggctgcaggcccagtttatttgcaaggtgtcttcccaaattatcggtctttgatcaccgatgtccagccatctattcaggcggttccctccgttgcaccaacaactcagccaacgacgccgacatcaactcccctacctgctccatcagcgatggcgccaggccagccggtgaaccctcggttgttaatgagagagcatccacagcatagtgggcaggttgcgaatcggctgacccaagattaggttgctgccacgtttctgccacgtcaacctgttgttgatccaatacagcagcagccgattcagcagacacccccaactcagcaggttgtacaaccaatccagcaacaggtcatgcaaccagttcagcaaacaccaccaaggcagcagcctctacagccgattcagcagacgctgttaagacagcaaatcgttcagttgatccagcaccaaggttcaataagcgcatcggccgggtttgcaacgcctggtggtcagcccgtacaacaatttttaaatcaagttgtccaagaacacttggttcaccacgtacagccggatggcacagtaatgcctcaagttgttcctgagcacttggtacgtaatatccagccgaaccttcataattaccaagggggtaacttgaattatcaatatcagcctccttccccgcaagcccaatatcagccagggggattggctcaacctcagtttgcgtctcaatacggtcagttcgagcccatgcagcaacaaggggcagctcagcaacggtcgtgggccgatgtgattgctgacgtaatgagggaacagtttgggcttaaaccaaaagagactagaagcttgtatcggcagccttaccctgagtggtttgagagagttcctcttcccaatcggttcaaagttccggacttctccaaatttttgggacaagatggtgtgtcaacttatgagcacattagccgattcttagctcagtgtggtgaagcatcggctgtagacactctgaaggttaggttattccgattatctttgtctgaatcgacttttacttggttttcctctttgccgtatggatcgatcaatagttgggccgatttggagaagcaattccacagctatttttacagtggggttcatgagatgaaattatctgacttgacagcgtttaagcagcggcatgatgaacctgtgcacgagtatattcagagattcaaggagatgaggaacaaatacttcagcttgagtttaactgatgcccagttagccgatctggcctttcaaggtatgattgctccgattagggagaaattctcgtctgaagactttgatagcttgtcacatctgatacagaaggtgtcacacccagaaattcactagtaatttccgaacttatttgtgcattaaatccttgtccaggaatcagccgaggtacacaaactgacaatttaatatacagattcatcaacgttacatacttacaaaagaaaagagaaaacagcagcggaattacggtctagcgaagctccggctccactcccacaggcagctaaactggggtataagccaaacgtcttctccttcgcaacttgtcttcaactgaggtttgattgtttattgcaaggtgaacatatgacatactcagcaagccacacagcaagtatgcaagtgcacaaggataccaaagaatggcataatatatggctcatttgcaaaagcagcatttatcaaacatttgagaattgtaaaacagtagagtaattaatcatcaatattaatcaacactgaacagcacacccatgctgcacaggcccaaccatcctgaacaaccatacccggctgtacagatctatctccaaaccaggaatgtgccattccaaaccaggagctaatcaaattattaccaattatagcatcatttattacggtgagaagtgtgagactaatcacgaaagacattgttagacccgcccataaccacgggcatggctattcgaatagttttactctagctagaggtgtaccactgtacccacaagacacagccccacaacatgtcaccatgcggctcaatgccaccacggtacctcggaaaggagctgtgacagtacccctcgcataacacaatccaccacagtgcaccgttcctggatcataatcacccccttatagacaaggcatggactccccagcgacccccgtgggcttatctccgccacttttcagtttggtgccccgcaatgaaccatgctatacaaaaggtaaagccgttgcccacgctgacttgtggttggcatggttaatgtttcacaaccgaaactcatgaaccggtccttaattgtcatgagcacgaccatcaaaaccatgtgctcacaacccaccattatcaagttttagttggcacattaattaattaaccaatcacaattagccatcgtgagctacaattaaatatccatcattaagtgatagcggaacattagttatcccaatcatgtgctaatgtttgtaagcatggctaagcaattatatctaatatctagctgaaccaatatataagtccaattagtcaaattgtcacccaaggtatcaaagaatagagtaagcaatgcaaagtggtcataacaaaggaataggttcacaccacccggtgacattcgaaaataaatgcacaattgaaataaatagagaatttaaatataggatcaacatgctcaaagaaattatgtttgggatctgtgtgacttgccttgcaatattcggtcttcaataaatcttctggaatacttccgacgcactcgcgaaccttcgcaacgacggaaacgacaagctaacacgcaaaacgaagaaaaagactaagaaactccaaataaatagtacatataaagtaaagaaacatgtagatcatgattttagatgaattatgagacttgaacggcctcattctaatttcatatgaattagttacaaattttacaagatttaattccaattaaacctattaaagaaaatactattctaaattaattaaacaatttagaaatgatttataactgagataaagattaaaacaacctctggaaaaagattagatcatatttggtagatgacatatattaaaaagaaataatatgccactgaaaagagagaacggatttatattgattttggacggctgagattaatcttgatcgagagttgaccaagatcggatggcttagattgatctggcaagcgggcctcacgagataccgactcaacgagtcaattctacgtgacacgggatcacccaaatgatcaaccgaaactggcgaacggaaccggctgctctgaacggctctaaactaaaggatgactccacacggacgaacgaacgaaacatgggggacacctcgttcgaacgaacgagcgaacgactcaacaacggttgcgactaaaccggtgagctagacacgattcacggtaaagccccggtacggcaaacgataggccggtaggaattaagggatgcaccaacggctaaacaacttggctaccgagcaacggctaaagcggcggctaggttaaagcggcacacagctgcgacatggcggtactagggtgacttggctcagctaggcggcggcgactcggcggaggcacgcggctagggttaggatgacggcacagcgacgacgacacacaacgacggcagactgtggctatggtagtgggacggcagcgacttggcatgcacgagcagcagcagcatggctgtagcagggagcggcacagcgacggctaggtggctagcgcagtggcgacgctagggcagcagctaagcgtggcacggtggcggctactcgatgacaaaaacgagagattaaaaactaaaccgagggaacacggatagaagtctcaccgaaccaaagcgatcggagagagagatgactacggtgatccggcggcaacacatggagacgacgacgatgctagacaaacaacggattagattgaattaagaccctagagataaagtacaccggtgaatggcataggagcggcggttgccggcgaaccacggtacaataatgcaaatggagggcaacgggagaaagaggaggcaacagcgatgcttaccaatacttacgcagcgatgaacggcgaaggagatggccggcgacgactttccggcgatcttcggcggatgacagatggcggacgggcttctcctcgcagctgcgaatcaaatggagacgacggcgaccgaaggtgacgacggacgacgacgaacggcgcggctggaggcacggcggcgacggcggcgctccggttcacgatgacggccaatctccggttggatttggcgcaaaagaaccagcggccgggatagagctcgactttgcggagccgcgggaggtggtggcgctgatcggcgacggccgaggcgacggcgcacggcggctggaacggctatcggcggcggagagagaaggagctcgcggggagggcgattccgacgacggcggaagatgagacatgaggggataggtagaggacgactagggggtcatttatataggcacgggagctcgggtccgagcccaaatcgacgggaaatctcgggaaagtctagggttctcgccggagtaaggaaagattgaaccgcgaaattggaaaggatttccatagaaacttttggggatttcttggggaaaaggaagaggagattgagaggattccattgccgcaactaatttggaaaaaggagcaacgaggtggccggattggtgggaggaggcggcacggctgcacaggcttgggacggctcggtctctgtctggaggttgaagatagagtactgtagcgccagggaagtcaaacagacttctctgcgggctgagaggagagaatggaatgggctgaattcggcccaagactaggaagaggattattattacttttcaaaataaattaaccaatgagatgatctttcaattgttaaaaatacttccaatgctcaaataattccaagaaaaatcttgaacatacttgaacactcagagtatttattaaaattgaaaccagctcatttaatgattaatttaatatgtgaataattactgaaatgttctttgtattattaaaattaggaattgagctccgaaaaatcttagaaaatttcagagagtataattaatcatggagaacttaatacaaattaaatctatccatgctttatatttaggaaattttatttcccacatttaacttcacttgtaaattaatgaacatttaatataaattatattaataatttattaaataatttataaatcctaaaacggaaattcaggctgtgatagaaggtaaccttgcatgagcatagatctgcagaagttaggaaaagctctaagaaggttaatcatgtttgtctgtacatgtatgggtcggatgatgatgaggacgattctgaaatagctgcagccgaatagatgaggagtaaaaaggtcataccatgtcaatgggtaaaaagttctggaaaagaggagaagtatgactttgatatgactaaagctgacaagatctttgatctactactccgagagaagcaaattcaacttcctgctggtcatataatcccatcggctgacaatacctaggcaatcaagccgttgactgattttcagggtggtagatgtccaaaccagagcaatccaagaggtcgaatgtactgatgcagtcttgaacgacgctgacgtagatgagacaattgcctaggccgatggaacattggacttaccccttcgccggagatcgaacatcgatgcagccccgcgtcaggtgccaagtcccgccggatgataaaataaagtagaaaaggtaaaaggtggcaatgcaccgaattgtattgatcgtgaagatagattatatagaccccgggtgtacatatttatacccatgggttgatacaagtccttatcggacaagaaagaaactaacctaaagataaaaggaaaacataaagtccttatcggacactaaacacacttttctaaagataaaaggaaactaacaaactattcctaattaatagataaactgccatgccgcatcctctttaaactcggtcacttagggataagcttcctttagtagattgatttccttaaccgaatatagcaggaatccgactattggcgacttgataactcccatcggctgattccgagatgctgcagccgataatgattctaagccgatgacgcctttgtcgattaccaattttcactgttaacacacggtcaacccatcatcttcacacctctcaattaatttatatttcatttctcaaaaggtgagaggagagttaaaaatacaattctcacctaccttaccacacatataaacctagagtatatctacatgggcccatttgtcacccatgtaccagccatctactcatgtgatcactcatttataatctatatatacttcatcaaagagagagagagtgggggagaaagagagttagagtccaagtttcaccgaagaactcaccatacctcccatttcttctgggaaacatctatatggggccactagacagccactcatactaggttaactgaagtacaagctgaatctcagccctaaactcgatcctctctccaaaaatcgtgtcaaagccatatcatgccacctatctctccattgccagcacaacatccattctttgattaaccacttcaccagataactcatcccactttcctcatcatgttccaaggaagaacttagagaaaactccctcggaatttccgagaacacccacttgttcatccttcccgaaggtgtttgatccgctgtatgtcttctctggtgagcttcgccacaatctaatcataagaacgtgatctatagatcctttccatggatcaaacacattccgtcgagctcgtcggcgtcctcggtgtccagagcgccgccgtcggtcgcttcgccgttcccgatgatccggtgcatctccgacctagccgctgcgccatgagcgtcgccaaggttctaggataaggcctgcgaagggaatcgcgctgaagagcagccaacaaggagatcctctctttcttcctcaagtccggccgccggccaacgtcgtccgttcctcgctctcgggtgagcttcggcgcagttcctcgttcgtgtagcatccttagattgtcgttgagccgttccacttctcttcttggcagtccggagtctggaagggggtcgacgccgttgccatgccgtttcttgccgtcgccggagcatccttcacgccgtcgtcgccattcaagcgttaccggcgcatgtccaacccacagtaagcttccagcaaccccgtagaggcacatgcatacactcattcacaccgagctcgacatgcacatgcatgccgaagctcaccgccgctcgcgctgccaccatcgctgacaccgaccaccgcagccagcgaaaccaccaccattagcttcgccatgttccactctgcattttctattctggtcgcatcgtgaaatctgccaccgttcaccgccggctacgctgtgaagccgctgctgtcgccgctgctctgtcctcctcctctcaggctagctgacatgtgggtccagttggattaggcactaaggactttcattactgaatgtttagatctggtaaggttgtaacttcaaataaccttacaatgacatgtggacccaagaacatgcatgtaaatagattaaaactcaagaactcttaatgaagattcaattaaaacgtgctagggacctcgggacctattactagaacctctaggaatctttctgcaaaatatctctcactgaccagtgggccctatgtgtttaaaatctggaaaaatataaggaaaatgccttagtgaatatctaatcaacagaaaaataggttaaattgtaaattgcatataaaattcattttagctccaatctggatgaaataaatttctgtagaatcaccagttatgaaccttaatatggaaacataaaacttggcacttgcagtagaataaatagctctaataattcacataagaaataatgaacatagagcaatctccaacttagaaaattcatataaaattcatcttaacttaatttggagtgaaccaagctccagtattctcacaaaaccatgttcttaatttacatgaactaaaacttgatactttctgtattaaaataatcaccaactatttaattggtaaaataactagtatagtgtatctagaaactataaaacccataagtgatttattttaactccaaatgagatgaactaaatttgttagtttgataaaagcatatacatttgttctgtagataaatctgtagaagaaaccatatccaanaacatcactcanatttgaataatgaattaaattaaaagatggtatagaaacttctagaattcatataaaatttaataccagtctaaaggaagagatctcaaagtttgttaggttataagaaccatgaccttagtttttataaaataaaatatgacactttcagtacccaaaacttgtctaaaatttaaatagttaacaactactataataaatcacttagcttgtaaaattcatagtaaaatcatcccaactctacaaaaatgtgaaaccaattttgttgaacacctgagaacatccccttcactgcagcaagccaacaattcataaatcatagacctaaaatgcacctaagaactattagagcttaattaatctagtgctagtattacatcttgaaaatttataactctctaatgcaaagtgataaaatataaattctttcatctaaattcatcttagaccagtacctaaccacactagtaaactcatgcattttagagcattttagatttttacatgttttggcatttatcgttaccgttatttcttttagacggtgaattcgttaccggtgaggtgattggtcttatagctgatctcaagaaggtcttatatcaaccaaggcaagtgtgcccttcctttgaacacattgaatcccatgttttcgggctaaatgttttgattgtaaaagttgcatgcgtaattcgaactatcgaaactggattgtagatatgaccaaaaaaaaaaaaaatttgcatgaacccttttgaaaatcactcccttgctgttttgaaccttaggaataattagagtacttttattgtgctcatatagctaagttaagcttttataaaatgctaatgcttagccttgcttagtaataaataaaaacatggctatggaatcacttattatactatttggaaaacctttttatgtgatatgggcagcgatgtgttcgctggatatttgtgaaataaaatgagatgaaatgtgatttttagacttgagcggcatgtggtatgcatatggtggtagttgcatactgatagggggagtattcgcccgagtcgattaaggaccgaacatatcacccattatgtttaccgtacatccacatgtgctagtatgggatggcctaagctgattaatctatttaggactagccttgcattctggtaggccggtgtgtatgagttagtcgataattctgagaattttgtcgataacttagaggaactacccatgagtgtgtgtttgtgatgatcataggatgatacattccctatgtgtgtgtgtgtgttccgtgaggggtgtactgatccacctcacggcatgggcgtctaagtctgtccaatacaacggtattgtgccacgtggtgggttcccgtcgtgtccgccaccacggcattaagtttaaggcgtgggcccgccacttaacggttctagacatatttccaagtatacctaagatggaggaacacgtatcgtgctggtgcaaggctagattctaagtagtgtaaaggcttcgttatgacctctagaccgcactcaacgtatagagtgtggtggtgcatcgcgagcacaaaacaaactagagtgttgttcatatcttgtgggtaaagctgtacaaactctacagagttctaaaaactaatcgattagccgtgctcatggtcatgagcgacatgatgatgtgctatgggtataattttgtgatttctaaatgcttttgaaactaaaggaaaaagtacgaattacccccccgaactattgcggtcgtccgaattacccccctgaaccacaaaaccggacattcttcacccccaactatgcaaaccggacgaattacccccctcgacccaatcagtggtggttttggtctacatggcgtacgcgtggaagtccagtcaacaatttatttattagtaaaataggtgggccccacctgtcagcggcctcctcgcgcgcccgctcccgcgccgcgccgcggatgccttgtcctccagcgcgcgccttacctctttccggtgctcctcctcctcccctcctgccgccgcggccgcggcgccgccgtcggacgccgtgacaatgacgacggcggggccgatggagagctgcagcttcatcgtaatcgcgtgttggcgtgttgctcgtgggaggaggagacggtggtcgtggtggtcgtggagttggacgagaacgcggcggccaacggtgccgtggtggacgccgggaggagctgctgctcaggcggcggcggcggcagatgatgatgatgatgccgcagcgctgcgtgacggatgaccggcagcgtcgtcaccacgggcacggcctgccgcgcacccgtccagagttacacgcatcctgttgctctatgaagctctccaccctgcaaccacacacacacaaccacccccaaaccaaaccaccgccattagcgcacactaaccataccacttaaccatcatctcatcaccaaacacaacaaaaacacggcgatcgattcgaagattgatcgatcatctgtacatgtagatcgatcgaacacgacacacactgaccaatcgtgagagcatgagacaaccagaaaaaacccatgggacaacctcgcctcgtctcctccgccgccgcctcacctcctccaccgccgcctcgcctcgccgctgccaccacaccccgccgccgctcgccaccccccgcctgctgttgtgcgcgtgcgcgtgagagagtgagagaagagagagaggaagagtgagagagaggagagagagagggggaaaagtgcaataggagtatgacaggtgggtcccagtatttttcaataaataaattgctgactggacttccacgcgtacgccacgtagaccaaaaccaccgtggattaggtcgaggggagtaattcgtccggtttgcatagttaggggtgaagaatgtccggttttgtggttcaggggggtaatttggacggccgcgatagtttggggggggcggtaattcgtactttttctgaaactaaatgatttgagttgatgataagattgatatatgtgatatgattgccttacttcccgttgtgttgtaagggaatgatgtctatctatttatgttgatatcatgccatgattaatatgcttcacaatttgctaaaatgttttgcttaaattacgttgcaaatggtttgtgaactaaaatttgctttatgctgaaaattgagactacaaatagcctttcctttgacatagagctttcatgtatgtaggtttgatagtgctctgccatgttttgtctaatttatgttttgcaggaataggcttagtttaatttgagtgatgcgggtttcgactgcttcttctaggatgtgaacttaatggggtaaacccctagtcggtgtgcttgaggattgggtagtcaagcttccgctgttctctgatatagttatatttggccggtcggcctatgtatctatttattagttgtaatctgagttttatttgctttagatgtatcttgctatgtatattcatacttaagatgaaagtgtgaatctagtgcacttcctgggaactagattcacatgagtatgagttaggaatatttgagatgttgtagctctttagccatttttgtcaagtctcctgaatgtgtaacacatatggtcgccgccttcgagtggtttgacgggcacatctcaggctgaagttgactggcaggctaaaggcccagcaatgtctccaatattcctctctcgaggcgtcggatgtttcattatgattgctcgatgacttgaattattcactttatctcccaattataatagaaggtccggagagcctacgacagcatggtatcagagcaaataccgactataggagcccctttaagttggtcgtttagaattgattcttaaaaaaattattttgagggctttgctctcagctacaaattatttgcgaaaatcatatttaaccttatatcttatccctctctggatattatttccctatgtctcatgttttgatttctaaaactccttatcttgttccataggaccgaaaccttttgaaagcttatatttctgtaaaaatgagtttgaaaacgcttattaatcgcaatagatcagtaccaaagtgttttgaaaagttttaaaatctatttgcaaaattctcctatgtattagaacggttttgcaaaaatctcgggttttggaatggcatatagagtgtaggttttgaagttgattaaataaattaaaatttgatagacatgttaggttgtatcacataaacatgttacttctgtaccatggtgaaatttgatgggttttttatgctcttctatcccagcatttcaaaatttcgttatgaccttgaatgggtagatttggggtaggatggaattgttgtgttatgaccactagattgaatgcttagatggaccacccaaaaatcttatagcctctgaatcttgttggtttcatgttatgatggaatggttaatttatcaaacttaaaacatgctatagaaattcaaatgcattagttgcacgtgttctgaaatttatagccagcaactttcacgaaattttgtagcccaaaccataagtgataagcatgccatcttttagcagtagttagtgtactaccatatgaagcatcatgaattttggtagaatttttgaacctctgcatcaaggtgtaaaaattcatatagtctgcatagtcaggttctgaaatctgtaggttgcatacttaacaattttatatctcctaaaccataaatgataaaatgaaaacctttggtcagtaacttgtattcttgtcaggaaagtttcatgatttttcgtgggatttttacacctgtagattaagagataaaaattcaacaaccatagataataacctgttccagaactgcatcatctgtcttcttctttttgaataaaataaagtacttgtccaaaaatcacaattccttcccagaacatagaaaactttgtaagcaacctgaatataaattttatttgaatttacaagccttctaggttggtcattaacttctattttcagcagattgacacctaggacagacctgaaaccacctagcttgttcatcttccataccacaatcctgcttgctaaaacttttaaattttaaggggggtagtatgataggttagcttcaatcatgcaagaatttagagacctcgaaccatctctaatatcaaactcaataaccataacagtcataggaatatctttcaatcttgctgtcctaaaactaaaaatgcatgaacttgatttaggaaagctaaaatttgatccctagtaacttaaatctagagctctatcgcagccgtgttcatttctgtgtatttgaatcattcctcgatgcaccatgtcgaaaatgatacatccaaccaaacatcatcatccttaggcttatttctaaaacttgttacagtttgatccaaaattctaaaaactttgagaaacctttgacatttgttaatgaaatcgaccaaagcaaaataatttttgaacactcccacagattgcactcccatatagcatcatctacacacatagatctgacatatctcatccacacacatagatctgacatatctcaaataactagatccatatatatatttctacagagacactagaaaggataccctcatctcaatcgggcggtaagccccatctcaatcgggcacagcgtccgtcacaggctagaagtcactgatgtgaagagttatctcaatcaggcaaacggccgtcacgaatgaatatatcttaatcggaccctaagtaaagcccgtcaccgatagctttgacccagacgaccagtcaaactatagcccgtcacagatgacctatctctatcgggccacaactagcgcccgtcacagatgactactaacctttatcgggcctaaactagagcccgtcacagatgatactcatctcaatcgagcctaaactatagcccgtcacagatgactgatgacctcaatcgggcctaaaatagagcccgtcacagatgactactgacctcaatcgggcctaaactagagctcgtcacagatgactactgacctcaatcgggcctaaaatagagcccgccacagatgacctcatctcaatcgggcatttagttatggcccgtcacagatgactataatccacaaaaaaaataaattttgttttttggctagcctcaggcctttgctagccatacccgctgcaaaaatgacagaaacaaacacagatatctaatatccccagctccccagcatcacccattcatatacatatgcattcacatacacagacatcaacatatttcacgcaaccacacattcacagccatctcatatttcacatccattcacatatttcacatccattcaaatatttatcatatttcacctgcaaaaccgagttaattagatcaaatatttatttagcaagttttaacataaacatatgaaatatatacataaatataagcatcacagttacatcatcacaattgcataataagtgttcatcattgcctaaacatagaagttcaacattgttcatcattttagtttaagcctaaacattcctttggggttaactatttcatggaggatgaagctggctatctcctcgtgaacctcccaaagctggtaggcagagacttggttattgtgccctacattgtcataattccagattagttgattgatcatatataagtactaaaatgtagttagtctatcataattgagaccaccgacctcaaactcagccaaggtcttcaccttttctctatacagaaggcgcatgttgtggcacacatggaatccgcactggtcacctatttgttgcttcaccgggaagtcttttttgtggatgagggtgtcatgtcctatcttcctgaggcctcctctttgcacgtattgggcccacgcttcatctatcgctagttgaattggggtcaaatcatatgcgttcttatcaattctggagttcaggtagtgacatgtactccacttaggtgttatgaccagaaggatccaatgggcactgcggcattaatatagtgaaagttaattaagtactcaaggaatgtgtcatgactattgattataggtgcacataatgtactccttgtctcggcgggaccataaggtgtcatagatgtagttgaccattccttgacggtcattctggagatttgtgacaatgaccacttgtggatcaaggaaggcaatttccggtgcatgcttctgacaccattgccaacttaacctacacacaggataaacgatcttgtaagaaagttaaaccgattgttattaccagattgagttgggcgacaatacttacaaggagtagcacttaagaggcttgtgtccaccgctcggagcctgtagaggtcgaaaagatccttgaagttgaccatgatataatttgttggaccaaggaatggctttccatcgtgctctccaaggatatcggtggctttattcggcttcctggcgttagatttctccatgtagtataagtgaaggtccttgcaagcggtgcccattgcggcaagcacgtcatctccaaccaatggcatgcctagtcggaactcctgtggagcgacatatttcttcttgacctctttgcccttagtctcttcctggcccttgcccagatctagcttccttggagctagaagcgaggcctgcacctttcctccccttcctctcctctttgcttcgggtttatcgagagtaattctctgaggggaagagtgtgccttcctgctcttcttcatcggtgggggttcatgaattgccttgctgtcggcctccgttcggtcctccccaaaatccgtgtcgtactgcaactgcacatcgtaagattgtgcatgacgatcttgagcaggaggggctgaaggagcaggggtgggtctctttggtagacgaccgcctggtgcagtgtttggcctcgctgtaaccctgatctcaatgaggtccttgggccattggatgaaggtaccacgggcatttcctagtgagaggacctcgtcgttcggtggatacttcagagggaacagctcgtatttgggcttcaccgagtcgacttgaacttttgcacagtcggccctgagttgcgctccatgcactcttgtctttggggtcggcttgtacgcaagtccctcggctgctagaaccgtgaaggtcggcatcaccctaactatgagggtgcagctcgttggttcctgcgatagattaatcaatttttttagaatattacatataatatggattcgttaagtctttcatgtattgagtaagttcacttttaccattatgtggtcgacggtgctgtcgaccgatgttggattttccgccaactcagttgatgcgcaactgctgcgtttttgggtgggacttcctaactcttcgtgcgccgcagcagcggtggcctgggggttctgttgctcttctcggatctcttgcctaatcttggtcctcattgactcgagcttttcgtcgaattcagatgtcagctcagctcttatcgacgcccggatattggcttcaagccatgcatctttctccgccttgttggaagtccgcttcttgtactgccacgcgtagtatggaaatccatacttccagggaacagaagacccaacgcctcgtgtccgtccacggtgttccttgttgcccaacactttcgtgaggaggtcgtcctcgcgtctttgagagcaggcctcttgcgagggttgttgctcggcaaccaactccttctgcattacaatttagtggggttaaataaactgcacgatgggaaacaatgcaaacatctagtttgactagatacttactatagcttcgtacactcgttgatcttctgcatttggcatgaagattgtgccatcatcattcttctggtacctggccctggcccagttcctagcccgagggtgtgggatatcaccaaacacgagtggcgtgttcgattcctccgcttcttcatcctcacgcggccattccttttccttaccggcatatccggcggtgccaagccggtgtggatgctggttcctggtctggagcaagtgatatgcctcgcttctagctctggactcgggggtcgacttcttcgcatggaattccacccagacctgttccatgatccaagaaaatttctctcttggatctggattcgtcgggttgtagacgaactcgccgactagcttagtcttgaagttcttccaagcattgcccataaccttgaaagcagcccgcctaagacggtcctcatgctccgcaggataatcgaagctctccttaaacgttagccaagcaatgtccttctctgcggccggcacgagcttgatgtcatcttgcagaatactgaatttttgcctccctatgaccccgcagatagacctaaatcggctccatattttccttggagatgtcgacaaccctacggcatccaccgctattatgcggaaccgttccttagggattttgtttcctgtcctaggagtacgtgcccttgaggacccactagttgtcgtcgacattggttcgccttgctgagacatcgtctactttttttcaaaataacaaaaatacacaattgagtgctacaatctattacaatgaattgaatgtcacttataaaaataaatgaaacatataaataaacaaaattgcgcatctcacagtaataaaacgaaccacatttcatctatttactaaattcattaatgcaccacgtataaataaacgaaattgcacatctcacagtaataaaattaaccacatttcacaataatttcattaatgcaccacatttcatcccaaacataaataaaccacattttatcccaacataaaaaaaccacatttcatcccaacataaataaaccacatttcatcccaacatgaaccacattgcatataaataaagttaaatgaaatacatttcatcaatcactacaatcatctatcacaaaattcataaatgcaccacatttcatcccaacatcgacatgtctcactcacagttcaatcacatatcatccacatccacatttcaatgacatgtcattcacagttagcagaggacggcgcgatggagtactcacctgaggatggccggtggggctcggtggcggcggagccgggctcggtggacggcgtcgccggtcggtggaggcggcgtcgggctcggtggaggcagcggtctcggtggcggcggcggcgggctcggcaaaggaggagttcgcggcggcggcggtgggctcggtggagggcggcgccggtcggtggagacgccggtcgggtggcgtcgggctcggtgggggtcggcgacgtgcgtcggtgaggacgcgggcggcgacgatgaggaaggccaacaccggtctggtcggtgtagaggctcggtagtggcggcggcgggctcggtgggggtcgtcggtgaggaggcggcggtggtccgaatggagggccgaggaggctcggtggtggcggacgcgggctcagcgagggaggcggcggccttggcctcggcgtcggtggcaacggcggcaggttcggcgagggaggacgacggcggtggcggcgggctcggtggcgacggcggcaggcttggcgagggaggacgacggcggcgctagggttctaagtaggcaggaaagtgtagcgggacttagaaaaattttcgatccgatctgagaaaccctagttatagtagagtgatgagtcatctcaatcgggctttacggtagggcccgtcacagatgactcatcggtgacgggctccatactaatgcccgattgagatgacattcaggcccgtcacggatgactcatctgtgacgggccctaagataatgcccgatagagatagattaatctctatcgggctttaactaaggcccgtcaccgatgactatttttccatttttccattcaagtctttatatttgtgagtacaaaaatatagctgctgtataataattcattttgttagtcataatacatttttggatagtaaatgatttcaaatcgaaatatggtcaacaacaaaattgtagaggttatcaagatctacaacttttattttggtcatttgtctatataactttgtttccaacagcttgaaattgattttgacaatataataaatctaaatagcatttgtaaatactaaatgatttcaaatggaaatatggtcaaaaacaaagttgatcctctcatcaggatctacaacttttattttggtcatttgtctatataactttgtttctaatagcttgaaattgattttgacaatatgacaaatctaaacagcatttgtaaatactacatgatttcaaatggaaatatggtcaacaacaaagttgatcctctcatcaagatctacaacttttattttagtcacttcttcatccgacaaagtgatagttatactattcacaaaaatcacatttctctcatctggtttatagatatcaacacagatatgtcaattttgtaaacattggtactatcactttgtcggatgaagaagtgaccaaaataaaagttgtagatcttgataatctgtacaagttagctgtttatggcttttccatttgaaatcatttaatatttacaaatgctgtttagatttgtcatattatcaaaatcaatttcaagctgttggaaacaaagttatatagacaaatgatcaaaataaaagttgtagatcttgataagagaatcaacttttttgttgaccatatttccatttgaaatcatttagtaaccgaaaatgtattatgactaataaaatgaattattatacaccagctatatttgttgtactcacaaatataaagacttgtctagaaaaatggaaaaatagtcatcggtgacgggccttagttcaagcccgatagagattaatctatctctatcgggcattatcttagggcccgtcacagatgagtcacccgtcaccgatgagtcatctgtgacgggccctaccgcaaagcccgattgaaatagattaatctctatcggctgtaaactaaggcccatcaccgatgactcattttccatcttttatttgttgtgagtgcaaaatatatagctgatgtgtaataattcattttattagctataatacattttcggatagtaaatgatttcaaatggaaatatggtcaacaacaaagttgtagagcctttcaagatctactagttttattttcgtcatttttctatataatttttttccaacagcttgaaattgattttgacaatatgacaaatctaattaacagcatttgtaaatactaaatggtttcaaattgtaatatggtcaacaacaaagttgatcctctaatcaggatctacaccttttattttggtcatttgtaataaaacaaaattagccatattaatgactacacatatcaagtctttgcaataaaacaaaatacttcattcattacaatagataagtacaaatccatcggtcacaaggttatgccttccgtatgatgtgaacgagcatatgccacaggctcttggggatcatcgtcaaggtcaatgtgaggtcttacatgaagattatggttgtattcttcttcatcgacgacgttgtcaactcctacaattcggcgctttccatccctcacgatgtgcatcttcttgtttgaagggtcttttatgtagaatatctgctcgacctgtttcgcaagtacaaacggttcatcggcgtatcccaccttagatagatctactaaagtgaaaccttccttgtcggctttgacaccagtgcgtagattcacccaacggcagcggaacaaaggaaccttgaacttgacgtagtttagctcccagatctcctcaatgcggccgtagtatgtgtttgacccaacttgatcctggaatgcatttatacggatgccgctgttttgcactgtgcttttgtcatcttgtttgacggtgtaaaatgtgtatccatttatatcgtatccttgccatgtgtctacggtccaagacggtcccattcccaacaactgtaatgtctcatttgggacatccgtggacattgtcacacgattcatgaaccattcgttgaaccgagaattatgttctttgttaatccatgcatcagatcgccccaagttctcatctcggattttcgctaagtgctcctcaaagtatgggccaacttctgccatatgttggagcacagcgtaatgaacctgcgcgtacgacgcttcatcgggcctaattcttttccttccgattgtgccaacacctgacaaccttccctcgtgacgaaacacaggaactccgataggatcggcatcggacatgtaattgacacagaactcaatagcctcctcggtcgtgtaaccttcaatgatgctctcctcgggtttagctctgttacgaacgtatgacttcagaactcccatgtacctttcaaacagccacatttcccttagaaaagctgggccacatagttttgtttgcttcaccagatgaacagggagatgaaccattatatcaatgaaagacagtgggaaaaaatatccaggtgacagagggtattcacaatatcaatctgcagcccatcttgatcttctggatctataaccttctatccaattgcattgaagaaggcgcacagacgttggatcgtgtgacgcactttcggtggtagaatgcctctgatagcaactggcaagatttgtgtgattagcacgtggcaatcgtgagacttcattccaacaagttttagatcgtccaatttaacatacttacttatcctcgctgaatagcccaatggaactttaatatccttcaagcatgataacattgcgatcttctcatccttccacagtgtgtggcaggctgagggaggtacactttacctgtctctgcatctcgtatgggctggagttcactgcgaatattcatgtcctatagatcaaggggcgcgttcaacccatcctttgtcttcccgggaatattcaacatcaggctaaccaaactctcacacacattcttttctaaatgcatgagatcaatgcaatgacggacatcaagatctttccagtaaggtagccgccaaaatatggattttttcttccacataccattctcctttgtctgctacgttttcttttcttcccaaactcattgcttttgtccttgaccatattgtggacctcatcaccggacaaatctttgggagcaggctgaagttctctcttaccgttaaaaattttcttctttcttctaaatgcgtgacgtagcgggagccacctccggtgacccatgtataccatctttcgtgatttcttcagccaccggcttcgtgtatgttccttgcaatcggagcatgccttctttccttttatagtttgtccggaaagattaccgagtgcagggtagtcattaatggtgcagaacaatagaactcttagcttgaagttctcctgaccatatgcatcccaagtttccacaccttctttccaaagaatctctagatcgtcgataacaggctccaggaatacatcgatatcattgccgggttgcctcggaccttggattaacaagcacaacataatatatttctgtttaaagcataaccatggcgggaggttatagttcgcaataagaactggccaagtgctgtgagtactactcatgtcaccgaaaggattcatgccatccgtacatagacatatcctcatgtttctagggtcggcagcaaagtctttgtgttttcgatcgatattcctccattcaatcgaatccgctgggtgtctaagcataccgtcattccttctctccgtggcgtgccaacgtactaacttcgcttcgttcgggttggcaaagattctcttgaaacgatcaatgataggtagataccacacaacctttgccggaccacccctctttgacttatttccttcgtcagcacttttctttcgcttgtatcgagaagccttgcagacaggacaagcatccaagtccgcatattgcttgtggtacaatatgcagtcgttgggacaagcgtgaattctacggatctctaaccccagtggacacagaacctgctttgcttcgtatgtcgtctcgggcaatgtgttctcaactggaagcatagccttcaaaattcctaaaagatctgtgaaactcttgtctgtccatccactacttgccttcagcttcattaggtccaaggtaactgacaacttagtgtgttttgctttgcatctagcgtacagaggcgtctcggaatcactgaccaacctgctgaacttcattccatctctctcattctgggctgggtcctcaacgtcacgtaacatgtcttgcagcagatcgtgatccacatcaaccatttcacccccaatggagaaggtataaacatgtcatgctcatcttcatcttcctgattatgcgcaccacttctgtctgctgctgctccacttcctcattcttgctctccatgcttcacccaacatgtatagccctccatgaatcctcgttgtatcagatgaccgtgtacgtcctctccgctatcaaacatattctcttgcaatctgcacatggacaacacctgtaatcactgtttcttcttatccgatcctcctccgcggcgttcataaaatttattatgccctttctgtactccgtagaatgacgtttcaaattttttgcatacatccaacttcgatcaattgctacaaaataaaaaaaaacgaattagaggcacatattataagatcagtattgcaaaagtaagatgtgatgaaattgctcaattaatgattaatattactcacttgattgatccattttgatcacttttgggaatttaatttctgttttccttggaaaaatgacaaaaaatcgccccctacagcctcccaccaaaatagtgaacagtggcatacagttacactaggtggtgagggggtatttatacttgcaacaaatatctgtaatggccctacaacaatcaaccgtgacgggcatacaagtaatctctatcgggccttcataaaagcccgtcaaaaaagagtgtcatctgtaacgggcactaaacttatctcaatcgggcctctagttggagcccgtcacagatgaccctcatctgtgacgggtttcttttagggcccgattgagatatggaacccttatctcaattgggcctcaactatagcccatcacagataagtgtcatccgtgacgggctttagttttatgccgatataccatggttgtgcgaccatatctcaatcgggcgaaacttcagcccgattgagattacttcctctgacggcccgcaaattccagtcttgttatgggccgtcacagatggaaggatctgtcggtataaccgtccctgtcctgtcttcggtgattattctcatgatctcggtttttgtcgttgttgtgtcggtcattatgaggcgactgtctcgatcttcattgggggtattccctcggccgtcgtctctttctcaccgcgagggagagcaatgatggtgttgtcggtgcatagtaccgtcctcacgacgagaaggggagtgatggctgttgatggtcgttatcgatcagtttcgaccgtcaatattaccaaaatagagtagaactagtaatgcttgcaatgcataactatgtaagaataacaatattccactagtattaggtttactaaccttttgcagagaataaccataaagtagaggagaatcgatatcaactcaaacgataaatcagtcggacgatgtcaagaatcagacttatgtatgaatgggccaagaactcagaaatgacacgatcaattgggccaaaattcacaagtttgcagagaagaataatagaggaggccgccagccaaaccatgggatggttgggccagccccaggttcagccgaacctccctcatcgctgctggatgcagggtttcttctggacagtgtggattagctccaaatgatggttggagggtagttccgaccattccaaccgtcacaaccgtcattgggaggctatataaacccctcaccttctcacttcactcacaaacctcaagcaagagctctctcatttctctcaagtttagttcagtagtatctagctggtggaataggaatagagtagaaatcaggagtccggaagtcttcggaagagtttgggtatggctctagtggcttttctcttctcttttgtaagctttgtacttttattagaatactcttctgtatacatttatggtattgaaatactttccgagtatatgaatgcctactttacattatattcatgttatactgaatatacggctagcttaactgggagatgctttggtgcgggtataatgtttgcttatgcaattactctatgtcatgacgatgatattagagtagtatctggtagtttagacgtggtgtctagattacgggatatcattatttggggttatatgctgcggttgagaggtgggccgctgatgatgacagctcagtatggatattcctccaggcctatatagaatcctaagttaattctctagggagggtatggttgtatggtcatgatgggctgtcgtaaggaagtcgtcagtcaggggtggcttctcaaagtaccaggagggcatcggatagagggtattatctagtatatcggttaactagaatatatgtatactatatatattagaagtataggaatagattatctttctcttttctttccacttagcttagataatatattatgagaatgagtggctaatgcttgtgtgtcactctacccttagattatcttaacccctgcttaataatataattatcacaagtagcatataaattattagtcaagttctctctacatgatcttcccacgggataaaataaatacgatacccttggaatactctcgggtgaaatgctacaatggtatatctgtgcgcttgcggataaactctgtagccataatataccaggagtatttctgcgccattgctgggaattatatttctagtaatgtcgttaagaaataccaacaagcatttctggcaccgttgccggggaagattcataatagagattacctgaactaatattttatatttacctctgtataatcattttcctttgcaggctaaccttgattgtttttacttttgttgtgaaaactgggtagtgcatgactggtttcaacttgccggagaacttcaaagaaaatccagaagctttcttccagagcgtcaggccgcgagtcgttgctccacagaaaactctaccgacaaagaaaccagccgtaccagcgcaaccaaccttcaagactatggctgacaagacccttcgcgagttcgctgctctctctgctaacaatatggccattgggccgcaaatcaacatgggagacatggatttcaacttgaagtccaacctcatcacgatggcgcaggctagcccattctatggcaagcctaacgaggatgccaatgctcatctgcagcagttcttggagatctgtagcacgtacaccatcaagggcgtcagtccagacgccgttaggctaaggctgtttcctttctcccttctcgggagagcgaagtagtggttctatggcaaccgtgctgctgccaacacctgggatggacgactgcaggagtatgtggccacctgtcctcatcatgggatggacgactggctgatcctgcagaacttttacaatggactcaccccgatgtcccgcgatcgcctggatgcggcagctagaggagcattcttctctaaaacggttcgaggagccattgatttaatagagaagatggtcttcaatatgggttggagcgaggaacgactccagacccgtcagcgaggcatgcacaccgtcaaggagacggaactgcttgctgccaagctggacctcctaatgaaacgattggacgaccacgacaaacggctacaaggcaccatcaaggctttggactcacacgttacgtgtgaggtctgcagcaacacgggtcactctaggaatgactgctcggaaacccgtgaggaggcgatatacatgggcaacaacaacaacggtactgtccacaaggagatctggggtgaaaacaaccacgcccatattatcaaggaggtaacaacaacggtaacttttctaaccagccctccttgatggatctattctttgtggaagctaaaaccactgatgcactaagcaaaaagcttgcggccaatgacaagatcctagagaacataaatgttaagttagatggcttcgcttctgctttccaaaactagctgagcttcaataaaatgatagaaacctagctagctcagttagcatccttagtccctacaaatgaaactgggaggattccggggcaacctgactcctccgttgagaatgtcaaggcgatcacgacgaggggaggtaagtccactcgtgatccgccgtatcctaaccctgcaggaactaacgggattgcaaaagaagcgccatctagtgactcggctgacaaggaagttcagccagagaagaccatgctgcaggagtactgtgacacacgattgctaccgtttcctcaacggagtaggaaaccgtcagttgacgaacaattcgctcgttttgttgaagtaattcagaaaatccacatcaatgtgctgctgttggacgctatggaagtgccaacatatgcccgttatctcaaggacatactcaacaacaagagaccgctcctaacaacggaggtggttaagctgacagagcaatgcagcaacgtcatactccacaagctcccggagaagaagaaggatccgaggtgtcctacaatcacctgctcgatcggggcacaacagttcgaccaggtcttgcacgatcttggagccagtgtcagcatcataccaaaggacgtctttgacaagctcaacttcacggtgttggcatcgacaccgatgcgcctacaactggctgactcatcagtccgttacccggcagggatagcgaagatgtgccagttaagatacgggatttcttcatcctggttgatttcatggtgttggatatgggcacagcaaaggagacgccactcatcctagggcgcccgttccttagcaccgcgggagccaacattgacgtgggaacagggagtatccgtttccatatcaacgggaaggaggaaaagtttgagtttcaaccgaggacggaacaatgctccatggtcagaataaagtacggggcgaacccacagaaaattcaagtggtcgaagtggagccacccaagacggatagcctggtgaagttcatgcaaaatttcctggataaggaaacaacgatgcccatgaaccgttattggaggacgccggtaaaaccaaccataccggccaagaagcaagagcagccgactcagaggaagacgtcttccgcacctaagacaaggaaggtgtggaaggaaaagccaaagacgcctgctccatcacctccggagacggatggaaaatccacgaactgaatcagaagaaggtacaatcttgcacgtcggactttaaatgacgtgacctttgtcaacaggtacattggtatgtatccgcatatttattttcaacaatttaattcttgcatcaacacatgtttgaatttcaaaattgtatttatgatttttgaattttgaggaaattcttcagatgaatttttcagagaaagccaaaataaagttttcaacgaaaatttactgttccacgatcacattgaccgttggaatccaacggtcgaaagtggggctggttgagcccactaggggtggttcggccgaaccggccaggcaacgattacgtgccacttttggcagggtaactgctagtgggtcccacatgtcatttatgaccgttgtgggtaccctataaaagccagccgaccgagagaggaaattcaaccccatttcaacacattttcatttcctcttcaaaatttgctctcaagttcattgaagctttgatagtttccctcaaattcaaacactaattgcatatatacaagttgctttggtgaaactaaccggcaggtgaaactcttgctattctaacccccatcgagttagtctgttcttgctccattgtgcagaatgaggaggcgattgtctcatctgttcaaggggtccggctcttcatcaagtcatcatgacgagtctagtactcgttcatcagctgatatctcgatggaagacgccgaagctccgcgatgactcatgaatggcaccgacctcggccttgttggtgatcgggaaagacaagcctactacatgccgagcgaccgggagtatgctcacacacgagaatactctccggagctgctgaaaaagataggtatagatgttgaatttcgtgctatttggaaagttgttggttggcagagatttgttgtggtagatgagcctggttctcgtttgcttactttgcaatttctgtgcactttgaaagaaatagaagatgtaatttcctttcgctttttccataaggagtatacacttacatggaaaggcttaagcacacatcttggttttcacgattcctgtaaaatcgatcttcagaaaggaatttctgggttcgagaaaaataggttttgggaagatatttctggtgctctaatttgcaagaaacctaggacgaatgatatccataatgctacacttaggctcatgcataaatggattgctatgactttgttttctagaggtgatcttagacccattaggggggatgaattgattatgatgtttgccatggttagaaagatcaaaattgctcctgtgaaataaacacaataatggcaacaatttgctgatgctcagttcgcaaacttcaacaacataatgcagcaacagcacgatgaccttcaagcgtacttccgcttccaggggttcaatccttaccaaggaccctgagcgaaagct

SEQ ID NO: 2846 - DNA, 4379 bp, Oryza sativa
  unsure (1)..(4379): unsure at all n locations
tcgacgccggcgagctcctggagctgtccctgatctgggacggcgtgggcctgaccctggtggagctcaacactccaaagcttcgtgttcttggcattgaatgctacttcatccaccacaccacgctgacgatgtcggcgccggggctagaggagctgaaatcatccttcaactgggaaactttggagaggctcgacgtcggcgacataatgtcgtgcgtgcggagcctcaaaaatctgtacttgagctctgatgggctccgcatcggcttcggtgatgtctccggacgccttctccggcgatgccccgccgtcgaatccctcgatgtccaccttgcttgtaaggtatctcatgccgatgaggaaggcgaggaggaagaggaaggggtgattgatgacgtgatgatgatgaacgacataccacatttgcctcttgtcacatctttgacggtaaatcctttttctcccgaggacgagactttttctgatgtagacgagcatacaaagggactacctagagaactgttgacagttttttaaggagaaaacttgctcttcctcctagttttttaacgagccaattataaactgttgacagtttataattacaatataattttatatataagtataatgtaactcgtatataaatattaaaataatatatgtaacactatatctaaattatatagagatgataatgtagttacagttcagttacatagtagttacgatgtagttacaatgcagttacattgtagttacattgtaactatattgtaactaggatgtaactgaagtataactaaaatataactcatcaaacttctctaaaacatgcaacagatcaagtggctagcatgcacgccttccaggatggagctctctaagatatgaacgacgcttatcttgtggtaagtcccctcttactgaattgatctcgacgtctatttcgataaacttttgttagggttaatttgcattgctgcacactgcaaatgtgctaatttaacattacaacaatcaaacattatgaaattagcacagtttgtcagttcattaaaaaaaattaaacattacaagttttgatatgctaacaactctcggattttttttctctccttttaattgtataggagcagacgaaaccaacagatcctgctggtaatcaagccgattacctcagcgtctcgttaccacatctcgtggaaattgggataaatggcttccaaggaacaaagtgcgaagccaggctgatggaatggctacatagaagtgccccagttgttaacaagatttgcttttttgaaacttaagacgcggaaaggaatatgaagatttgctacctcgaattcctttctctgtgcttggtagatggacggcaacctggactcatcgtaactgtgtgggacgtttgtgtggacgccgacgtctgaagaagagagatataattatatctcgtgagtttccaagatgagaagtaaacaaaaatggaagcatcatgcttattaaaggaaaaaaatgtgcgtatttactattgggaagtaatttaactatttgtcactattagatttgacaactctctatatgccccttatctattcatacaaatttgtcactggagagagattgcttcttaatttttttttcattttttgcatacatgtcatgaggactactcatcatcgtcttcttcctctagccgccaacctcctacctctttcttccttctcccatgtatggttaaacttccgcaatccaaaaaagctctcacccaacaggcgacacccctgccttacgcctcttttcaaatctctctctaggaaaaaaagtgggaaaaatagagagatggatgggaataggaaaaatgaaaatgttcaaaatgcaacagactcattttttttaacagtttggggtgctccgcctcccacaaccaatgcccatgatgggctgaaccgagcgaaaattaattgaaaatgggccgagcccaccgcgccacaaaaatgacttaggcacctcgcatcgccaaaagtggacaaaaacacatgggccaataatggtggggcagatctgatcaagcgctacagagttgcacgactgatcgccaaagagccatttcgatacgagtatgcagtgcagcggtgagcatggtgttttaggagaccatgtcccggtcaggcattgtgtcgagcaccgttaaatttctccaatcctaaaaagctcttactgaacaggtggtagtgacacccccaaccacccataggcacaacttgatccgcggtggtggggagagcttgtcggtgaggctatcccccacgggctgtgagggcagcggaatacgtggacggttgtggcggaccgcggtgggaggtttcactggtggcgaaaccatctttcgtcggtcggccgaattccccaagagtcccgggtggcgataaaaatcggggctaaagatgatctctagtcccggnnnnnganggnnncnggnnnnnnnntnnnnagnnccggttnnnnnnntnnnannnccaaccgggactaaagtcccacccctatatatgtcttcttcctcctctagctgcccgagcaagcttcaaaacatcttcaaaaaagaggggaggtcatgccaaaatttctagtgaatttattttggtgattatatacaaatcggaggtgcctaaaaggttagcaacttcatcctacaatgttttttttgtcatattacatttggagctatgttttgcacacttttttgtctccaaaatttagttgtaagttgatgagagagaaaatttgtgtggggaagaaagaatatatagaaatttagtttatttgctaaagaaggttttataaaatagttgagaaggaaaatatagtgaaagttaatcttaaataatagaaaacaaactaaaatgaaaattaaaagaagtaaaacacattaatattagtttaaaacattagagatagtaaataagaattatttggtgtaatattttataatttttgtataaataatgatatgtcattattgtatgactgttgaaagagtttgtaattattttataattattgtatgattgtcattattgtaagaataattatttgtgtatgattttttttcatgtcatgtagatgaatcggcaatggatgtacactgaccggcggtccaaagagtttattgacggcgtgtattattttttgagagtggccgaaactaacaggcataagggttttatttgttgtccatgcaataagtgcaagaatcagaaggagtattttgcatccaagactattcatttccacttgtttgagtcggggttcttgctaagctataattgttggacatcccacggagagcgaggtgttgaaatggaagaagatgaagtggaagacgacaatattccggacttacgttggatttgaaagaaatcaaacgggcgaggaggaaagggatgctgatggtaacgacgttgcggatgatcttggtcaaatattgtaggacgccaaggaggactgcgaaagtgaaaagggggcccataaattagacaagatgttagaggaccacagaacatcgttgtacccaggttgcgagcaggggcacaaaaagttggataccactctggagttcttacaatggaaggcaaaaaatggtattagtgacaaggcatttggcgatttattgaaactcgtcaagaacattcttccggagagaaacaaattgcccgagacaacttacgaggctaagaagatagtctgccctctaggactggaagttcaaaagattcacacatgtccgaatgattgtatcctatatggcggtgaggagtacgagaacttagaagcatgccctatttgcaaagcactacgatacaagattagacgagacgatccaggaaaagttgatgggcagttaacaaagaagagaattcctgctaaggtgatgtggtatttccttataataccacggctaaggcgtttgttcaggaacaaggggaatgctagaatgatgcgatggcacgctgaagagcgtcaacaggactggatgctgagacaccccgccaatggtttgtagtggcgaaacatcgacagaaaatttaaagactttggaaaggacgcacgaaacatacggtttgctttgagtacggatggcatgaatatccttttggagatatgagcagcggccatagcacttggtccgttacgatgtgtatctacaaccttccccctggctatgcatgaagaggaagtacataatgatgccgattattattcaaggccctaagcaacctggtaacgacatcgatgtgtacctaaaaccactggtcgaagatcttaaactgttgtggaagaacgaagcagtccccgtctgggacaaggacaaac

SEQ ID NO: 2847 - DNA, 1690 bp, Oryza sativa
ggatagacaggagcagccttcaccaccctcaagacagccatcacgaccgcaccggtgctcgttatgccccacttcgccaagccattcgttgtcgagtgtgatgcttccacctatggcttcggtgctgtcctcctccaggaccaccaccccacggcattctttagccacaccgtcaccctgcgacatcaatccttggcggcatacgaacaggaattgatcggcctcatcctcgtcatccgctaatggagaccgtacctatggggtcaccggttcctcgtaagaactgaccacttcagtcttaagtttttgctcgatcaacgtttggccaccatccaacagcatcattgggttggcaagcttctcggctttgatttcacagtggagtacaaggccggtgtcaacaatacaatggccgacgccctgtcacgacacgacaccgacgagaccatgctgctggccatctctgggccgcggttcgacttcatcgaccgtctgtgccaagcccaagacatcgatccgacgctgttggcactcagggaggagttcatggtgcaccagcacgccgccccatgggcgttgaccgacggcatggtgacatacgacggccacctctacatcccgccggcctcacctcttctccaagagctccttgccgcggtacacggcgacggccatgagggggtgcagcggactcttcattgactccgctgcgacttccactcacccaacctgcgcacggtggtccaggaccatgtccgcgcatgcatcacttgtcagcgctacaagtcggaacatcttcactcggctaggaaactctttccactcctagtgccgatgtccatttgggcagacatcaggctcgacttcatcgaggcgctaccccacgtgggcggcaagtcagtcatcctcacggtggtcgaccgcttcagcaagtattgccacttcatacccttggcgcacccatattcggcggagtccgtggcccaagcattcttcggcgagatcgtccgcctccacggagtgccgcagtctatggtctcggatagggaccccgtgttcacctccctattctggattgagcttatgcgtctcatcggcgccaagctccacatgacgtcggcatttcatccccactccgacggacagaccgaagccgtgaacaaggtcatcgccatgtatctccgctgcctcaccagagatcgtccctgccagtggctacgctggcttccatgggtagagtacatctacgagacggcttttcagtcctcgctcaagcagcggcaaggaatgcaacaatgcactactcggtagataggggaatacaacagcacatgcacctgcatgggtatgcatgcctgtaggctctacaggcgcacggctgtgtggtgttgagtattcgatatttgtgaaattatcagatgtccaacatgtggcatcctcctaattatacgcataatatcgcacatcttgaattgttgtttcttccgtaaataactccaataaatcccttaccccatattattgggcttagctattagcccaatatttttaagagtaaatttcacaaaactacacgttttatggtccaagttgcagaaaaccacacatattttgacacttggcacttaagtacatatattttggtagtgtttcacaaaaccacactatcaatgaatggatccacccgtga

SEQ ID NO: 2848 - DNA, 12618 bp, Oryza sativa
cttggaactcacacttatcgatggcatttccgggacttagacgcttgtcaatagcatttcatggattatctcataaacacaagacgttgtcttcttcatcgtaatttgcactgtattaacatctatccaaaaaatttatgaataaaatgatatggtatactccttccgttccataaaaactaacgtaatactggatgtgacacattctagtacagtactacaaatttgaacattcattgtactagaatatgtcacatctagcccgagcactacttaaaaaaggcaaatagatgtcgccactataggtgccggcacacaaaacaccgacacctttatgtccaaatatgtgccggtttttaaataaaaccgacaactaaaacctatgtcagagaaatgtgccggttctagacccaaaaccggcacctttaatcttctccctcccccactagccgttggcgggccccatacataggtgccggttctcaacccaaaaccggcacctttgtttcaatagtgcttttatgaacgacggtgggccctacacaagggtaccggttcttggtatgacaagacaaaggtgtcggttctcgaccaaaaaccggcacctttaatattctccctcccacactagctgctatgtcacatcctgattttcgttttaggatttataaattatttaataaattattattagaatttatattaaatgttcattaatttacaagtgaagttaaatataggaaataaaattttctaaatataaatcatggcgggatttaatttttatttaattctccatgattaattatactccctgaaattttctcagatttttcggagctcaattcctaattttaataatataaagaacatttcagtaattatccacatattaaattaatcattaaatggtcttattataatcttgttaagtactttgggtgtccaagtattttcaggatttttcttgaaattatttgagcattggaagtatttttaacaattcaaagatcatttcagtgattaatttaattggaaaagtaattaaaatccctttttcttttcaggctgaaactggaaaagttcacctttagtcctcggctcattctcccttcctttcggctggcctgatccctcctccaaagtccatttttggtccctccttcaatccggcctagtaaaggaagctcacagagaaagtctaccttacgtccctagtactgttcatcttcaacccctggctgccaaactgagaccgagttggctcggtttttctcctccgaatccggccttatctctcgtgcattcctaaaattagttgaggggaaatattcctcttatcctcctctatctcttccaccaaaaatccgactttatccctttgaattcgacgcgaatttggattcgttttcgagtttatctctccaccaaaccctaggttttcccggcgcgattctttgcgttccaagcctgatctctctctcccgtggctataaatagtgtcccctccctctcctctttcggccgccacctctccctctctccaccgtcgcttgtagcgccgtcgccgcgttcgtcttctctctccgccgccggcagccgctccagccgccgtttgccgccgcctcagccgacgccctcctgtgccaccacatctctcggctccgcaaggtcaagagcaagcccagcagctggttcccttgcgccgaagaccccgggaagcccgtcgtcgccatcaacccgaagtccattggattcgcagctgcgaagtgaagcccggccacccttccattgtcgccgaaggtcgccgaaacgccgtcgccaccgtggacagtacctcgtcgccttttggagcttgtcgccggccatctcccgtcgctgtttctcgttgccgccaccacaggtgagttcgctgtgtcctcctattccttcctgtgccctttgtttccgttggagcatcaccgttggtcgtcgccgctgttgtccagagtcgccggccgtcttccgtcgctgtccgtcatcacgtaagggttggtaagaatcgccgtcgcctcctctacctcccggtgccctctgtttgcattattgtgtcgtggttcgccggcaaccgccgctcttatgtcgttcaccggtgtagtttatccctagggtcttaatccaatataatctaatccgtggttggtctagcgttgtcatctccgtgtgttgctgctggaacgttgtcatcatcccttcgtctccgatcactttggttcggtgagacttctatccgttctctcttttcaatggcatattatttctttttactatatgtcatctaccaaatataatctaatctttttcaaaggttgttttaatcttttctctcagttataaatcatttgtaaatggtttaattaatttggaatagtattttctttaataggtttaattggaattcatctaaaattatctaaaatcatgatctacatgtttgtttacttttatgtactgtttatttggtttttattagtcttttttcccattttgcgtgttagcttgttgtttccgtcgttgcgaaaggttcgcgagtgcgtcggaagtggttctgaagactaattgaagaccgattattgcaaggcaagtcacacagatcctaaacacagttcctttgagcatgttgatcctatatttaaattctctatttatttcaactgtgtatttatttcaactgtgaacatattcctttgtaatggccaattcgcattgattactctattccttgttaccttgggtaataaattgattagcttgaaccttatatattggtttggttcagctaaaagctatatatatatatatatatatatatatatatatatatatatatatatatatatataattgcttagccatgcctagaaacattagctcattaatgggatgaatcatactacattattatttatggttatatttaatggtagctcatgatggttaatcgtgttatgataattaattgataattaaaacttggcaaagggcggttgtgagcacatggttttgaaggtcgtgctcataacaattaaggaccggttcgcgagctactgttatgagacattaaccgtgccaaccacaagccagcgtgggcaacggctttaccttttgtatagcatgattcattgcggggcaccagactgagaagcggcgagaagtccgtgggggtcgctggggagtccatgcctctggttattgagggggtgattatgatccaggaatggtgcactgtgatgagttgttgtgcgaagggtactgtcacaattccgtttcgaggtaccgtggtggtactgagagcatggtgacatgttttggggctgtatcttgtgggtacaatggtacacctctggccagagtaaaactattcgaatagccgtgcccgcggtcatgggcgggttgagcaatgtttttcgtgattagtctcacacctctcacaataattattgatgctataattggtaataatttgtttagctcctggtttggagttagatctgtacaactggatatggttgttcagaatggttgggcctgagcagcatgggtgtgctgttcagtgttgattaaaattgattaattactctattgttttacattctcaatatttttgctaaatgctgcttttgcaaatgagcctatattatgccatcctttggtatccttgtgcacatatttactgtgcggcttgcggagtatgtcatatgctcaccttgcaataatcaatcaaccttagttgaagaaaaatgatccagaagaataagacgtttggcttataccccagttgagctgcctgtgtgagtggagctgaagccatcgctagaccgttaattccgctgttgttttcatttcttttataagtatgtaacgatattattatgatggatttgtatattaaattgtcagtttgtgtacctcggctgattcctggacgagagttttatgcacaaataagtttggaaattactagtgaatttccgggcgtgacacgctatgacaagacaaaggtgccggtttttggtctagaaccggcaccttttgttccaatagtgctttttatgctccacacaaagatgccggttgggaagacaaaggtaccggtttttggtctagaaccggtacatttgttccaatagtgcttttcatgcccaacacaaagatgccggttaggaagacaaaggtgccggttttgggtctaaaccgacacctttgttccgacaatagtacttatactccatcccatgccactcgagctgattgagcaagaagagagcggcacctctcgttcttgcccgatcagctagaggaggggaggaggttttgctctttttttttttgtgtttggttaaagattgaagcctaaaggtaaatattcattatgaatgcgaattatatgcaaatgtctagaatttacacttacaagcaaatgtctagaatttacacttacaattttttggacttacgaatttgacttgtgaatttctgagatgttgtagagctcaagcgatttagtcaagtctcctgggatgtgtaacacatctggtcatcgccttcgtgtggtttgacgggcacgtctcaggctgaagttgactggtgcgctgagtctcagcaatatctcatttgctctttactcgaggatatgaatgtgaattatatgcaaatgtctagaatttacacttacaattgtctggacttttgaattttagacttgtgaatttctcacctaaggatatatgtgcaaattaatgttcacaatttaggccgagttcgttaggactggttgggaacaagtatcctatgcacggaaaatagagcggtctattagcgcatgattacttaagtattaactatttttttcttcaaaaatagatcaatatgacttctttaagttacttccgtatagaaactttttacaaaaaaaatgtatcgtttaaccgtttgaaaaacgtgtgcatggaacacgagagataggagttgggaaaacttgctgccggacacagccttagacttaagaatttttggacttaaaaattttagacttacaatcttttgacttaggaattttaaactaggcacattttgagttagtttatatatgcaaatgtttaggatttaaagataagaattttttgacttacgaattttgacttaggctagtaggtttttatatgttatgaacttgtgatgaatggcttgtaggtttttatttgttgtgatgaatgtgaatgtgaatgaatgtgctgtatggatgtggggctctagggatgaatttgggtttatatggaattggggttgtgtggatgaatttactgcaattttttttgacccaataaataggtgccggctttaaactaaaaaccggcacctattttaacagccacgtggcaatttggcttagaatttgtgatgcatgtttgtctattattgtaaataactttcagtgattaatatatttgctaggaagttgtaagttatatatagtctttcagaaacactacatactgaaaagagaacgaacgtaatgattattgaaaaactgatttagctaaggaacactcctgttactgctcatgatagaagtacttgatcacatatgggtataacatgcaaagagccatagcatatacttattgggatggtagcatgtaaaagtgccaaccctttctacggtgactactgaagctagctagttataattagttatcaccaatcaatgcatcctgattgaggatagaaaaaattaaacatcgattaacttgcttgtagctactggccaagtgagtaagtgtattccattttccatgtaactctgtccacagcaacaatgagcatgcatgcgaaccgaacaaaatctgcattttcagtacaacacaaatgttaatgagaggaaaaactcgaaggaatgaattaattgtgttatgcacaaaaaaataggaagctgaaccttgaaattatagctgcaaaaaaaaatgccccctattacttatcgcatttgccctgttcaaaagtatcagttattccataagtacgagccttgaaataatggctttgtttcataatacctttttgtttaagtagttctaggaacagaaatcgaaacgggtgattagcatatgattaattaagtattaactataatatattttatttacgaaacatatcatttagaaattcgaaaagcgtgatcaaattaaatgataaagtcaccaagtccaaccgtagtatagagcacagagttagctagtatgaccagacattgagaggcaatagatatattgagcccagtgaataactccaacagaaatataaagtagccaagcaaatgatcctctaaatgtacaaatcataacaaatatgttagattagcataaagttctaaaaggctgcagcaaaatggggatttgaaaagagaaatgggactgacacaatccaagtgaggaggtttcattctctaacaaccatatacaatgagttgctttatgatggagagtatcagtcgaaccatgatctaattgatttaaaaataaaatggaaacacatttcatgataagaccaactgtagaatatactctcaaaatttagaattgaaagagctcccctaaaaaatagttagaaagagtttgtccctcttcatgtcattttaaaagaaaaatgtaattgtcattattttaagtcgaactaactttcttttaattatgattttagatttgtgtagcaaccacctgaaatgatggcgattgcactggttatgctaggatttctactattatctggatatgtcacgggattatccaattatctttagattcattgtgaaggcaaaaactacacaccagacaatatatacaagcgaaacatgcaatttttatcaatgacactgccacttaaggtctcatctatcctagatttgtttgcaatgatcatggccaatagcacaaaagaggagatataagcagttggatggtgtcgtgctgatattagtagtactacagacaatagttgtgttatgtatgcaatacggaacgtgcaaatagtttgagcttcaaagatggaagctaccatcttttacgacttgtgtgggcttagaatttcttgtcacactattcatttcaatatttctaaaaatatagacaagatagcaatactttgcgacccattttccttttagaacccataatataactatattgttctattacttatttttgccttgacaagtaaggcaactaacttgtctataaagtttgtcacatgaaggaaaaatctcatagcaaatggctacaactacaccatatatggccttgctgagtgctcatctgaggtcacaagttttgaatgccagatttgttttgaggatcttaaccaggccataagggaaaaggtggaagaacgtcaacaatttggtataatttttcatgacaatcgggctaaatgcttgtgcggattagagtatactcagtggggggccttggccctctacatcgcgtgggggcaaatgcccctatcatttttatgtatacattaacctattctaactaagttgtagactgtcgacccccactcattttgcttcctgcatttgcccctatccaaaaggaaaaaaaaaccccaataagtaggtacggaccctaaggccccgttagatctcaacatggagataaattttggattcacgcaaaatgagaaaccttattagcacatgattaattaattaactattataaatttaaaaaatggatttatttgcttttttaaatcaacttctagaaactttttttttaaaaagcatcatttaacagtttgaaaagcatgctaacggaaaacgaggaagttgaaattggagttgaagaaatagaacagagcctaagtctttatatgttcaacagtacctttcgccaaaaggctataaaactaatccacgtgatttctaaaggaactcccattttttcctaaataaatttgctcctactagataaaacaaaaacaaatcaaatccctacatcatttcatatctggtacatatttttccaattaaaaaattattggagcacacattagaccaaactcgctcaatttcataggcttgcacaaagactatggtccatggacaagacgacacggtgaaaggcaggtgatgctcgcccgccatggaccatgtgtcggtaaaggggaagcaaggggcttggcactgaaggaccaaaaccgctggcgaagggtgattgacggcttcgtcatgatgggctgtgcgaggccatttgaagctacaaggagcccacatcgatctttgaagaatatatgatgaaatggttttggtgttggcatcccttaagacaaataaaggaagatggcatgaagacattcctattggtataattattttcctatttatatttgaggatagaatgccatactattaagaggtatgcaacgtcgatgtgtttttgtatgtctcggtgcttaaagtgacctatttgagagaaacccattaacctatcctttgagtgattttggaccttctttttggttgagttgggtaatcctctgagtgagctttccataaagtctaagatcgtaaaaaatggacttccgatcaaaaagttatggccattttgctctctggtgtttttcagaatgtccaaaaatattttgaaaagaccaaaaattttcgaaaattccgaaaatggctgcaaaactaagattgttttctgttgatgcatttcggcacatccaaaaaaggaatctttgccagaaacgactagttttcaggggctctggtatataaactcctccacccctccattagtgatggctattcttgagtttgaaacatatctatccgaagtcacataccccctctctaatcccctagctaagtggtagatctttgtgagtgagatttgagaagagaagggagttgggttgagaaaaggattgggaagagaagctaagagctagtgagtttcacttcatactttgagcactcaagttcatacttcgtagcaagcaattcttcgatctccatctacatatgtgccttgttatgttaaacagtaatatactaatcaggaatgagaataatttagtgaattaaaaattatacattgagattatgcttggtggatcttcagaataacaatagctgtgcattgatgaaatcaagtttacacactaccaggatactcgcagatcggacacactacaagcagcaacaactgcgatcacgaagacgaggacccaaggaggacttgccggcgaccatcgagagtttcaaccaagaaatcagaaaagtggaaatgggaggtagtggaaccctacccctttaggccttgttgggttaatccccatgagggagggattggagggaatttattccatacctattatggtgtggaattattccccctcaatcccctccaatcctcttcaatcccctctaaaccgaacaagaccttcttttaatccctctctcacaagtggaccgagaggattcggaaggatttattctacacctattatggtgtggaattttttcctctcaatcctctctgaaccccctttctcttgcagattaaacgagcccttatggcggcgataaactgctggaaatggaggggaatagggggccaaactacagagaagctattggggattttgagtttgcctaacttgttgattgactgaaaattaaggagagaaggcgatctactgacctagattgattcaatgcgcaataaataaactgcaagaagaatcgactgaggttaattgacccaccggtgtgcaaggaagaacggaggaacagcactgccgggcaccggcggcagacagccatcgccagattgggttttcctattctgttacaggagagtagagatggagaggttcagggatgaggcgtggaaaagtatgtcatgtggagtcattactaccagcgctgaagcaagctggatggtgctcaaccgcatgcatagcaagcaacaccaatcaaggaatagtcctttggaaagaatcaaacaaggaaagagttaatttaggaggaataatgacatttccttgtattaagatggccacgagccaatataaactatgtatccagccttgctaaaggcaagcaatatcaatcaacttttcctaatctcccttcttccaccattgggtgtgcagggaaggttcctgacacctcaaccgagtcgagctacaaactgcgtagccgcggcccggctatcctcggcaccgacacgcttgacaacttggtatcaggttccaggcgttcctcctcccactccaatccaccatcgtcacccactccatccatcacttccaccatggctaaaccatccaccaccgagctcgccgcgctcatcaaggtgctcacggccaccgttgacaagctccagacttaggtcacctcgctccagcaggctgcaccttccggatccaagtcctcaggcgaccaccacaacgatcggcctcctcgcttccagaagatggattttcccaaatacgatagcaagtccgatcctctcgccttcatcaatcgttgtgaatcatactttcatcagcagcgcattgcggatgaggagaaggtttggatggcctcctaaaccctggaagatggcacgcaaatgtggtacattcaagtccaacaagacgaaggcactcctccatggtgtcgcttcaccgagctgctccacctccgttttggccctcccctatgttccaatcctctcgcacaaactccgtcatcgagtaccaagacaagttcgagtctctcttgcctcgcgcaggcacactcacggaggaacaacgcatgcaaatcttcatggccggccttcaaccaccgctcagcctcgacgtcgagatccataatccacagacgctcgccttcaccatgagcatcgcccgcaagctcgagctgcgcgaccagtgcgccgcagctgccgtaccagggcctccgaaccagtgccaaaactagcggggcctgctgccggcgccaccccagcaactcgccctgccggcgcctcctcaaccaccagtgtcagaccctgccacggtgaccgttgagggccgaatggtcaagcgcctatctcaggctgagatggaggaacggcgtggcctcggcttgtgcttcaactgcaacgacaggttctcgcgtggccacaaccgtgtctgccaacgcctcttcctccttgacttggccgtgcctgacgatgaccacgacgacgacagcgcccaagaggggaccggggagacggagccacaggtgtcgctccacgcgattgcgggcgtccgttgctgcgacactatgcaagtctgcatcgaccttggcggcgccgcactcctcgcgctgctcgactcgggttccacccacaacttcatctccacattggctgccaacggcaccaagcttccgctcctccctcgcggcaagatgcaggtcacagtcgccaacggtgaacgcgttccatgtccgaggttgtaccgcgacacggccttcaccatcggcgccgaaaccttccacgccaacttcttcgcgctgccgctggcgggctacgatgtcgtcctgggcacgcagtggctggcgtcccttgggtagatcttgtgggatttcgactcacgatccatgtctttttggcggcacgaccaccgtgtatgttggcagggtgttgcaggctcgacggccccatcgctgcaagtcgttgccggccacgacatcatgggagccctgctcgaggaattcaccaccgtcttcgccaaaccaatgggcatgcctccacctcgatcacgggacccctacatcaacctcgttcgtgcttggcgccagtggccgtccgcccttaccgctaccccgcttcccacaaggatgagttggagcggcagtgtgccgctatgctgacacaaggattgattcggtgcagcacattggctttctcctcaccggttctcctcatcaagaaagatgtcgggtcgtggcgatgttgcatcgactaccgcgccctcaacgccatcacggtcaagaatgcataccctattccagtggtcgacgagttacacggtgcccgcttcttcacgaagctcgacctctgctccggataccaccaagtcaggatgaatgctgccgacgtcaccaagaccgcgttccgcacacatgacggcctctacgagttcatggtcatgccgttcgggctttgcaacacccccaccacattccaagcactcatgaacgacgtcctccggacattcctacgtctcttcgtcctcattttcttcgacgacatcctcatatagagcgactcatgggcagcccacctacgtcatgtacgcactgtcctctaagtcctacagcagcaccgtctctttgtcaagtggtccaagtgtgctttcggcgtctcctctatcagctatctcgggaacatcttctcctccgagggcgtcgccatggacccgcccaaggttcaagccatctccgactggccacagccgcgatcggtgcgtgtggtacaagaattcctcggctaggcgggctactaccgcaagtttgtccagaactacggcacgaccacagcaccactcacaacactgcta

SEQ ID NO: 2849 - DNA, 2583 bp, Oryza sativa
cccgtgccgcagtggttgtagtcgtcccgcgtcacctccagcaccgcgtccgccgcgccgtcgaacttgaacactgcgccagcccaaccagagaaggagaagaaatcagaacaaatcaagaaacagaggaatccaagaaacactgaggaaggaatcgagctttgttgactcaccgaggttgtcgccgatgtggaagcgggtggcctcggcccacctgttgagcgcgtcgggatgcgccggcaccttccacccgccgccgttgttgccgccgaccacgaggtccctggcgttcgccacggccacggccgccgcgaaggccagcgcggcgcagagcacggtagccaacaccttcgccatcgaagtagggtgggaggactagcaaaagtagaacacgagagcacgagaggagggaaacaggggaacgaggaggaggagatgatgctgtggcggccatgggaggcggatataaatagggtggtggagtggaggtagccgttggggtattcgaacgttcgggaggggaggcagtagagtagcatcgggtgccgcgaagacgcgtggcgacagcattcactggcattgggatgggatgggatgggatgggatgggatgggaggagtggcaggctgttgctggcttgctgctgctgcttctcagcactgggaaaggatgcttctgttttggaccttaccgttgctgttttggccttttgaggaggcactgggctggatgggatggcactgttctggtgtagggctgtcacctatggcccgtggggctggggaggcttgggaccagtggagtggggtccacagggaagtgagtgagaattgtgtgaaccttggagttaatattcctcctggaagaagtgtttgtgttgtggcaataaaattatcattttttttaaaaaaaaagtcacatgaatcgagtggactgttgggttcagcctcgttatcaaaaccctcaccaaattagaccctgtttagatgggactaaaacttttgttcctatcacatcggatgtttggacactaattataaatattaaacgtagactattaataaaatacatccataatcttggactaattcgcgagacgaatctattaagcctaattaatccatgactagcctatgtgatgctacagtaaacattctctaattatggattaattaggctttaaaattttgtctcataaattagctttcatttatgtaattagttttgtaagtagtctatatttaatactttaaattagtgtttaaatagagagactaaagttaagtccctggatccaaacaccaccttaatctacgtcacgtcaacctatgtgatcctgaacaattaagacatgtttgatagagttctaactctaaaaattaagtctttctaaatcaagcttcacctcttgagtttattttgtgagagcactttagtccactctatttttttttattgttggagctaaaactttttgtttggacttccaactttagaagagatggagttggagctgaagatccaaacatgcccttgatttggtttgattttgcttgtagatgatcaaggcgtcgatgttggatgagatcatcgatcggctacgtcaagttcttgctagaggcggaaatttccctgttggggtcggagacccaccctaagggccgggatcgggggataagggggtgttcagttgggactaaaactttttagcccatgtcacatcggatgtttggacgctaatttagagtattaaacatagactaataaaaaaaactaatttcataaatgagagctaatccgcgagacgatttttttaagcctaattaatccataattatcaaaactttactgtagcatcacattgtcaaaatcatggcgtaattagattcaaaagattcgtctcgcgaattagtctaagcttatgaaatgggttttataattaatgtatgtttaatactccaaattagtgtccaaatatccgatgtgacaggtacttggaataagtcctggaaaccaaacagccccctaattatcacccgtgggtgaacgggggcgagccgaccgcacccttcatctcccaccaatcgctattattgcctgtgagtgaggcacgctgtgcgggccccagtggtgcgggtcatcaaagaggccagggacgaggcccgggttcatctcttctagtaggatggggccgggtggactcgcagggggagcagggtggacccgcacctgtctcgcccccttgccatacctagttcttgcagctcatcgattgtgcgttttgatttgagctcagctgatgctgatggcagctaaggatcgattagacgtgtcatagtgactgctttgacactgcaggatcagcaaccagtggcgaatccatgatttacatcaagatggggctaaagcaaactagatatatcagcacgatcagcatttctctatgaaacccaaatacactacgataaacaaagagataatccatgaaatgctattgacaaacatctaagtcccagaaataccatcgacaagtgtgagttctaagaaatgccatcgtacaaatgtttttgtcccaaaaatgcc

SEQ ID NO: 2850 - DNA, 1324 bp, Oryza sativa
ctttcactaggattttaattattctagacataatttaaaggatatattttagggtcgttttgggacgtgacaaacctaccccctcttaaacggaatctcgaccccgagatttggaagaacatgcaaagaggttgggatgggctgccttcagctcgtcttcgcgctcccaagtagcttcttcctcggcgtggttgctccactggaccttgcataaacggataacccaattcctggtcctacgctccattgtgtccagaatcttcaccggcttctccacgtaggtcaagtcttcgcgaacctcaatctgctctgaatcggcttgctcggatagcactcgaagacatttcttgagctgcgacacgtggaacacatcgtgcacattgcccaaggatgcgggcagctccaactggtaagcaacttctccgcgtcgagtgatgatgcagaaaggccccacatacctaggtgcgagcttcccttttgtctgaaatctgtgcactccccataatggcgtgacccgaagatacacaaaatcgtccactgcgaattccagatcgcggcgtcggttatctgcataacttttctgctgagactgtgccacctttaggttatcctaaatggttctgactttagcttcaacatctctcagaatatcaatcccgaacacttggctttccccaacttggtcccacaacagtggagtccggcatttgcgtccatacaacgcttcatagggtgccagttgtatgctggtttggtagctgttattgtaggagaactcggcataagggagactcttatcccaggtcttcccaaaatctagaacacaggcacggagcatgacttccaggacctgattcagacgctcggtctgtccatctgtctgcgggtgataagcagtgctgaaattcaatcgggtggccagctcttcttggagcttcttccagaagtgagaggtgaattggcttcccctatcggatacaattttcttaggattgccatggagactcacgatcctagcgaagtaaagttcagctaatttgttccctccataggtggtcttcacagctaatttgttccctccataggtggtcttcacaggaatgaaccgagccaccttggttagtcgatccacgactacccatatagaatcatatccgccttgggtttttggaagtctggtgatgaaatccatcccaatttcatcccatttccattctggtacctgtaaaggttggaggagtccggccggtcgttggtgctctgctttgacacgctgacacacatcacaaagggccacgaactcggcgatttcccgcttcatact

SEQ ID NO: 2851 - DNA, 3022 bp, Oryza sativa
ccgccacctcacttgtcacgaccggaattaacccaacgatcattccatacgtgcgtgtattattccttgtcccaggaggcaaggtacaccaaaagttgatacaattcagagtttaacaagcggaagcgtaaatagttaatttattacatgggcgacgaaggcccagcacacacgaagataaacggaaaacagcggaagactagggcaacgaccacaggcacttgacggcaggcacgagctagacaccaaagtcttcatcctccaggaactcctcttttgggttagggaaaaattgagcaagattgagtacaaccaccgtactcagtaagacacacccacaaatgcagaataaatgcaaaggagtacaagggagttataataaaggggttagggtttgcagtaaacaacatttacaagacttttagttgcttagggccattttgtaaagacgatcctagagctacacagtgttattaatcaaggccgtgaacccgcacgaacctgccttaacccaaggcctacgatgattcagaccgaactggcaacctgacctgggtcccagctcgtcccaagccaacctaggccaaccattccatattttagttgttaagcaagttttaagaagtaaaccactaacttgggtacattgttaggcttgcccataaccgagggcgcggctattcgaatagattatactctgatcagaggtgtacatctttacccacaagacacatctttctcacgtgtaaccacgtagcacataccaccacggcatacggacgaaagatgtgacatagttcccaacctatcctagccataaacaagagtaccgacccaaccctggctacgaccgggattcccgagacaggtaaccaaggttgagcccctagcagtaggacaccggccctgtgccatgacatctcgactaccgggcgacagctcgtgtggccttcatttgccctagagatatccatcgagccccgactttgtccatctccatccgtgtacttttgcccatgaccagactgagccacaaactacgccttacccactagacatgtggaagtacagtagtactttgcaacagaggcctgaagaccggtccttatagtggccgaggtgctactatcaaaaccatgcacctcgagcctagcctaaaaccattttgagggttttgaatagagagggaggtgtgtgtccatttccacataatcaaaccattccataacgtccaaatgatatgagcattcccaaagtctaaggttataaaacgacctaatgttgtctaattaatcagcgaagcagctagctaaattcatactagtggaaccatgaatagggtacccactagttggggttttgtttatcctagggtgaacaaggtaataataacaatagcaatattaataaggtcataacaaaggtaaataggcatggctaaataaaatagtgataacgcgggaatttaaataaagcgataatgcagtaatttaaaccaaaataattttataaactgggattcaatatgttcaaggatgatgtgacttgccttgctcgctttcccaaacgtcggcttcaacctccacatagaaaaaggctttgttcaaggatgatgtgatcttccaaagctgctgcatctacacgaccaacggaaagaaaaaggcttttactctaataaactcgatataacaagcagaaacaaagcacaaaaatatgttcttgatttcttaaggaaaaattacagacttgaacggtccaattctgagttcaaacggccaagatatgaccatttgaagtttatatgctcttaatgtgaatatttacgaatttcttcatttaaattttaattaaaaatagggtttattgcgtcagccgagaagagggggcgtgcggaccgggtccacgggagtggtgggccctacgcggcagcccctcggtcgacggtggaccgggtgcacccgtggctcaccagccggcgccgtgggccccacgcgtcagccgcacccgagggcacgggcggctgacggccgagccccacgtggtggccacacggcgcgcccggaggcggccacgtcgttgcggctggcgttaggcggcgcccgcgcccctatggtcgccggcgccggccataggcgcggcggagcggcggccgagagaggggaagggaagggggaaagaggcggcggtccacggctcaccccagggcgacgacggcgacggaggaggcggccggagcagagggaggcggtggtgcggctcgggtcgacggggtcggcggagttccggcggtcagggaccgaaacggaggggtggacgaggtcggtggcagtgcggcgaagccggaggagacgacgccgaggtgggaagcggtccggggcgacgacggcggcggacccgagctcggcggtgacgccggagagagagagcgatggcgcgagctcgattccggcgggaagaaagtgcggcgagtggcagaaacggacgagggaggtgcggggagggtttatatagggttgggagtgagagagggcggccggcggggaaggaaaccggcgcgggggtcccggtcggcatcaatggcgccggtgagatttgcgggagcaaatccggccgtttgaacgcgggagagaggggaaaatgggggaaaagggagagggaatcacggggaacatttccccccacttaatggcacgcgggaacggtcgggggcagcgggatttgcggcggcggcggcgctagacgcgggcggagggagcggcgggagcggcgggaggagggggatgacgggtgggccccacccgtcaacgagggcggcgggcgggcccgcctgtcagcggcgcgcacgcggggagggagggaaagccgagtgggacgcggggagaggagaaagagggagatggagttgggccgaattcggcccaagagagaggggagagggttttagggttttctttttataaaaccttttcaactttgtttatttcttgataattattatatgtgctctgaaaattccactaaa

SEQ ID NO: 2852 - DNA, 1306 bp, Oryza sativa
cagacataataaagacataagtgcgatttataaataacaatcgctaaaaatgagttataatctattatggctctttcttttaacctatcatggaggacatactacgtcatacgctcctaccacgtgttgacgtcatcgtctcctctttatttctcgcttgctatcccctctctttaatttatctctttctaacatatatactctaactcccaaggactcgagccagttgttgcctccttgatccgtcctcgaactccagccatcatcgcctctggccccgaaaacgagccgccaccaccatcttcaccccctaaccccaagcaccggccaccaccttagagatgccagatccaacctccctgatatcggagacactgaatatgctctccttaacatcatataggtggctagatccaatgcaagccaccatcccctaagccccgagtgctagtgagcctctggacatggtagtgagatgtgcccgcttgtatctcggtggcctagtagtatgacgggcacaaagatgggcttcggaggtgtgtagctatatgggcatggcatccggatctggccacccccatcttggtgaccttggtggcgcagtaccgctggggtctggcaaagatgacaaggaccatgatgacgagcacaacaacaacaatgggcttcggagggggcatgcgatatatagtggcacctttgaatgggcatagggcataaatgaccaacatgtataggcatcgactggcttgtcgagatcgtcaaaaagtacaagatcatctccagaacgctcagcctggcctcaaccaccaattcctatatcccttccttctcctgaaccgttgggccagagccaaacaaaaccccttccccctccccttcctcctcctcctcccactctcacgccccttcctcacctcgcctgagctgacaaacaatagtagcagcttccctacaaacaaagatggggtatatacgcacacgccaagtactactcaggcctatagaacaatatcacgcccttttgcaagtctattttgctcatcataggcttcagggtcagccgctgtatcacccccaactatagatggtcatgtgggccacccggcacggcacggcccaagcccggccgtgctgggccgaggcttgtcgggccggcacggcccgaccgatgcaccaggctgtactgtgccagctcacgggcggcatacacggcccaggcacggcccaatactactcgagccgtgccaggccggcccgaaggcacgatgggctatcgtgcttcctcacagaaaatgtctaattt

SEQ ID NO: 2853 - DNA, 702 bp, Oryza sativa
ttttggtttaggtggggtctatgtggggtgtgttttagttaggtggagtatgattaagtcttttatgtgttgtaatctgattgggttatgtgttatattgctgattttaaatggttgttaaatttatatatgtggtctgttttgggtttgtgagtacttgatggaaagcttttgaagtcttctttttaatggattcagctttattttggaaatctattttgtttggctgcaatcataaaagcaaggtgttgtgtctcctgtattgggtcaatgggtttgtaattttgtttgggaccttggtccatgtggggcccatgtggggtgtgccccaatctggtggagcatgacccttggacccttttggtcatcctcccacctctataaatagttaggtaccccttcagggtttcttgggtttttgatagattaaagtttagccattgctacttgcttgcagcgcgcgtgtcggctagaccatccgtctgcttgttctttggaaccccaacttatcatttgtattaaattcctatttgcaatatcagattgcttttatcttgttcttgcttgtttcttcgatttgcttgcaggaatagggtttatctgcaccggcaagatcagcaacccacggagaggtgtatcgatcgctaaggcgcaacacaacgtctcgtacggttgtagtcggatcgtcaacgtttctcccaa

SEQ ID NO: 2854 - DNA, 674 bp, Oryza sativa
attcctgcacccctgactacataatctatcaccctattctatttgttgacgcatgccgagacgtaaagcactctatcgacaccctggatggagccctcggattacagcttgacagacatatcctggtaacgatgaaagcaccgaccggaagaaagctaaccgagcgggcactgaggaccttgatattcttccggacacgctgctctttacccccaacctcgacgcgctgacttcacccatccacggaccataccattcaccattcaagactatcaactgatcagaactaccataatcgtgcacctatgaaatataataccccatgccgaaacggacatgtgctgcttgggtataaaatgctgacacctattagctgtgacagtcacgacgccatccaacaacaacatatcatcactcgtcatactaacaagtttaccgcgcatgcggtgacacccctccgctcaggtgaagcggccggtcagtgaagcggccggtcggtgaagacgtagacgcccaacaacggtggcataataggccagccgtgcaggcggaaacaccagtcggcggcggacgaggcggccggtcggtgaagatgtagacgcccaacaacggcggcataataggccaaccgtgcaagcggaaacaccagtcggtggcggacgaagcggccggtc

SEQ ID NO: 2855 - DNA, 530 bp, Oryza sativa
gtgataaaaacccttgctccaaaaggataaggaatatgatatgttacattggccatcggcgtttccttgctagggaccatccatggaggagaagcaaggtgtttgatggtaatgttgaaaaccgtgagaagccagagaaatttaccacggatgagctgatggagcaactggagagggtcaaggatgttagaccaggaaagcatcctgaaagcaaaaaaagaaagtgggacgaagagggccaatgttggaagcgaaggtcatgtttgtgggatttgccgtattggtcgagtttgaagctgcggcataatcttgatgtgatgcacattgagaaaaatatatgtgagtacatccttggtacatttctaggcatggctgggaagtcaaagtacagtacaaattctaggcttgatttggaagatatgggtattaggaagcatttacacttgatccgtgatggagattcatatagttctcctcatgccccttacacaatgactaaaacacagaaggctgattttatgattttttga

SEQ ID NO: 2856 - DNA, 602 bp, Oryza sativa
atatttgaccgcaacacgcccggatattatgttattatgtttcggcaagtttattatcaagatatatgtttagcccaagtcagttaatttttactactgcaaaaagagttttgcggtatatcaaagggaccccaggttatgttatatggtacaagccagttaagaattaaaattaattggctacacggatagtgattgggctggatgtcttaatgatataaaaagcacatccggatatgccttctcacttagctcaggtatatgctcctggtcaacaaagaaccaaaatattgttgctttatcttcagccgaagcagaatatgtagcaacatcaaaagccgtgtcacaagctgtttggttaagaagaattatggaagacatagacgagaggcttacacaaatttattgtgacggtcaatttgcaattgttatcggtgaaaatccagtcaatcatgacaggacaaaacacattgtatccgggaaacagttgatcgctaggaagttaaattgctatcggtgaaaatccagtcagtcatgagcagttggcagatatatttgccaattctttatccaaagaaaaattcatccacgattgagaaatg

SEQ ID NO: 2857 - DNA, 583 bp, Oryza sativa
ttatccttcttctcctaatattgaatgaattagcatgttttgatatgttccaagtcagctaataagtgtatcagttcattctggttcgtagttaaactttcttccaaggatcgcaactctcttaatctaggaggatttccacaaatgtggttcttgcaagtttgatggtgtttagtgtccatctcagttacttctattatgatgtttgctgatgattagctgtgttgggttacccaggaaactgaagcaaagaagaagagattacagatggagaagctcaagaaacagaggcttttggctgaagtcaagtaagggcctgaactcatcatcttctccagtgtgatttacatgcctggatgattatgctctacgacaatgcaaacatgttgatattgtctcattatcctgcgcataattgtgccgcgctgtaggtttttgcggaaaaggtacaaatccatgtccgaaaatccatcccagacgtttgtctatagagtaaagaatccggcattgccgcccacattgcggcaacctggttggtctcatggtgaagagtaccacacggttcgggctatcggaagctcta

SEQ ID NO: 2858 - DNA, 884 bp, Oryza sativa
ctcaagtatagtacaacacacttgtagttttatttttagtatgttggcttagtagaaagtgagggaaagctccagaaggagtgctccaaaatatcagagttcctccaagaatttgatggagtgccggagtgttggcattcttctaacggagttctagagaaagccgggattgtttgccttcttctctcgcttgtacctcgatggatgcttcctttattaaagtaagtgtttgagtttctttatgttctttaactagtgttggtatttcttatgttcacggataaatccacaagagcacggaacactgttgtaacacttccccttagtgtattcgaagggtatcgaacacaaggaacatgtgtgtattatctatgatcaagattctatccaatgacaacaacctaagataaagtggctagagaggattcatatgtcttttaattagttaattaagataaaggtaagaatctatcaaatgcttcaggcaccggtcctcccatggtctgctaggacaagtccaccgttaagctctatgatgtacccgaacatggagagatacgaaggatggacagggctgtcaccacctaacgcctatctcacttttcgtggagcacacaacaaatgaaggtaatttctaacctatacacctcgccattactactctagccttgcacaaaaacttcctcctctatccaaagacctagtactagagcactcagttgcacactaagcgacgaacccacaccgatgagaatatactccctctgggttgataatacttgtcattttggacaaggacacggtctccaaaaaacaactttgaccattattttccattataatacgtataaaagtgttaacaaatatatgattggtaaaatttg

SEQ ID NO: 2859 - DNA, 1162 bp, Oryza sativa
cggtcaaatagccgttagtgccacgtggcgccttcccattcgaccgccgcccgccctgtccgcgcctgacgggccgccggcgtgtcgtgtcgtgccgtgccgcgggccgtgccgtgccggcccgctacagtagccgtgccgtgccgtgccggcccgcgggctcggccagcggcccaagcacggcacggcccgttactgtagcaggccgtgccgggccgtgcctgctacaggttcggccgtgccccgggccgcccgtttggcccggcccatttggccacctctagagccgatcgccttgcaaattgggccaagccaaggttaatctgaattcgaggcccaatactgattcccggcgagtccaagcgggccgaatgaataggccgcgaagcggcaaggtaagatggcgcaggcctaatggtaaggagccgactgagaatagtgtccagaccattataatttgtggaaaaagtacaccaaaggtccctgaacttgttcgagttaaaaaaacgtccttaaactgcaaaatcagatatccggcgtctcttaactaatcaaaaccgtcactttagatccttcggtgattttgatcctggttttatccgatgtgacggctgagtcagcgtgggccccacacgtcaggataccacgtcatcccccccttctctcctcggttcctcctctccctcagtcttctctgcctgtagccgatcggtggggctagcggaagaggaggaggacggcatcacgatggtggccggcggctgccaaagatgggcctgggaaggcggcagcaaggcggaaacggcacgggcgtcgatagggaggcgggggtcgtcgacggcgggcgcgatgctgtcgaggtcgctcacctcaccgctaccgggatcttcgacctcgagctcacccgtgccgccactaccaacgcctcccgggcctctccgacagtccgaccccaaggtcgcacgcgccgccactgcctcccttctcaagcgtcgcagccgctgccgcttcccttctctcgtgtcgtcgccgtcgccgctggggtgatcgagataacacgcagccggcggcggggaaggaggcgcagctgatagatcgataacgatgcccgatgattcgatatgatgtttttgaaaaaaaatttaaaaactaaacaaggcct

SEQ ID NO: 2860 - DNA, 682 bp, Oryza sativa
tcgccattcccgccgccagcttcttggccagaacctccaccctgatcatcatcatcggcatctgctggtgctggaacggtaggcgaccttgccgacggtggtggcacgggggacgacggtggcgtcgaggaggatggtgttgacggcggccgaggtgacgggaaagtgctctccatagaagtgggcagcgccggcgcggggaggaaagaaaccgccgtctccgagcacgaagaaagggaggaggcgggagcctgaacggccccgatgtgagagcccggcgtcccgatgtgaggactccatcgatcgctcggcgaggaccacaacggcggcagatgcacctcgcttgccgtgcagggggtcagtgatggtccaccgaggtagactggcagtcggagggaagggggaaagggcggtggaggcaggagacaagcctccattgttgggatcggccgcaagtatggaggcagcaggagtgatactgggaagggaggcgggggtcggagtgctgccaagggtagcagaaggaggtgagcgccggtgagcatcggtggcggctgcgcgacatgcgacacgagtatgactggcgagccctccatgcgggcggccggcggcggcggcgacggcgggagggaagttggggcggcggcgatgggaaggaaatgggtttagggtttgggtggag

SEQ ID NO: 2861 - DNA, 551 bp, Oryza sativa
gaattttgggtgctacataaccaatttttgcctaacagaaaaggacaaggctcaagcagattctttacaaagtagtacatgaaaaagatataccccccccccccccaaaaaaaaaaaggaaaggaaaaaaaaagagcaaccaacacacacaaattagcacgatccaacacctttcgctgtgccatctacttccattttctggtggaagggtcaaacatacctttcctcaatttcttttagtgttcgacgccatatatcctggttcttcgtgagtttttcattcatctgcaggaaaggcaaagtaccaagtcatgtcaaagaaccacagcaactatgcttgataataactgaaaggtgcatgatttgagatgctcacatctgcaagtttctttttctccaacattgcattctcaatcttttgttggatttctttactcttatcatttacagctttatccactgcatcagaaatgtgttgttccttttctttcttagcttctgacagccgagcctcataatactatgaatataaggaaacataggcagataaa

SEQ ID NO: 2862 - DNA, 593 bp, Oryza sativa
gggaaaaaagagatgcgtatacagataagtaatataagagggattgtacaacggataatacgagcgacacgttgcgtgggacggctctctggcttggagcacaacaccacaattactcgtgagcaagttactacttgtacctgttgtcgcgatccattgagactagtaaggccttgtttagtttttaaattttttttcaaaaacatcatatcgaatcatcgggcatcgttatcgatctatcagctgcgcctccttccccgccgccggctgcgtgttatctcgatcaccccagcggcgacggcgacgacacgagagaagggaagcggcagcggctgcgacgcttgagaagggaggcagtggcggcgcgtgcgaccttggggtcggactgtcggagaggcccgggaggcgttggtagtggccgcacgggtgagctcgaggtcgaagatcccggtagcggcgaggtgagcgacctcgacagcatcgcgcccgccgtcgacacccccgcctccctatcgacgcccgtgccgtttccgccttgctgccgccttcccaggcccatctttggcagccgccggccaccatcgtgatgccgt

SEQ ID NO: 2863 - DNA, 6723 bp, Oryza sativa
  unsure (1)..(6723): unsure at all n locations
cccccccccccccccccaatggcccaaggtacggacacggactcttatggccacgacagcgacgcagcagcttgaaacacacacacacacacaaattgaaaacaaaaaaaaaattcacaggcaggcaggcagacacaacctgaacttggggaggcgtcatggctctcgtatgaatccgatcccttttctccccccggaagattattgctgttgcctcgtcgcttcctcggctcctcctcctgctgctcccctccactccgatagatagtccgatcctcatccgtcactcactgcgttcctccgatctctagctggtaaaaataggcctagcttagttcccaattttttttcaaaaacatcacattgaatctttggacacatgtatgaagcattaaatataaataaaatgaaaaactaatagcacggtttgtatggaaaccgcgagacgaatcttttaagtctaattagtctatgattagccataaatgctataataacccacatatgctaatgacgaattaattaggcttaataaatccgtctcgcagtttccagtcgagttataaaattagttttttcattcgtgtccgaaaatccttccgacatccggtcaaacccacttccgatgtgacgcccaaaagatttcttttcgcgacctaaacagggccatagtcggcacagatcatttatgttttaacaaagtcagttacctaatcccctgtttctatatacaaagatgattttagtatcttcgaaaaattttcgggaggtactatattttcagtgtaaaacttgatacatctggatattgggtatctcgaggtacactaaaatttataaacatttaattatatgtttttttctgtatattagataagaggaaaattttccttccaatctttccattacgatcaacttttgaattttaaattgtctgaattctgctcctaagcacctaattagctgataatgaatcctacattagaattggtgttctaaaattatttatattattatgcataaattttaaatgctagaaatatttatatttggaaatcgagagagcacctgcttactgttcttctgcatatggagtatttcacatgtctatctgtcagtccagtcggattggatattcgatccactggatagtgagatgtctttatagatgtttggtcatatatatttcatcacacgaactgtcgaattaagtgccttccgctagtatatgctgactttgatgtactcatgtgtctatgtagattgatgatgaacaaacgacagatattgcgccggtcctatctgatcagaattaattaatcagttgaaacttggaacacaacatgaaacgcgagttgctagctgataaagttgaaagttgaggactttgcaacggagggaaaaaagaaaaaccaatcctatgaaaagcttcgattgcaaccttgccttcggtgtacacgaggattatatacataggattttctcactttgcatcggtctcgtcagaaaacggacctgatgaaaggatccttgtcgggtgacccaaatactcctctgaattgatcgatgaaactctatcatcctgattgaccattgcaccacataaaaacgatggatttcaatcgctaaatgtagggtgctgaagtgctttgctcctgaatcctgatctagtaattccaacgagaatcatctacagtcatgtccatgtattaacagtgactgacctatatacgggaccagtcttacatccgtgaactagtaactccagactaaatttgatattgtcgtcgtcagttcatatgcactttttttttttgaaaaagggagggtatctcccccgttttcattaaagaaaacgcagatgattacaagagttccagaacaagttcttacagataggacgagaaaaaaaggaaaacaaaacagttattacaggactaaaacattggcatttcaagcatcaaaacacaggtttccatcgccgtcttcaaactcctcgccatcagtttagcctgcctctgtttcccatcctattctttgtctgccgcccctccatccaaattttgagtgaaagatctcatttgctacctgccttagtagctgcgccccccactgcatttttcctctgtctccctcctttctctgcaaaatactccaagagtttaaatttgagcaaatggtgtaaattatttctataggatcaacaggcagaattccatcaaagcaggctctgtttcttgctttccaaatggtccacaagactgttgtaacccccaccatgatcaacttcccattcccttttccaaatttcaaaacccaggagctaaacatttcccccacattcctgccaggcttcacattgagagcgcattcaacaacactccaaatgaagtgagccatggggcaatctaaaaacagatgttggatggattcactcttgtcacagaattgatatttaatcgagcccttcctccaactccttttgaacaaattatcttttgtaagaatactatttcttagaaccagccaggaaaaaactttcaccctgggtggtgctttgattttccacatttttttgtagggataattgatcccctgtaatatcaaagctctgtagaaagatttaacagagaaacctttgttagacagtctccaaatcagtctgtctttttcattagttagactaacattgtccagggctctaccaatattagcctattttctctgtttaactgcatgtaggtctctcctgaatttgattgagcctaaccctctctttttgatctctgccacagtcacatttttgtcaaggttatgttataaagatctggagcagactctttaattggtttacccctcccccccaccaactatcttcccagaagagggtactctccccattttccaccttcttgtcacaaaatctcaagaacagctctttgatatccattaaaccagaccaaaagtgagaatccccattcttatgtttgatttgaatcagagttttctttttcaaatacttgtttcttaacatgtcttgccacaaatcttctgtattctccatattccatggtcatttccccaacagagctttattcattacatctaaatctaaaatccccagccctccctgatctttagggaggcagatcaccggccattgcactagatgatatttcctaatactttgatcttcttgccacagaaatctccttctacaaaaatcaattttttctctaactccacaaggaagagagtatagagacatcatataaagtgggacactgctaatgctagagttaatcaaagcaaccctccctcctattgccaggagtttcccctgccaacaccccaacttcttctcaattttttcctctacaggtttccaatctttgttatggattcttacttgatctatgggaacacccaagtatttcattggcagtcttccaatttggcaagtgaacatttggctatatgagtcctgtctctcagctgcctctcccaggcaaaacacttcacttttatgaaagttcacttttaggccagtcaattgctcaaaaatacacataatgaatttgaggttttttgcatattccagagaatcctggatcaggcatatggtatcatcggcatattgtaaaatatccaccccttctctcatgacatccattcccaaccccttgattagtccctgttgctctgctcttttgataagaagggttaaagcatcagcagcaatgttaaaaagcaagggtgagagtggatccccctgtctcagccctttgtgtgttgtaaaatagtgccctatctgataattcactcttatggccactttcccccctttaaccactttcaagatccaatcacaccatatgtcagggaatcccttggccttcatcattttatacacaaaagaccacttaatattatcatataccttttcgaaatcaattttgaaaagaattcctgcctgctttttttgatgaattgaattcagaatttcatgcatagttacaaccctttccattatatatctgttttttatgaaagctgtttgattcaaagcaatcaagacttcaatcacctcagctagcctttccatcaaaatttttgttatgattttgaaactcacatttaaaagacatattggtctgaatttctgtatcattcttacttctttgcatttagggatcaaagttataacaccataatttaatctctcaactccaatttttcttttcatgaaatctatgattagttccatcaagtcatccttaataagataccaaaaatgtttgtaaaattccacaggaaatccatcaggcccaggggccttattgttttccattccaaaaactacttttttcagttcctccatttctattggtctgattaatctctctttttcagcttcactcaacatagctatgccttccagattcaaagtaaaatcattctctggagggggaccaaaaagctgtttataaaaatttgttatatatttcattagatcactctgtcctttaatctccccatcttcctgatccagagaataaatcatgttttttcttttccttccattagctttagcatggtaatattttgtgttatcatccccttctaaaaggtttttttctttacatctctgcatccatttcaatctatcctctcttactactttcttcaactcttcctccaatcccctctctcttttctttccagaatagtcattccatatgcttcacattttttatcaatgtcttctattttccccataatttcctgttttttccttttgtacatcccttcccagttcatgttccaaccttttagtttctctctcattttttgtagcctctattgccatttatcaatactggatccatttatattacaagatttccaaacttgctcaaccacagtattaataccttctctcatgagccaactattctcaaatttaaatagaggagactgccacttttctccctcaacattgatcaaaagaggagtgtggtcagagtaaattctctctaagacccttccacatgccaaagggaacttaatctcccatttatcattaaaaagaattatgtccaatttttcaagagttacactttgtttgttattagcccaagtgaattttttcccttccaaggccatctctctcaagtttgcattctcaattatagaattgaacataagactccatttattcacccctcccttcttgtttttttcattctcttgtctcaggatgttaaaatccccaccaattaacaggggttcatcacacccataacaatcctgagctaactccctcaagaactcttccttgtgttcaggttgagctgccccatacacagttattaatctccacacaaaattgtcatttctattttttactttaacatgcaacaaaaaattcttcttggaaacttccataatttccattttgtcttcatttattccaaccaacatacccccagatctacccctaggaatggtccaattccaactaaacttaccccctcctcctattaaatccaagtctttagcagtgaaatcctgcttcacagtttcttggatgccaatgaaattaactttatgctcttttattaaatcattgagatgctttattttatcatgatcacccatacctcttatattccaaaacaaacctttcatgatttcttttttgtttttttcttctcatttttgccactacacttaggagtgaccttgaaaatctcaaggtttcctctgttatttttcctcctcttttttcctgataaattgctttgagaaagtctcaacatgttttcagcataatcaaaatcagacatacaatcatctgaatgtaagacttcatctatgtttatgtctatgttactcaagttctccccaacattttcacactcccctttctgagaagtatttagtttctcttttaaaaacagatttatcntagccaattccagatttttgattaagttcagatttgtatccacagcttctagagcacaatctaaattaacacctaacagactagccatttgagctaaagaaaaattactttcatcaactatagatgggatctgtttgttacctttgttgatgaaagcattaagagcctttttcctttcagctgcagcatcagccaccttcttgtcttccttctccataagtcttagacttttcttcttcttctcctctgtcatgtcttcatcagtctgagacaaaacaactcccacagctacagcaaagtcacttgattcttgtgattccatgttctcctcacttcccaccagttgcactcttggttcatcttcatcataaatcacctcctcactgtcattttccactctttgactagtaccacttttatctgccatcccctcttgtgtcttctttgttttctcattttccccctccccagcctgtgcttctctgattccaccctctatcatccctcctgctacatctttatcaagttgaatctgcttgactttaaactgttcttctagttgtactctcagagccagctccctatctatctccatctgtttgagcttcaccaattctgcttgagcactttcattgtctgaatcctcttccacaactatggctttcttcttgtcccctgccttttccaaaacccccatgcttgatgcagcttcttctttccttggtttcttattcctctgcatgtgatctatg

SEQ ID NO: 2864 - DNA, 55066 bp, Oryza sativa
tccatggtgaataaggtgttctgcaacagtagtatgagtgattcaacatctcaacagcttacatcggatactacaatcgaggtaactaagtcttaggctctctcctgactctgtctttgtctgaacatcatccgaaattactggacacaattagcttcttgtgacaaatttccaggttacaattgatataccatttccatttcgagcattacctgttgaagccattgaatcaagtggcaggcagttcttgagcaactactccgagtcatgcttccacgatttttgaagcaggttagttaaatacatttttttgtttccagttaaaactttgttgcaaattctaacaccagtcaagacatcaagtgaaggcagctacttttatttctctcgtattaatttgacacctgatgtatcatagatagttcaccactatctgttttctattgttccatgttgaattttaggcttgcattcagctctatacctagattttatttccaacaaattaatcaatatttgaagtcccacgggtgctttagtttatagtttactttctatttgtacaatgatataactaagaaactaaatggtctgaaaaaaaagaatgatacatgatagtatgaataagatttatgttgagcaattgccaatgtgccggctagaactttactaggattatttgacatgagtagcagttcctatgattatcctaatatttatcttagagattatttgtcaactgagaaaattattttgctctcagcttgttaaagactaccaagcatgggcttcgggtgattcttcaaggaaaccacttggcactggtgaaatatgaagcttcgcagtgtctccattaggcattatagtcttttcttgttgcattagttattgcttgatggggtatagaaaagctgtttatacgtcgttttgctcacaaaatccatttgcttctttgtggtctttgcctgaagatgttctgtagtgtgtatggatttgtgccatgcgaccagtcacatacatttgtaggttgttcattcacaatgtgttgttgtaagattaacaatatccgaccaaaactcttctgcctccatacacattacaaattatggtcctgtgatataaggattgtctatgcaaggaaggggtcggatatggttttctgatattgagagcaatatgtgcggacaacgaaggtgactactgaccagatcggatggccaaggggaattttggctatcatgttcatttaacagttcttaactatcttttccagcctgggcgacggttgatgtttttgtagcttgtgttatccataaatcatgaacatacatagtctgtctaatgtggaaagggatggtttagcaatcagatgtaaaaagtaataatacagagcttcatcatgcttaattatctgactctgttggatcgaagctagatgctcttcaatgatctgctttcaagaatcaagatatgcctgatgatcagatgacgcaatgctatgaagcgttttgtgctacattttaattacctacctgtgtaaagataagttatatttgctcaaactaacacagagctagaatctgtgtttagttcacgtcaaaattggaagttcgattgaaattggaacaatgtgatggaaaagtttaaagtttatatgtgtaggaaaattttgatgcgatgaaaaagttaatgaattatgcgcatttcctaaaacttcaaaaagcttcaaccaccgactagctctacccttgactttcaagaggagaaaaaaaatcagaacaaaggccccgttcttttttgctataagtagtgaataaaaattttcatcttcatagcacattttttaaataagtttttgcttataatgtttgaccacctatcttatttaaaaaatttgtgcaaatataaaaaacgaaaaaatatgcttaaattactttggataataaagtaagtcacaaagaaaataaataataattctaattttttttaataaaacgaatggtcaaacagtgcaagtaaaaactcaaaatcccttatattatgagacagagggagtaaatgatatgtttcgtaccgaatatttttatatgaaaattcttgtaaaatattagataaatctattatttaagtttgtattaattaaaactcaattaattcgtcgatatatctcgttttccgtgcaccaaaattataaatgctatccattcggtctatgagcgagagagataaggacccgaagcgaggccatctcaattctcaaacagatgcgtttccaccggttcgttgtcgttgtcagtttccttcccgtccccaccaccgcggcgccacccgtatgacctcacccgccgtcgtgtcaccgccctcggactcgacccttttctgagctgtctctcgcctccctctccctctccctcctctaggagagagttctctccttacttcctcctctcccctccaccatggctcgatccgtggcgtcctcctcctccatctccaccatgccgtcctcctccgcggcggcggcggccgccgccctaggtgacgtctccccgcgcccctccccgccctcctcgccgcttccgagcacgctctcattcgcttcctctcgtggctttcagaggccgtgcaggtcctcgtcacctccctcgccgacgaatcacccgtcgcccgggacgccgcgctcgccgccctccgcgagatcgcgccgatgtaaggggatcgcttccgccgcttccattcttccgcgtgaagcttaattttaatccgggtaaattcgttgcgtgttgcgttgtggttgcaggaacccgctgctcgtcctcgactgctgcgccaccgtctccagaggcggtcgtcgggtacgctcgtgcgcatttggggactaaaattcacttaccgggggcactgttttggggcttgtttggatttggggttgtgaagctttttttggtttgtctgtattgcagcggtttggcaatatagctggggtttttctcgtgatggcttctgcagtgaaggctctcgatcgctctgatgctgagcgtgaatttcttcggaaacttgcgaagattgcaacagcagagattgttagctcaaaggtatgggatgctgccagcctgtctattgtgttcttacttctgagctgaacactgtgagttcaagcagtaaacaggagcacttctgagcactgttttgtagcccaacgtaatgccattatttggggcagattgctaaacatacaacgtccaaaaactgacataccatggggctatgcttatgatacagtaggtccagcagatgtatgattattactttagattttacatttttggccttttcgggaaacaaaaccaattacagctgttacggtaagatgttatgaaaagagcaatggacatggttctttagcaaataattattatcactatcaaggaaatggttcctgttccaccttggaagccaggaaattagggcatatgtttgtctcgctcttttgttttgtggttttttgtttttttttctgcctatgcttatttagtttatctaaattattgttcattggtgaacaggaactcaatgtcgactggcaaagagcagcagcgagtcttcttgttgccatagggtcacatgatccagacttggtatggcttcacctccatacattatccttttctgacatgaacctttagtgttcttaaaggagaggaatgtacttaaaagctgtgactccaaaagctacattattgtctccttgcaaagcttggactggctgacttgactttaccaaatctactcggcttccttcccaaacctactacttagttctaacatctaaccattaactctatgttcaataacttacagactttgtgtttactaactttatcactaacctgccaaaagataactctatatcaactaatttatggatttcattgcaacttgtctcatccacccatcgcagccatctgtcatggatagaattatcagatgcattaactaatataattaagttcgtattcacattcctacataggaacatgttttgtagatatgtggtctacaatagagtggaacttgtaaaataagaaattgatgatagttttttttggttatttcaataaaaataacagtggataatttcagaggatccaacaaaaataagattttatagcatcatctagcggccatcctttgtaccttttttttatggtttcacattgagaatcccttatatcttgtttcaagtatagttttcctgtttcactattgtcaggttggtctcattcttcatttctctgttggctttgggtgctcgctgctagcaattctttactaccatgtggcctagcattttaataatgcaaatctgttactactcttattctagatgatggaggaattatttctttacttcgctggaccaacttctgctttgccagccatgttacagatacttgcagattttgcatcagctgaaggttaagcacaacttttagtttaactataatctgatattgggttggactgctgaatttgcaactcggtcttgcttatttaaagccttgcagttcaccccacgattaaaggatgtacttttgcgcgttttacctatcctgggaagtgtacgggacgctcaacgacctgtttttgcgaatggtactgcatatgaatattcctccaattatcatttctagttactcctttttgttgttgagcaaactgcattttggttctcatgtttctggaaagacaaaaatatctatcaatacaatgttccttttgcagcattcaggtgttggtgccaggcagcatggcagtacataggagatgccccctctgagcttcctttcgatactgacgtcatgtaagctttcaatatggcaaataatccttttttgagataacttaatcttttatgcaatctatcttatatttcaatgataggtcctttatgaattcagtatttgaattacttctaaaagtatggacaggttcgcgtgatctaaaggtaagctttggctttgacttgattcttttatttgctgatttgttactatttagtatttacaccctttacaaacagcactgcccaactgatacgagcaagctgtatatgtttggatacgcgtattatgcctggacctcgaaaatagttttttgtacaattgtcagaaacacatacgtgcctataaaattgatacactttgataaatttgtacatatcaattgctcagtttagtgattaatggtgtagtcaataagcatcatgatgcattgatgcaccctatccagctttatgaaataatgtggcgaaacgagactggattttaccatctaggagtgtattctgtgagtttccacccaatccaaaggatacatttagagatgggttaattggattcatgccacgcccagtagtgcagatcagatgactgtttgttactagccaattggatggacatgaccgtgagttcacatttaagggaagctcctaccagatatggctgctgggccctggcccaaactggagattcaatgtttgtcgctccttgtatgatggaacttcttccttcataacacggcagacttgctacagtttgctgggatgttattagcttagcgactgcttttgcagtaatatatatatatccatcttctgaattcattccaacataatattgcatgatcaaatttacctgtaatattttcatcaggtgcggttgtcttctgttgaggctttgggagaaatggttggtcttgtcacaagatcacagttgaaatcagcactgccaaggatcataccgacaatgttggacctgtatgtatgggttctattctactccctccgttccaaaatataaggatttctgcatgtttcccaaaatgtatctgcacattttggaacggaaacagggagagtaatatatttactgaagatatttgccaaattctcacagacattttttttgctcatgtagatgtcggaaagatcaagaaattgcttttgttgcatctcacagccttcataaccttcttaatgcatcattattgtcagaaagtggtcctcctttacttgattttgaggtaaaataagatcatgcttaatacatgttttctttactatatgtggtggctctgcatttttgtgtcaacttttggtactctgcgttaattgctacggtaatgggaatcacctaagatgctctttatagggaatatatcaaatgggaactgcccacaaaatacaactagcaacattgacaatcagatcagattgtggtggctcagagcctcagaccatccactgtaatctaattgagttcatagttactgttttgtccttccaccatgtagtgatatgtgctacatctagcagctctccctttgatagatattgctgatgcactgtcctgtgaataccatatttctgcttggaaatatccatcatgctgattgactaatatcttcttttagtacataattgatatgaatccagatcatcaaatactccctccgtcccagaatataagcatttttagagttggacacggttattaagaaagtaggtaaaagtgaatggtggagggttgtgattggttgagtagtggaggtaggtgggaaaagtgaatggtggagggttgtgattggttgggaagataatgttggtgtagaagttgttatattttgggacaaatcttaagagctaaaagttgttatattttgggacggagggagtatataatataaacacgttcaacatcttatgttgatattccttgtgtgtctgctatttctcttgaaacaatagatgagttgaagataataagaatgccttaatctttggtagaataaagacattagttttttttagacatcttacacacatgtcaaagcatgatcagtcaggattttttgttccttatgtggcaggagcttactgttgtcttaattacacttcttccattagcatcggccaacaacagcaaatttgagcattcgtatgtttcaaagggactgaaggtgcctgccttaaatctttcacacctattctggttgaacatatatattcattgatttgcatcctctgctggctcattctttttgtactttatgctgtcacaatttgaatagtaagatatactaaataatgattgacgcgttcatgaagtcagggttctttttggtagttgattggacacaccagttgttagtcgagggataagtggggactggagagcgatacaaagtggtatgatggcaacatgccaactgcccaacatatacctcaaatttgtctcagcctagtaggtgtcctagtaggaaattgttcatttttggttctgctctggcacatgcactgaggatcaggatgaaatgttgtataaactcctcaaatagaccactaagattcagcttagcatctgttttggtaattggaagaagcaacctagagttggaccttaatctgctgttgcaaaacagcactgctattttatgagttaaacaatatttgcatgaaatgttgtggggcgatgggatattccttattagccactttgtgcaattgtgcaaccatcattagttagcatcaattgtgctgtattttcttgtcaatgccacctgcataatgtctctcatgaagcgattcatgttgctgcatggttaactactggatctgtatctaccctaaaaaagagaggggaaaaaaatactgaacctgtatccagtttgttcctgggaggcacttgtacttttcttacatttgagcaaagctatcagataatcagacttattccatttgtattgctgtgcaatagatgtattctgctgttgataaaacatttactaaatactaatcatgtgctcgtgcctttagacatacaatgaaatccaacattgcttcttggtaattagttcagcataccccgaggatttgtgcatgttccttttgaatgtaagtatagagctactattttttccacctttaaataaagccaaaatctattggggatggattccctagtttgtgcttacaaaaaaggcttatatagactattgctgcttccatgtactgcctacagaaatgcaagtcaaaagacgaagcatctattgttggggcacttggcacaataaaacatctattgcctaggttctatttctctctctatctctccctctctgcgtttttgagttgtttgcagggatctctataacatatctatacaggttgttggaatcatggcatactaagcaagcgttacttgttgaaattgtgaaatcacttttggaggagcagagcttgggtattcgaatggcactagctgaggtagtaaattctgtattaactttaactagcatatatcttacacaatattgtagatgataatgatctccctaagattatgcatccaattattcacttaatactaattcaatgatgtacagctaattgttgttatggcttcacattgctatttaagtggacatcctgctgagctggcagttgagtttttggtgcgtcatagtgctataactgatgatgatctgaatgatcctaacactctgaaaaacgagtactttcaggacaaaagatttgaggtctcacttaatcttagattctacaaatttacttaactattaagtactccctccgtttcataatgtaagactttctagcatttcccacattcatatagatgttaatgaatctaaacacatatatgtctagattcattaacatctatatgaatgtggacaatgctagaaagtcttacattgtgaaacagaggaagtatcaattatttcagtgatttattttctgttttcatttgccagatgaaaataagcctatctggtctttcagagctaagagctgtatgtgaaaagggtttgcttttgctagcaattaccattcctgaaatggaggtaaaaataagcatgatgttgtccttttatgctatgcccatgccccatctagtcagaaaattgatctatgaagctaccatcatatacttttgtcatggtaaatcaaatattcatagttatgtgagtaatgtgctctagatttttctattttccagcttgttctatggccatttatcttgaaactgataattccgaagaagtatacaggtgcggtagctacggtgagtacttttatgttatttgctacacctggaaaatatttgttaaaccaatgtgccttagttttttttactcttattatttagagtagataaataattaaataatcaggttcatatgattggtgatacctgcagatctgcaaatgcataactgaattgtgcaggcataaattgtctcagacaaacccactatatactgaatttaatgcttcaaatgagatccccaatcccgaggtagtttacttgatcccagatgtattttattctcttccttggacagttctttcttatctaagtatggttggtgcaggatttgtttgctcgtttgctcgtgcttctgcacaatccacttgctaggggtcaacttgccacacacatcctgatggtttgtcttcttagttcttattaattaaacctaaaatcattagaagaatatttacacgaaagaagcttcgccttaggcccttagctttgaccatgcttttttttaataaaaaaaaaccacatgttcatgttcatccatctattttcgtgtggtttagctttccagccatctgtatgtttttcctctacagtaggccatataaatgctttgcctctttacatgagtttaaaaaacggtgtaattatgaacttcatattttgatgactagttaccatgattcttgaaactttatgctattgatacagattttttattcatagaaaattgagcatttgcttgtttaatacgagaagaggttatatcacaatagcttcagatttctggtcaactggagtagcttctgtcattggtagtcaatgggctgcctgatactattagttttactttatatctggattatctagtaacttgacattgttttgtacttgattttcattacaactgtcgcaacaactaatttgcatgtttgactgcctcaaattaagtgattccatctgttactggccaatacttagatggctcatgacatctttatttttgtttacagtctcttagctcttctaggtcgctgttgagtcttgactcacacaataccataacattaagtttatttgtttccattcgtcagcactcattcctcctctcatttttttcttgtaggtgatgtgttacttgggtcaacttttcccaagaaacctttctttatttttacaagatgaggtaattcgcttcatttatttgtttagcacttgagagttctttcttatttagttctaagtgtaaaagaaagaacatacaggttgtatttctacactttgggggaattttctttgcatatttttgcagtaatcatgtcttactttttttatgataaaccccgaaaccgaaagagaataaaacatgtgctgcccaacctggatgtgtcctggaattaatatttgcttgtcctgtgcatgctttatgtataatgcatgactatggaactcctgtggtgatctacttaacagaaaagaggccgagagagcatattttatagggaaatgctaatatttcggcttgtccttatcatgttgttaaagtggcttaatatatgcatcttttggcaagtattaggtccctaagatgaaagcttacatcggtgaccctgaagaccttaagcaagatagcacataccaggaaacgtgggatgacatgataataaatgtaagtctcttattcttattgttcgaggataataatgatgccattgccaaaatctatacttattaactataataatggtggttgctttggtaaaacaaaattatagctagttgagtggaacaaaaatgcagaaaggattgtctcatgtgaatcctcaaatgctacctacttctctggaaagctgatcatgccatacctttcagtttttagcagaatctttggatgttgtgaatgacagtgagtgggtaatatccttgggcgatgcatttgctagacaatatgatctatacgctacatgtgatggacattctgctttgctgcacaggtaaagttttgttaccccttgtacattttctatagaacttttagtttgaatactttggaatgtctaaaccattctgtactggtagatgcccatgcaatctttgtgcttgaagtgattgttttaaattttattttgcagatgtttaggaatgcttcttcagaaggttgatgaccgaatttatgtccgtgaaaagattgactggatgtgtgcacattcaagcatgtctattcctattaatcgccttgggcttgcccaaggcattggtctggtaagcgggtttaaatgaagttctactttttgggggctatcgccttttggtactgaacttgcacttgcaggttgcagcatctcacttggatacagttttggagaagctgaagaacatattggagaatgcaggacagagcgctctccaaaggtaagtgcattaacttttttgtttacagtagtaacatatgttatcttgtccgcccagtgttagccatgctgaagcagcaacttgaaacttaaattggatctataactttgctcacgtgtataaatgtattcctgaaccttatttctcacctccaaagcactgattactttccattttaaccatttagaatagattttcttgtattgtgattaaaacttctatataacccacttaaaacatttctgtttatgtccttgttatgcattttagttattcccatactgtttttgaagaaagataaattgaaactacatgtaaggtggatccaacaatgcaactatctttagcttgttagttcattttttccaggccatgtgtctagtttgttccttttattaattcttatggaacctttaattctgcaggttcctatcacttttctcattgggagcaaaagttgaggatgttgatgacacatatgcagccctggcattgatgtatggatatgctgcaaaatatgctccatcaacagttattgaagccaggatcaatgcacttgtggtatgctgtctaattccaatctatcaacaaacttgtttctgatctgttaccttaacacgacaacatgatgagtgattattacatattcccattaaagatgattattacataatcatttgtggtcaactggtcatgagaagaacagcaaaccactaggttgggctaatccttaggtgtcagaaataggatcggcttcttgggcttctctgggaaattgaagccccatatacaacacttcctggttcactctagcaccctagcttgaatagtacatttatgatctttattgtctggccattctttaattttcagacccaagaatccatccactgattgtatgtgttattgtctgctgcttatgtttctgtgctgaccttattttactgcattgtattttaagacaaagacacgatcatttcatatgttcttgatttcttagcttatactccctccatccaaaagtctaggtcatatttcattttctgtttttccaaatgagatggacaatattgttccttggttttgtcacatggtagatgtgttaattcctccttggtcttggtgataaaagaaatatgccttagacttttggatggagggagtaaccgaataagctgaggctatgcctcttttaagattaactgcagatacgttctattttggttttctagattgaggaatgttctttacttctgtactcaggggactaatatgcttggaagatttcttcatgttcaacatcctactgcaaagcaagctgtcattactgccattgaccttttaggtaatttccttacaaaaaagctgcatatcccgtcctgttttttggaatcaatttttcatttggtagagaaattgatcttcaggcacacattcgtttgtttccctgcctctgtgtgtgtgtgttttcctgggaaattgtttccctgctttgtcacaattggtattttgctatttgcatattgttattgactcagtaaccttgaggattcttgggtgatgtatatatggatgcgatgtattttgttgtggaggtggtagcctagaaaaatatctacaattcacaaagttatccatacaactcttatgtacatatctctctggtgaattgttctttaatttttaattgcattaaatatcttgaataaaaggaagaggagaaatgacgttgatatgtagaggtccagaactagattggcatgtacttaaaaaggtatttactttattttaggattctacaacgaaatcttacaagtataattatttcaaagaaatatataaatgatctatttgtcggcacaagatcccaccagctcagaacatggtgccagaccgatggaatgctggactaaccaggagaccaggaccaccaccactaggctctttgtattctcaatataattttcttctaattgtacctcatatgttgcccacatctaatggttcgcacgaatagtttgcttgattgcatttagatccgagttcgcacaagatacatctccatgtaaatattgcattgatagttagtgcccgtttgatttgtatttacagtatcatgaatcatctatcacaactcagtaaatgtatgcaatcgtaaatttgttaattgaatcagaatgcaagtatcaatatttttgtgctagcagttaagtttccgaggttaacttataatttacatttttttttgtcttactaacatatttttttagataatggaagctttatttagactcagttaattacgtcaagatgatacaatcaaactgagtcacccccggcctccgcataaaatgcacacagccaaaaaagaagaaagaaacaactagaacatcttccaagcacaaaagtttgatagaaacatatatcttagtggctatcaatccgtagactagaccgccacccatgctcctgggtaaaaaactcctgcgccacctggtccaactgtcgtgataccaccgtaatagtatcccgcagtcccggttggtggaggatagcccaggtacgtagccagcgagtaactaaggtgataacctgcaaaggagaagacaccatcttgttataaaaaattactccattcctgcttagccaaatagaccaacacagagctgttgcacccatcaaaagcagattcctcatgtcttactaacatatgctattggcattattgtttaggccaagctgttattactgctgctgaaatggggatttcattcccactgaaacgaagagaccaattgctggagtatgtgctaacgctaatgggaagagatcaaaatgatgaccttgttgatttcagcactgagcttctgcacactcaagtatgttactaagttttaactcttgcttttgctaccatttgtcaaagaaattcttcacactggctgaatcctttacatccataatcctatctttaaacttgtattcacacttaaatacttcatttcagtgaatgtttattctacctggattcctcttacatatgttgatatgcagagtctagctttaagtgcctgtactactctggtttcgatagagccaagattacctatggaaacaagaaaccgtgtgatgaaggtttgcatctttgcatcacagtagtgcaacgccacaaaaactttgctaataatttgactactgtagtttcagttaaactgccttcatatgattttcatttgttttttctattttcaggcaacactaggattttttgctttgccaactgagccctcaaacattgttgagagcctcataacaaacctgattattttgttaggggccattctgctaactaggtaatgctttaatctctttttaattttatggttccattttggatcgtcttattaataacgttgcagtttgttagtttttgtcctgctacttgaatgaaatggcgatgtatctagtattgtttttccttcttgtattgtgagaacatctatttttcttgtacaccaaatctatctgactcttctctaatagaagtgacgtggcttcaccaaaaaggagaaattcaatatttgttgcagttagtggggactgtttgtttagatatataggattccaggaaatgatgtcctaaaattacaagcaaaccttgttgaaaacattatccctagccctgtgacttacatggtaaccacaaacacaacttcaaccaaagatttcaactacaatccagattcacacaatgctaatcatgctaaaacaaagagcactcgaagcagatagctatctaacaacaaagcactatctcctctgccacctgatgtttatgcttagctgtacaaaccaaactcgtctttcacctgacttttgacatttcattagaagagttctgcaataacgtgtctccatctagtattttgagatatttcctaatatctcaagtgcaatgtttacttttgattagtgttcaaatgattttactcattaactcttcctatgtttgttcttttccttggcagtggtgaagatggtagaagtcgagcagagcagctcctgcatattcttaggcagcttgatccatatgtttcatcttctgccgaacaccagagaagaagagggtgtgctgctgtaaatgaggtgttagttaagttccgcaatctctgttctggtggatttggtgtgttgggttcttatccaacattcacactgaacaaacaaattgatcaggcagcccctaggagcttgtcaagtttgccatgtatgttgatttttttctaatattactagtgtgactgtttgatatttgtgatccagtagcattaaaaaaatgtctcctatgttatcaccagctgcatttgtgttgcctacccgagattccttaagcttgggagagagaataatggcatatcttcctcgctgtgccgatacagatgctgaagtcaggaaagttgctattcaggtttgtgtggaagtagctgatcctggtagcagaactttccttttggctgttaaaactctatttcatgcgtagtgtgccttttttcaagctctgaattgcaacatgtcacttggaatgaaattgtgacattaatttcctaattgttctgacggtgcaacatagcatagtacttatataattcttttggaaaatagtaatgctattcagttggtagcacaagcacacacaccatataactgaactgttaaggttatatttacccgttgaaactgagttcataaatttattccctgcttttcttgttgcagatacttgcacttttcttcaacattgcattgtcacttccaaagaagaaggcgtctgtgaacgacattgatctggagtcttcatacagcgctttatcctccctagaggacatagtctctatcattagaagagtgggcgtgctatcttagtttggtttctgttaaagtgtgttctgtcaacaacttctgatttattttgtttgctgttctcaggaggcatcaattgaccaggccgaagtatttcacagggttgtctcctctctgtgcgtcctattatcgaaagatgaggtaacctctctgagcagatttgatattgaaattgaagagggagataaaataacaattacaattttctgtgtacatatatagcttgttgtcttgctacactcctgtacattagcagcatgtgataaagtaaagcaatcatcagatggttcaattcaagctattatcatgtttattatcagaagaggcaaggagctacgtgaagctgacgtattgaggttagtaactaagtaggaaattagctcagaagattacaaaataaggaaagaacagtttgtaatagattgtctcagcttgatgacactagaacacattaatattggaaaataaccctgctaactggaatatagcaaatagggccttaattacacattttttggagtaacactgaccctttttgagaagggaaacatagtgcattgagctttttcttgaaagaattgaatatttctaatatcctattgctgatgttataggacaacacaatctttgctgtcgtctgcagtctcgcttaccaacaaggagtcacgccgagaagttctcaatgctgtatccatgatcgatttattattgcatctatggttcatttttttcaatctcaatattcttgtctaggattacaccctgagttgttttttcccttgactgataatagatatcgtgcttagcagaaaacaccaatcacaccgtcgtgtttaatgaagttctatttgtggctgggcgggatatttgtacaaaggacatagcaagaattcgtggtggctgggctatacaggatgtttttcatgtaagttgggcagaggctgggcacttccattatgtgattctagtcacttgcattaggaacattcaaatttaaaatatatatttaatagatgcatgcatatattgctttatatgaatgatgtttgcataagtggctgctagtcctgctcatgacccagtttgttttggtagcttttaggagaattcttgtaaagttaattaagcatatatattattataatcaggattagtcagataagagtaaaatttttcatacttttatccataacgatgaatttctcgggggaaaatgatgcatggttcactgggctagatctcctattctgaaatgggtgctatatccctcctttgagttttttaaagaaaaaacatgccatatggtagaaatgttgtctcaaaactctagcactgcctttatatagtttaattgaaaaaagttagataagtgcgagcattctacgtggttgcactgttagaaaacacttgcaggactaatgtgttaaaccaggatctatatgtttcatctgcatctgaatagattatttgtcatggtccactgttgcctataatagaccacgtatcatagcggcaatggatggtagttcacctagactcatttgcctaataaattattccatacttcaaaatggctagttaaattctagagctacacttcctaattatgtttttgactgtatgcccttgaattcaggcattctcccagcataaggtgctagctattctttttctggagtacattttgtctatacttcacaaggaacctgtggcaacaaatgattcagaaaagggggagatcacctctgagtcatcagctgatgactgtattctacaagcaactatgtttgctctaaatgcatttatgaggtactggcttccatttgatggttgactaatggtggacaatggtcttcttttgatatgctaagtttatgttcttgaaaacaatggggatttacaggggtggtggaaagattgggaaacaagcagttgaacaaagttacccttctgttctttctgcccttatactgaagctgggaagtcttcatggtcttgctgaattgggccggaatgaacttctacggtgaatatgggactttttttttggaatctcttaatatgtaggctgcatatgaattgatgatatatttttttatgatctgcagatcattattaattgcgtttcagtcattttgtgactgtgttggtgatattgagatgggaaaggtgctttgcttaatgtctaggccttgccaaacatttgaaacaactttttgattgtgtaaaatccttgcctctccatagatattaacccgtgatggcgaacaaactgagaaggagaagtggattgatcttgttcaggaggttgcatgcagttccctcagtaaagaggcccaaagaggtaacctctagtattttcttactactagtacattctgagacctagtagaaagcatatattaagctatcttattactagtaagagcctaagaggaaatcaagactaaagaaagtactttgattatgaacttcgctgtttacattcaaataaaaaaggcatggtttggcagtcaatgatctttagttttgatgcatttgatgttttatgaaatcattgtactaaagttattgataatattatcataggttttgccaacttgcagcatcttaagcaaagctctcaacaaaaaccagagggctgaaagggaggctgcagcagccgcactgtcagaatatattagacacaggtaacaaattagccttcaataagtaagtctgtagatagaaaagcagtgctggaacctttagcttctgatgcatagttagaatcttaggtcaatttcccgtaggatgtcagctagctattggtgattactggttttctctgattaaggttgttgttccccaaaaagcagggaagggagacccatagaaatataatcctgttctttacattgaaagcaaatattctagacactatcattctctgattcttaggtagataacatagaagctggaatatataaatggaacctgaatgtaactcttaatttttattaagaaaaggttaatcctgcatgggtgggaatggaactgagaacctcacacatgcgcatccaaactccaggcccctaaacatttttaagacttttgggcattctgggttaaaattttccaactaagggccaaaaggtactattctcgagaaaaactatgctcataaagttgtattcatagtttatctgttatccatggtcaaattattttagtttcaactaattctattgaatatgcccacaatctgcattataatttgtgaatatgcccactacctgtattggcacatatacacttttatcatacatgaacttgtcgttcacttttttttttgattttttttactgtgcagtgaaaaagaacctatattgcttgaccaaatggttctggagttgtgtcaacatgtctctgatgactcgccaactgtcaggagtctctgcctacgtgggcttgtgcaggtcatcaatctaaccatagcaattttcttaggatacattttctcttccttacatattgttggactctttgactaacatagatgggtaatattgtttgactaacaattttgaagatgcttataatgtttatctttcacaaatcacaatcatacatcatattagcatattgcctgtgtgttgaacagaattttaaaaaagaccctactcatcaatccgtttttgctatcactatctacatatctcctctattgataggtgggccatttgaccccagagtgtactgttttcttttttcttttttcttcacaaaatgtagggagttggttggggggggggggggcagattcaccactcacctccaccatttgcttctttcaaagtagtatatattatctttatgtgcagaacatatcctgcatttccttctcaatcttgttttgtgatgtgcatatttttcttgctagctgagtagttcatgattcaattgatgccttttgtgatattatttattgggcgctgaacctaatttatcttttgtatcatctctttcagatacctgagagctgtattcctaaatacatccagcaagtcttaggggtaatattagcattacttgaagacaccaaggagtctgttcaattaactgctgtccagtgcttgttaactgtgagttcttcaattgattacaatgcaaattgcctccatttccatttattttccaatttgactgaataattgaatgccaatatgccatgaaccactttcaggttcttaatgtgtcagaacaagatgccattgacccagttttaatcaatcttttagtaaggctacgcaatctccaggtaatcatttatgacaagcatactgacatgctcgcatgcattactgtttaatggcattatgcagaacgatttgcattactttaccatgcttattatggaacatgtggggtgcatggcttatgagttacagagggttactttggaatttattttgcatatgggattttaagagacatactaattgcaaagtgcacatgttagcaagttcactgtccgggatatatcctcggtaaattttgaagatgtatgcactgtctccatgctgcctaagctcgacatcgtcatgtagttgtaatcatctttgtactttatttttctcccaaagcttaatgaaattggtcggtcgtccttttggccgacccggcaaaaatgcactatctcatacaggaatgttcaacccaaataaataatgaaataaataaataaatcaaactctcattttgtgccagtgtattttgatcacttgaacctttatattgcattatttcttttatctgttggcattttcctcgtgaattcccagattgtttgttttaatttcatcgttcttttcagttttcaccgtagtgtttcaattatttatctccaaatgttagaagctggtggcagtaacaaagctacggttgcaaacttttctgttgctttttttgcttcaggtttcgatgaatacgaaaatgaggtccaatgcgtttgcagtttatggtgctttaagtgcctatggtgtaggttcacagcagtttcttgagcaggtagtagcatgcaaagtcagcttttagtgtgttattagcagtgcgctgctatcttgcaagccatcttatagggcactgctgtaatggttgcaggaagtgctaagtagttttggattattttcttatgttatgtgtgttaatctgttaacaaattcgttgcccctgttgcagattcatgccactcttcctcgcttgatcctccatcttcacgatgatgacctaagcgttcgccttgcctgtcgggtaggtagtcattacaaatcagacaaattaatacttcctccgtttcacaatataagactttttagcattgcccacattcatttaaatgttaatgaatctagacatatatatgtgtttagattcattagcatctatatgtatgtgggcaatgctagaaagtcttacattgtaaaacggagggagtactttgttttcccttggctttgcctgttgtgtaggtattctttacttattattttgttttcccttgctacacagttgctttaacttgaattatattccccccccctcaaaacagaatacgttccaactcctagcgcctttgatggaagtagatggtttgtcttcactcctcagcaaaaaatatttcacctctgatcgccggtttgtgttgaacaatttgctagccatttctactgggatttgatattttagttacgagtgaaatttttacttgttctaatgtgctttgtctacagttcggattatgaggacttcattagggacttaacaaggcaactctgtcgactatctcctgccagagtcgacagctactttgaatctgctatccaggtaccgtcttcttgtagtcatagcctgcgctttgtgaagtatgccaacactgattttgtttgtttcaggcgtttgatgcaccttggccagtcatcaaagcaaatgcagtttgcttggtgagctgcatgctatcctttttagatgatcaacggttcctcgctccttacttctcccaggtatccttactggattctggtagttcacttgtttagaacatttcatgtttaaggtattaacacaattttatgtcgaaggtgtttgctattttggtcggtagactgagccaatcaccagatgcagttgttcgagcagcatcatcttctgcactgggccttctgataaagaggtctaacgtggttaagacgttgactccgaaatttgatcgggctgattcatcccagaattttcaacatggagatactcgtacgaaaacatcatccgagcctcaacaggagactatagatatgccaaacgatacacaacgagagccataaagatggtcaaaaccaatctctgctagatgtaactctgtaaatcgtgtatgtacggtttagtcgtgcatgtgcatgactgtagataatagaagagtttttgtgtaggacatgccaataggctttcggtagcgagtggcggctgtacagaaatccgtcacgttcgttgattgttatttcttttattgattgaattcgctcagcagtaagcatgtaaaaagatacctcagtgtcttgtgtgggtgatatgtgtggatcagtggatggatcgacatgcttgttcgcgacgaataactacaaaatttagtgccaccgtgaggctagcattaagagcaagttcaatagtatagtccactaccagttccaattcatctatagctaatctaatagctaatttatataatagttgcttactatactattaatatatggtcccacctgtcatacacacctttcgtattggagtccgtactggagctggctataaatctatagcccgctgctcatctctctcatcctttatcttattaaaatatgtttataactggcttgccattgtacttgctcttaggttatctgaattcattccgcgtggaaggctcctatgggtactgtactcctggaggcgtgcttgtctcctggatttttcacattttggtccttttaaaaaacttatttcgcaaatagacccctgaaaaaacttatcccagaaatggtcctttttggggcgccagagtggttggcgcgtcatccaacgggacggcgccagcctctcctcctgccaccgtggcgcactcgaccgccccagggaggagggcgccagccatgctggcgccgccgcctccattcctgtttctctgtatggagttgcaacggtgtcatttttattttatttttttggatgtttttttacactcaggatcacgatacaaccaaccacaaaaaaaatttaaactcgaactaccacttagctaagtttaaaaatatctagtataccacttagtctactttgcaccttcactaaaattagaccataactcctttagtaaaaccctttgatcaggatgttaaacataatgcactctaccactatatgaaattacttaatctaatttaaaatataaccacatgaaatgacatatatataagttaaacagtacatagagatgtaattttttttatttttattttatttatttgatattttttcacacttaggagaacataggaaccaaccgtataaaaaataaactcaaacggacaaaatatgtgacatgtagaattttccaaaactctatcaaaacggataaaatatgtcatctattaaaataggtgtaactttctcatacggactcggaatcaggcaaataatatatgcacggacatctacagaaaaagttacattcgattctcccctctttgccgggttaggcgatattaaaaccttcaaattctgcttgcaagattgtgttttcgaggagagaagtttttcggtggagctttggaaaattccacatgccacatatttcgtccgtttgagtttattttttacatggttggttcctgtgagttcctaagtgtgaaaaaaatatcaaaaaaataaaataaaaataaaaaagttgcacatctctctcctctgcactagttcggagagaggagaggagaggaaaaattctatatgtcacatattacgtccatttgagttcaatttttctatggttgattcttgtgtgtccctaagcgtgaaaaaaatatcaaacaaataaaacaaaaataaaaaatttcggggggagggcgccagccactggggggcgccagtcactctggcgcactccccctagccacctcagcatcgccccgccacgtcggcagggggacggcgccaaagaggctggcgcggcagccactctggcgcctcaaaaaggaccatttttgggataaatttttctaggggtctatttgcgaaataagttttttaaaaggaccaaaatgtgaaaaatccagtacttgtctccgtgtacatcgcgtagctctagcacctccctgttcccaccaagtccgacggcgcgacgctgcgaaggttgacgtgcgggtgtgtgccggtggacgcgtatcgcctcctaccgaggcgacgcagcgaagattggtgaagcgcgtggaggacagcttcaaacaaaactcacacaagcaaactaaaatgaagctcacacaagctcaggggtatattttgttcaaaataaaaaaatgaaatgcaccagccgggaatcgaacccgggtctgtaccgtggcagggtactattctaccactagaccactggtgcttgcttgttgaaatttttctaagaatttatatatcagcagcatcgttcatcaatcaaggcactactcataaaattcagtatcacttcaaaatcaatcatgggttcagatatcactaggctcaagttctgagttacccctaaaccagcccagttctaccctgtaatggtctatatatggggggcatacgactatgctatacacactaccaaggctaccaagtacccagctagtatttctaaatgataaaggtaagcaatatgcactgacacatgtcgacaacctaactgcaaaaacacaaatttgctgatacacatgctccattcatagcaagtggagtacaccttgactaccccaaaaggaagcacatagtatatcagaaagcactcaagccaaactgtagttccacactgaccccccatgacactgaaagtctgaaccatattagttttagagcctagactgacaccaccaccatctcacaagtgatctcacggatcatatttgtcacaccttggcgagcaaagagcaggaggaggttgacgatgacaacacaaagctgctgcccccttctcccccttgtgatcgagttgtggttgtgacattgaagagacgagcacccaaaagaggagcaagaaattgaagttcgcactagtcgcggagtacctcagctcggatatcctcaagatgccgctggggaaagagcctagctcatgtggacgccgagggaaagtgcaacaaaagagagaaagccacgccaaagttggtggcatcaccagcctcgaaactcgaaagcgctaatgctcgccgcatatcctttggtagataccgttccctcttctcctgcacatctccctgaagattgcgtagttgctccctgaactacaccataattgcagagataagcaaagcttaattgcgtcttcaagtatttgctttgctctaactgatgatctgtgcacttggtttatgctaatgttactctgcaaacaggctcagagctgcttctttcagctcaactattttttgctctgttctactggtatgcactctgtactacatacaagtaatacgtgtgcaagaattattacagacatggctcatgagggtgaattcactgaattgtaatcattgagagtattgtggagcaggtttcagttaatggaaagctaatgtctgttgatgcaaaattgcactgatttaggtacaaaaggcacttttaactaaagaaatgatttcctgcagaaagcccctcaaatctcaaagaggcaccaatacttccaaataaaagcacccaatgggagcttcctcttctcccccctcttaagcccacgtatgctcaagggcagggcacactccacattatccatgcatatgcatcatgtaatccacaagatcttcttagcttatgtcatgcgataactaccatcatcttgttcttaattttggagtgtgtccgtgcaatgggtggccgtgcttcacacgcctatagagcgtgggctaatggtggccatggaggctagctaagctacttcttcttggggaggaatggctatgcatggcctccatagtcgacgacttttacctctactaaggtagggcaacttgtatcctttggcaattattcggtggatgtctgttggtggtggtgttagggattggagccggatgaatcttgagtttgatcttggctgtatgatgttagacataaagaggatggtgaaatggtatatggatgtacgatgtttgtgtttcggtccttgctctaataatcagttgttcttagtgttttgttttttttttgccctctttgttaaattgtaaccaccctacatatatgtactagtatcaccaataaagtgatgaatttgatattagtaattaagattgtgtgtgcaaaatctgtgttgattcttccatcgataaacacgtccatcattcatgtatgatcttcaattccccgagttgtgttgtctactatgagcatgcagtatataccaggcagcagccgtagtccgaatcagaaggtgttcgtgccggccaaacgtccacagattagctgttcctattatgggtagttttatcagtcttaataaggtacagagatatttctagtgtgaaacttgggtatctctagttacttcttggtatctcgatgtatgaaattttacagttcttgaaaaattatctcgagttacctaaattttacactaaaatttttgatacctaaggtattaaattttacactagaaaatatggtatttctaagtactttttcaaacatggtaaaattaccctcctcttaatatagcattagcaaatgatggcttggtttaaaaaaatctctctcttaatccctttgttccaaaatataagtttggttggatatgtgacatatcatagtattatgaagctggacagaaactaacttattcagatcagtagtcctatgatatgtcacattgtcaattagaattatttcaagttgtggggagtagatcccatcccggaggtcatcgagcacctctgacctctcaaactcgtgccactcccgctgatgtgggactacctccaagcccccaatcacctgctcgtcgtcgtcttcaacgacgtgcccgtcgatcaggtgcacccgtctcaaccttggcgacgccttcatgacatgcttaacaaagccgatctgccaccccactgcactgaagccgacgatggtgagatccttcaggcgatggtacagatgctgttgtgcttgcacctctagccaagaagccatctttaccgacccattgtcaatctgcatttaggtttcagagttcatgtgaattcacagatatattccattccgtaaaaaaaaacagatatattccacaaaaaatgaagcggatctttaagagaaatgacatggttgttaggttataatatatatgatcaataaatttgcatacgtgaacatggcatggctccagggcaggcgcagcatcaagcaggaggacaatccagaatatatcccaattcattggcacatttgcaatgaatagcttcttgagatgaagcaacgggctgggtaaagctattggctcaatccaaacctgcacacaagaaaaagaaacacaattttcacttagagacaagagcccattactacacttatatttttcatttcaggaacatatgatttgcccacctccggccctttgaactgtagaacgaggctctctatcgatggcatactcatgacgaatttgctgagtcgatatgttgtgttgctaactgcagaaggctcaaccttggtttttaagtagtccaaactgacatgcctaagtcgaggcacctcgccatagtacacctcggtaggctgcacgccccggcaagcaaaagtttcaagccaaggcagcgaatccagatagatttccacaaattcgcagttgtcaaccagcaacttcttaaacccagaatctggcacactgaactgaagaataggctgggagcttcggcaatgtctgatactgaagtccaccagagacacacagtttgacagaatacgactagcccctccataatacgaagctttgcacaactcgagcttggtgagccaccgaagcatcaagcaatcaaatataccaatcggcttgcagttgatcagcacgagccgctttagccgcatgctctggcattcatccagcacacggaagtcatagtcgacgcggtgctcttcgacgtcgagctcgagatcctcggctccccacctgccgatcgccgcggtgacccatcgctggatgcactcgctccacctgccactgccgctacgggtctgaagccttagctttcggatagttctgcggacgccgtcgtcgggaggcggcagaaggaacgcgtccacccgcttgacgtagcggcgcatcgcgcagcgcttcgcgcagcgctcgtagcgtcgcatgatactttccaagagcgggcgggtcctcctcgtccactgctgcatcctctccttcgtctcctccgtggcgctcctcctcgccgccaggtacgccgccttctccgcctcgtacgccgcgctgccctccgtccacagccgcgcgcctcacccggtggtagcgtgggggggaggatgtcgtcgacggcgaggtcgtagcacgtgtgggagcgccgagggagacgaagccatcgcttcgagaggatggtggtggctatcgtcgatcgcgcgtctagcctgtcgaggatcaggaggagtatgccgtcaggtaagctgctgatcatgtcctcgtcaatgttgtgctgatcttggctcatacgcatctagggaagaagaagatggaaccaacaagattacggtaattaacgtgagttcttgcagaaaatgaggggagtggattctaatccctcgaggggatatcccctcgtatatctttcaaattcgatgcaaatagttgtgaaaaattttgaaaaaaattgacaatatagagtataatgatgcctactaatccaccaaaattcatgttcaaattcgatctacacatcgagaaacaaaaaagacaaatttagatataaacagtacgctactattcatacgctgaatttgtcttttttatatctcgacgtgtgagttgagtttggacttaagattttgtggagttatatatatgtgttgtatgaatgttgtcaaatttttctaaaatttttcataaccgtttagatggttgttaaacaaacgaggaaacatctcctcgagagattagaatagtttcccgaaaatgagggactaaaaagtttctacagtaaaagtgaaaccctattttttctgtacccgcttggaggaggaggcgccggtgactgtgcagacgtcgtaggcttcttgagacggcggtagcatcgtgcacttgtctcctctgaagccatctgatctgatcgtcagtggctgaccgagcgagcgggcggcggcggcggatctgagggtttgtacctgcatatatgcacggaagagtttatgccggcgtgctggaagttgcaggacacgggctgcccgcatgcatatgtttacctaaagccagcttataagaatctagaaaaactaggtttctcagcttcgtttagttcattttctgaattctacaactgcttgttagaatctagactaaaattaagccggactgtttgagagagctgttgattctaggagaagctgcagcagctagaagctcccccaaacaagacattccagaagttcccttacatatatccagccttctccctaataatctaagatgcaagtgtctaaggttggagaaataatgcaaaatcgcaaaccgaatccaatcgatttgtatggcaaacgtgttaatctgacaagatgaacttagtttcttttggagaaaaaaagaacagaaaatcggcgaccgaatgggacaaaatgattgaaaaaaacaaatctaaactttgtgatcttgcagttgtataaaaatgtagctagaacttttgattcatactccgtcttaaattcaatcaaaaaagacgcgaatattaagaaagtgtctaatatcaaatactaattagaaggggtgaggctacgaacccagatcgtctagcccatcaccatgtggaactagccgaaagatctctaagcatttctcatcttaaattcaatcgtaaggtctttaagttttgtacatggtctaaattacgcacggaagaaccacccaacatggaagagcacagagttcagtaaccaaccagaacaaatctgaactccagattgccatagcattcttcagttcccccccctactctttgcaacttcaactttcaagaaaaacacagaaaaatgcaggttgcttcgtctgctatatctgcattcgtctcaatcaccctccgctcagcgacaacaaaaatgagcaagggcaaagacgcagcagcatgaacaaataacacacaagttcatttacaggtcaaacatcattttatactacactgttatgcataccctgtggctcagttaatcagttcagaattatttcgagttggggcgagctaatcccatcccagaggtcatcgagcacctctgacctctcacactcgtgccactcccgccgatgtgggactacctccaagcccccaggtacctgctcgtcgtcttcaacgacgtgcccgtcgagcaggtgcacccgtctcagccatggcgacgccttcacgacatgcttaacaaacccgatttgccaccccaccagctcattcaggcaatggtactgacgctcttgtgcttgcacgtctacccaagaagccatcttttccgacgtgttgtcaatctgcattcagatttcgaaattgttggtacagatgtaatcaagaagaaatggaagtgtataataggagaataaagacacgtttgtgatgtatatatgatcaataaactgcatacatgaacatggcatgactccaggacaggggcggcgtcaaggagggcgacaatccagaatatatcccaaatcattggcacgtttgcaatgaatagctttctgagatgactcaacgggctgggtagagccattggctcaatccacacctgcacacaagaaaaggcaacgcaatttcacttagagacgagaggccaaatatactgttagcacatttcaagaatatatatagatcgctcacctcaggccctttgaactgcagaacgaggctctctacaggcggcatcctcttgacgaatttgctccatggatatgttgtgtggctaacagaggggccaatgttgttgcctgcggtttacaagtagtccaaactcacatgcctaagctgaggcacctcaccatagtacagtttggttggctgctggccccggcaaacaaaagtttcaagacaagggagcacatccagatagattttcccaaatttgcagttgtccaccagcaaattctttaatctagatgttggcacattgaaacgaagaggacagtcaaatactggatcatatctgatactaaagtccactagatgcacacagtttctcaaaatactaacagccgctccaagaaatgatcttttacccaaggagagtttggtgagcctccgaaacgccaaggaagtaaatataccaattggacagcactagccgttccagctgcacattctgggatccatccagtatcttgcgaaagttaaggctgacgccgggttcttcaacgtcgagctcaaaatctttgactccccacctgccgatcgtggcgataatccatctctgaatgaatacactccaccctctgccaaaggtatgaagccttagcttttggatagtccggtgcacgccatcgggaggtagaagaaacgcattcacccgcttgacataggaacgcattgcctgacgtttgtagcgttccagaatagcttcgagtacactgattatcctaatccgccgatcattgtggtcctccgtggtgtaaatgtcagccagcctctgatccatagggcccttgctggccagcttcagggcatccttctccgccgcaaacgtcgccttggcctctttccacattcgcttcaccctatggtagcgtggagggaggaaatcatcaacggtgaggtcatagcatgtcatggagcgccgaggaagatttttccatctcttcgaaatgatagttgcgattattgttgtgtgtggatctagcttgtcgaggatcagggcgagtatatatcatcaggtaagctactgatcatgtcctccccctcgtagtagttgtgctccttgctcatacgcatctagtgaagtttgatgagaaaggataatgaataacagtcagcgatctaagccaataagtaatttccaggagtgtgtgaaaaaaaaaaatcagagattaatgccttcgacacaggatccaactcaacagcctacatggcgacacgagcaagggaaagtgtcaactcctctcacagatcacaagaacagataggttatcgtcgactcgacccaaccggatcgagcgccgccgccgccgccaagccgccaccaattcaattcatcgatgattcgagtcacggatacattgagtgttttataccgtatcccttctctctctctctctctcttacagccaacagtattacagctggcgaattctttccctattacaagaaagatgttacttggcccacattggcccactatagcgagggttaggaacacgagctcgaatgggcttctttgctgtagcgattgaagtctcttctatctcctgctctgctgctatctccagttctgctgtattgttctcctgttctccatcaggaaagatcttgacaaccccctccccttgaaaagtggcttgcccccaagccagtgccattggaaaacgctgctgaagatcttcccgatcctcccaggtggcatcctctgcaacagaatcagaccaatatacaagaacttgagaaacagtgcgattacctttcctgatcaatcgctggtccagaatctgaagaggatagacagttgatttcaggaatttgggcagccgagattgaacttgatgcttaaatccatgtgcaaccttgagctgggaaacatggaaaactggatggatagtactgtcatctggcaattgaagcttataagcaacagtaccgacccttgccaatatctgaaaggggccatagaacttgaaagccagcttatgacaagctcgagatgcaacagacttctgaacgtatggttgcagcttaagaaatacccagtcccctactgcaaattctctgaatgacctgttcttatcagcatgaaacttcatcttttgttgtactcggtgcaaatgctgttgcagcaattctgccatcagtttcctctcatgaagccaaacagccagatcgggaatcgcacaagtttccatagtaacacccaactgaagagggttatggccatagagtacttcgaatggtgtcttgttcaaagcagaatgaaagcaagtattataccaataccctgctaaatgtaaccaagtaacccacttaaaaggggctgcattagtgaaacaacggagaaacatttccaaacactggttaaccctcttagtttgcccatcggactgtgggtgataagcagaactaaggtgcagggcaatgccagatttcaagaaaagaaattcccacaatttgctagtaaaaattttgtctctatcagagatcagtactttaggcatcccatgaagtttgtagatgttcttcatatatgacactgcaacatctagggctgagaatgggtgtgacagaggaacaaagtgggcatacctggagaatttgtcaaccaccactagtatgcaattgtatctctctgattttggcaatccctcaataaaatccaatgagaccacttgccaggcaccttctggaatcggcaagggttgcagcagtcctggatatttagctaggtctggtttcgcttgctgacagatagtacaattctttacccactgctgaatcattttcttcatctgtggccaagcaaacagtgcttttactcgctgataagttactgggaaaccagaatgtccacctatagggctggcatgcaaggcagtgactagctgttgctgtaaggataaattatgcccaatccaaattttacccttgtaccgcaataccccttgcactaaatgaaaatgttccctggcagtaggatgcaatgccaattcagttaagagttgctgagcctgctcatcagtttcatacccttttaccactgctgttaaccaaaggggttggcattcggatacagcccacaattgatcatttgtctcttcatcccttcttgataatgcatctgcagctgcattagaggttccccttcgataacaaaccttatactgcagtcccatcaacttagtgaaagccttatgttgcaacggagtatgtaatctttggtcagtgatatgcattagattgtggtgatctgtgagtatgacaaactcatcatgctgcaaatatgatctccactgatcgactgccaataggatagccaggtattccttctcatatgtagacagccccctggtttttggacctaatgctttgctaacaaaggcaatagggtgcctgtcctgtgacaaaactgcccctattcccatatcacaggcatctgtttccacagtgaaagtttttgagaagtcaggcagtgccaaaactggggcactaaccaaagcttgcttcaaggcattgaaagcttcatccatttgtgctgtccatttaaagggcacccctttcttaagcagctgggtgagtggtttgttgatagttccaaagtttctcacaaacttcctgtaatatcctgccaaacctaggaagcccctcaactgcttgactgactgaggaattttccaatgcagcacatcagcaatcttagaaggatcagtggttactccatccttgccaatgatatggcctaggtaagccagttgttgttgtgcaaaggaacatttactcaacttgactttccattgttgagcttgaagtagttgcaaaacttgttctaaatgctgaatatgcgatggtagatcagggctatagattagaatgtcatcaaagaaaaccaatgtaaattttcttagcactgtcgctagggtatcattcattgccttctgaaaagtagctggtgctccagtcaacccaaaggacatcactcgatactcatagtggcctgagtgagtctggaaggctgtcttgtgctcctctccaggttgcagccttatctggtgataacctgcccttaaatcgagtttagagaaatacttagctccagaaagctcatccagaagctcatcaatgacaggcaaagggtattttcccttaattgtaattgcattcaggtgcttatagtctatgcaaagtctccaggtgccatctttctttttgactagcagtgctggtgatgaaaaagcactattgctgttttgtatgactccagactgaagcatttcagttacttgacgctcaatttcatccttgagtgctggggtatgcctatagggtctgaggttgactggacttgctccttccatcaagggaatcttgtgatcacaattccttacgggtggcatttctgtgggttcttggaacacttcctgaaacctgtccaatacatgcttgattgaatcaggaatcactacatcagatgtctggtcagtcttctgaatctgtagtacatgcattactgactcagtcttcataagccctttgatctgcagagaagtaatctgagggtagtggtcagtttgaggctagataccctcaattctgatcaaccttcttgccagaggaaattcgagccatttctgcacccaatccaccttcatagggctgaactgttcaagccagtccatccccaggatagcatcgtaccctcccaattgtagatgtcatgtgggggcgcacgtatgtgcgacgccgcagagcgcgagacgttcgccgagctgcggaacgcgcggcgcgcgcagaggcagaacgcgcggctgcggcagatcaggccacggtcagtggctaggatggaaaggataattagtttcctgttattagcccttgcatttaggagcaattagctctttggttagttgggccttaggccatatatctctgtaatcggcacattccagaaattaagcaatttggttattgtcccaattcttcccttctctcgtaactctcaagcctgcggcggaggggcaaacctcgccggagaagacggaccgtggctacgaactccgtagccaggggccagctaccctagggatcaacgcccttgacaacctggtatcgcggtcacgtcgatcttcgtcttccgttgccgactccacctctgccccagccaccaccgatcccatctacgactccaccaccactccagccgccgcccctgctgtcgctccgcccaatttcccacctgctgccgccgcctcccctgcgtcctcaccctcagtcgcgtcctgctcggcccaccacatgggtgacgacctcaaggcctccatcgaggccctctccaaggacatggcgctgatgcacgagtcgatcaaggccaacgccgcctccatcgcggccaacgccaaggcgatcgctgcgctcgccaccaccaccagttcatctacgtccggcgcccgccccggctttggcgatcagccgccagaccggccgcccaagcactggcgacccgacttcccgcactacgacggcaagagcgacccgctaatcttcatcaaccgctgcgaatccttcttcctgcaacagcgaatcatgcaagaggagaaggtttggatggcctcccacaacctcctcgagggcgcccaactttggtacatgcaggtccaagaagacgagcgcggcacgccgacgtggactcgcttcaaggagctcctcaatctccgctacgggccacctctgcggtccgctcccctgttcgagctgtcctcctgtcgccgcacgggtacagtggaggactaccaggaccggttccaggccctgctcccccgcgccggtcgcctcgacgaagaacagcgagtgcagctgttcaccggaggccttcttcctccgctcagcctccaagtccagatgcagaatccccagtcgctggcggctgccatgagcctcgcccgccagttcgagctgatcgagcagtacaccgccgttcccgccaaagctcctggtcggggtgtcctgccggcacctgcgcctcggccgcaactcgccttgccggctccagctggggctgccaagcccgcgccgcccgccgccaccgctgctgataaccggccggtcaggcgcctgaaccaggccgaacaggaggaacgtcgccgcctcggcttgtgcttcaactgcgacgaaaagtacagtcgcggccacaacaaggtttgcaaacgtctgttctttgtggacagcgtggaggacgaggacgaggaagcgccggaggacgaggtcgacgcggaggcaccggtgttttctctccatgccgtggccggcgtcgccgtgggacacccgatcctgctccgggttcagctgggcgcgaccacgctcgtcgccttggttgatacagggtcgacccacaacttcatcggcgagtcggcggccgctcgcaccgggctatccgtccagccgcggccacggatgacggccacggtcgccaacggcgaaaaggtggcctgcccaggcgtcctccgccacgcacccatcaccatcgagggcatgccgttccacgtcgacttgtacgtcatgcctctcgccggatatgacatcgtcctcggcacccagtggatggccaagctgggccggatgtcctgggatgtcaccacacgcgccctgacgttcgacctggagggccgtaccatctgctggcagggcgcgccaaaccaggacgggccggcagtccgcgcggccagcgcagacgactccctattgggggggctcctcgactccttcgccgacgtcttcaccgagcccacaggcctgcctccacagcgcggccgtgaccacgccatcgtcctcaagcagggcacgtcgccggtggctgtccggccctaccgttacccggcggctcataaagatgagctcgagcggcaatgcgccgccatgatctcccaaggcatcgtccgccgcagcgactcggcgttctcgtcgccggtcctcctcgtcaagaaggcggacagttcgtggcgcttctgcgtcgactacagagcgctaaatgcgcttaccgtcaaggacgcttttccgatccccgtcgtcgacgagcttctggacgagctccatggcgcgcgcttcttctccaagctcgacctgcggtccggctatcaccaagtgcgcatgcggcccgaagatatccacaagacggcgttccgcacccacgacgggctgtatgagttcttggtcatgccgttcgggctttgcaacgccccggcgacattccaagccctcatgaacgatgtgctccgctccttcttgcgccgctttgtccttgtgttttttgatgatattttgatctacagtgacacatgggctgatcatctccgtcacctccgggctgtgctgacggtgctcagggagcacaaactcttcatcaagcgcagcaagtgtgcctttggcgtcgactccgtggcataccttggccacgttatctcggctgctggtgttgccatggacccggcgaaggtccaggccattcgggagtggcctcagccacgctcggcgcgtgcggtgcgcggcttcctcggcttggcggggtactaccgcaaattcgtccacaactacggcaccatcgctgcgcccctcaccgccctgctcaagaaggaaggattcgcctggaccgaggcagccacggcggcgttcgacgccctcaaagccgcggtctcctcggcgccgatcctcgccatgccggacttcaccaaggccttcaccgtggagtgcgacgcctcctcccacggctttggcgcggtcctcattcaagacggccatccgctcgccttcttcagccgtcctgtggcgccacgtcaccgcgccctcgctgcgtacgagcgcgagctcatcggcttggtgctggccgtccggcattggaggccgtatctttggggccggcacttcaccgtcaagaccgaccactacagcctgaaatatcttctggatcagcggctgtccaccattccccagcaccattgggtgggcaaactgctgggcttcgacttcacggtggagtacaagccgggcgcagcaaatactgtggcggacgcgctgtctcgtcgcgacaccaccgaggacgcttctgtcttggtgctgtctgcgccacggttcgacttcatcgagcggcttcgccaagcacaggacgtcgacccggcgctggtggcgctacaggcggagatccgctccggcacacgcgcagggccgtggtccatggccgacggcatggtcctgttcgctggccgcctgtacctgcccccagcgtcgcccctgctccaggaggtcctgcgcgctgtccatgaggagggacatgaaggcgtccagcgcactctccaccgactccgccgggatttccactttcctaacatgaagagcgttgtgcaggattttgtgcggacctgcgaggtctgtcagcgctacaaggccgagcacctccagcctgccggtcttctccttccactgccggtgccacaaggagtgtggactgacgtcgcactggactttgtcgaagcgctgccccgtgttcgcggcaagtccgtcatactgactgtggtggacagattcagcaagtactgccacttcatccctttggcgcacccatactcggcggaatccgtcgctcaagtcttcttcgccgagatcgtccgtctccatggcgttccacaatccatggtgtcggatcgcgacccggtcttcacgtccgcgttctggagcgagctgatgcgtctggtgggtacgaagctccacatgacgacggccttccaccctcagtccgacggccagtcggaggcagccaaccgtgtcatcatcatgtacctgcggtgccttactggtgatcgcccccggcagtggctgcgctggctcccgtgggcggaatttgtcttcaacaccgcctaccagacctcgctgcgggataccccgttccgggtggtctatggccgcgaccctccctccatccggtcgtatgaaccgggggacacccgcgtggcagctgtggccaaaagcatggaggagcgctcagagttcctggaggacattcgctaccgcctggaacaagctcaggccatccagaagaagtactacgacaagtcccatcgtgcagtgtcgtttcaggttggggactgggtccttctgcgtctccgccagcgcgccccagcgtccctgtcgctggcagtctccggcaagctgaagccgcggtatttcgggccctaccgcatcgcggagatgatcaacgaggtggctgctcgcttggcattgccggccggcgcccgccttcacgacgtgttccacatcgggctgctcaagaagtggcacggcgcgcctccagacgctcccccgccgctgccgaacgtgcaccacggcgcggtggcctgtgagcccgagcgagtcatcaaagcccgcttggcccgtggggtgcgccaagttctggtccagtggaagggcacttcagcggcgtctgctacctgggaggacagggagccattcttcgcccgctaccctgctctacagctcgaggacgagctgcctctcgacggagggggagatgtcatgtgggggcgcacatatgtgcgacgccgcagagcgcgagacgttcgccgagctgcggaacgcgcggcgcgcgcagaggcagaacgcgcggctgcggcagatcaggccacggtcagtggctaggatggaaaggataattagtttcctgttattagcccttgcatttaggagcaattagctctttggttagttgggccttaggccatatatctctgtaatcggcacattccagaaattaagcaatttggttattgtcccaattcttcccttctctcgtaactctcaagcctgcggcggaggggcaaacctcgccggagaagacggaccgtggctacgaactccgtagccaggggccagctaccctagggatcaacgcccttgacagtagaactctgaattcagttctgaaagagcaaccttgtatccaccagttgcagttaggtatgcttctatcacactgcatggttccaccgtcagcaatcttaatctgcactggatgtgataaggtctgaattcctgccagctttctagccacttgctcatcaatgaaggagtgagtacttccactatcaacaagcattaagagttccaagccctgaacccaacctctcaccctaatagactttgaagattccactccagctattgcctgacttgaaactgccataagagtgccctcagcttcagccacaatatcatcaccaactgggtcatcatcttcttgcaaagcttctaaaagctcttccatgacatgtaactgtactgttgaggcacatttgtggtcccttccccacctttcaccacaagtgaaacacagccccttagattttctgtaagccttaagtgaggacaatctatcatctctgggagtaatcttagctgcttcaggggttttcttatcctcattcacaacaggtctcactggtagaggtgtcaaagaaacttgagcagtgttcctgaaattggacttcactggagtagagaactccaaccttcgagttcccagcattgcctcctcctgtaataaagccaaagagcaagcagtatccagatcttgggggcgttgcaccataattacagtgtgaatagcatcctttaaaccctctacgaacttagtgacgaagtacacaggcttcagttcactatcgtaagcaatcaattggtgcatcaagctatcaaacttatccacatattcagttacactaccagtctgtctaatgtgtatgtattgccttatcagctgttgatgcctatccctagaaaacttagcacaaactttctcacaaagttctacccaagtgactcctattaattgggacctaactgactgcaaccaaaatgaggcattcccagaaaaattgagggtggctatcctaacccaatgagcagggctgactccataagtatcaaagtaggcttcacagttttctctccacatttgggggttatctccatcaaattgtggacatggcataggaggtaaaccagtgcttgtgcccacagcactaccagtaaaagcagttcgcatggctggatcatggaaataaggagcaggtgtggagaacaagattgagttcgtaccattggccgggggtggtgattggggatgagacccaagcacctccgcccgtatttcagcagcattgcgggcgcccaattgggcggtaaggtcaggcttcggctccgccttgttcaggagttgaagctgatcgaactgaagctgcagatttccaacggtggtcgccagatcagtcaccttcttctcgagctgtggcttccacgaatccactgatgtcttgaggttcagcatatccgcgcgggagttcttctccagatccaccaacttggagtccgtctcggtcagcttcttcaggatcagatccagcttggcctcgttctccatgattttgaacgcttgcttggtttgataccttggcttttctagtttgacgcaacgggatccacttcccctgttcctaatccagcaaaccgagaggggcaagttaccttttcgcggatttcagctgcaagagccgatctccaatccccaatcggaacccttttgctgccggatcaagaattgggtgggatagtaggctctgataccaagttttgtcaattcctctcacagatcacaagaacagataggttatcgtcgactcgacccaaccggatcgagcgccgccgccgccaagccgccaccaattcaattcatcgatgattcgagtcacggatacattgagtgttttataccgtatcccttctctctctctctctctctctcttacagccaaacagtattacagctggcgaattctttcccctattacaagaaagatgttacttggcccacattggcccactatagcgagggttaggaacacgagctcgaatgggcttctttgctgtagcgcttgaagtctcttctatctcctgctctgctgctatctccagttctactgcattgttctcctgttctccatcaggcaagatcttgacagaaaggtttaagcgaccgaatttttagactaaattaagactttctacagtaaaatgaacacagtgagctgcatttctacaagaaacaacaaagtattgtttcatcaatcatcttgaggccgccatctgatggtgcaatccaaaataaaggggtgctaaactagtcgaccattattaaacactctaatcctacaaagtacagaccagtaaaaaaatgcatttttttcttcaacaatataactgtatgagctttcaatcaaaagccgggttagcatgctgccttctgtctaagattaaaaaaagaaaaaaggatactgtaacagtaggacgggggagaagggatacctacttgaaggtcgagggggcaacggcgatggggacgactgtggagacatcggtagccctcttaagtcggcggtagcgtcgaggggttggctcctcagtaccatcggatggatcttgatcgtcgctggctggcggaccgggcggagcgcgagaggcagcgacggattggaaggggcggaggcacggagaggaatgggaggggcggcgagggatttgcagggggaggtctttccccgtgtgccattaaaaaagatggtggctgtctctgtgtcactaaaaagttcgagcctccctctataccatcgtcgaactttatcgcgtcctccacaccactccgtccgtttttttcctaacggtgggtaacggtgcagcaaaatgactttgttaccctttgaacaagtttgctcccttctttgctcttgtccggatttggtatagaagcaatttcgagtgattattttcctttttctcgaattgtttttttggtaggtttgtttggcgtgagcaatggtgaacgacaacgagcaggtggtgagtggtgacgatcgccaaggccagcccggacacgtccgagaggaattgccgcatctgctacctcggcctcgacagcgccgccgccgagtccggctccggcatgttcctcgactgctcctgcaaggacgacctctcctgcgcccataagcaatgcgccgagacctggttcaaattcaggggcaacaggtaatctctggaacgccgtcgtgcccacggcgctctggaacgcgcaccggagcgacgccgccacgacatcatcttcctccccgtcgatctgcaccacgccaagttgagctgccgcgccaccatcgtcgtctcatcaccacgaccaaaacccctcaagaacccccaagattgatgcaccatggacggagaacggcatcatcttctccaactccggccgccggcgtcaaacgtcgattccgcctcctccggtgagccactgtacaattcctcgcgcacacaccatccctgtggcctcactaacctcgtggacacacatgcatgctagatcttggagacgtttgagctgtcgccattctcccggagctccgcatcgccgtcgagccgttccaaccgaagctgtcgccgcgcaggaggtagcgtcggccgccgcagttgaacctgcgcccagccgctgcgcagcgccggtcgccacctccatgacgtcggtgccggtggcctcgcagagcgcggagatggcgttcaccgatgacaccctctgcaccaagaacgcgttcacggcgagcttggacagctccgccgaccagaggttggtggtgatgatccggtcgacggggacccattgcgcgtacacgtccttcagcgcctgcacggcggcgatgtcgcggccaccgatgagaacgcaggtcagcgacggccgtgccctccgccaggaactccaggttggagagcacctggaactcgacgacatgggcgttgtgcgcgaggatcttctctatggcctcggccgtcttgacggggacggtggacttctcgacgacgaccttgctggagcgtgacgagtcggcgatcatcctcgccgcgctctcccagtaggcgaggtcggcggccttgccggcgccgcctcgccgccttgccgccacgccacgcctggccgcttgtccaccggtgccgcctggcctctctctgaaacaaagcagagactgcaaagggcaagagcgacatttttcctatccagacccacatgtcagagctgccaaacggttaaagctatatagaatagcgacggaatggtgtggagggcacgataaagttcgacgatagcatagacggaggcacagaggatgatcgaactttttagtggcacagaggcagccaccatcttttttaatggtacacggaaaaagacctccagggggaggggattttcgcttgttcgtggagctgcgagttcgcgggcggtccacgggcacgtttatgcaagtatctgaataaggattttgccttgtgtgtaacacagtccgcgtcggattgcatttttaccaaaaatcagtaaggtttggggctgttcactttgaatcattttcaaccatataattttttgtaaaattaccaaaaaaaatatctacatttgatttgttgtcaaatttagtaaatatataaaaaatactgccaaaattttgccaatattaccattgctaaaatttggtaaggtttattttggctacaatctaagcggacctttggtttcttttccaaatcacatccgacactttttttttaccaaaaatcagtaagactaaatctcgaatagccatatatcttcaaatgtttcttccagcaaatattgagcagataaaattcctgatgtaaaatattttttatggatggagtgcgtgaaagaacagtacacatcctatcttactgtaaagttataacccactaattctaaaattcaacatgtaaacatgtcagctcaccatccactggcaataattatatacaaaacttatgtaagcatgcaacatcatatataattcattgaattctacaaatcaacaatcaatcatcttccttcacattatttttcacaatatttttaacatatatatccaccatttttaatacttaccatatatttatccatataatcatataatcacagtgcgggatatcatatttcatctagagtctcatacagactctactaaatttattctctcttaacataggctgagtttgagagagggggataaagaagattggagagatacgcaaaacgaggtgagccattagcgcatgattaattgagtattaactattttaaatttcaaaaatggactaatatgattttttaaaacaatttttctataattttttttttgcaaaaaatacaacgtttagtagtttgggaaacgtgcgcgcggaaaacgagtcacaatctccccaatctctccccaatgtcctttgaaagaacgcagccatagtgtgacaaaccagttttatttgttgttaacacctaaaataatttttacttttagcttaattattaaaaaaataaaaattatttagtaatttctacagtaaaacgcggggaatcatctagtttccttaataatggagataaatgaatcgatcctaatgatatccccatcggaagactgtcagcttcacactgctaatcaaatcaaacagccaacaagcatgaagaaaacttgatattttgcataagagtcataaacgaatgatatgcatgcacattcctatctagtagaaagctacggattattatcacgatcacagcacagccatcaagcagcacataagcatcgactatacagaggttggagagtaccaaaagcggctactcactggccgaagatcccgaattttttttatttataattttttttattaaaagttttacaaaaataattttccattttgaaaattgacggaaatagtcgcctaccgccctctgggagggcgatttttaaaaatcgccctcccagagggcggcgaaaatgacgtggcagacggccgttcgctctcgggcgacggccgtcaacgaaatttgcaggcggcccccttgccgccctccgcgagggcgattttgtactgtgcggggggccgcctgcaaatgggcggcgagggggggcatggaaatttgcaggcggcccccttgccgccctccgcgagggcgattttgcactgtgcgggggcccgcctgcaaatgggcggcgagggggcatggaattttgcaggcggcccccttgccgccctgggggagggcgattttgtactgtgctctatattttttttatataaatatcaatagttatcaaatctttttatattgaaaactatacaagattaaaatctccaagattggtaaaatacaattttattattttttagggcatatttggaatgttaccgtacaaatattttgttaatgccaaaatataagcaagttttggcactaccaaatatttggtaaggtaaaattgcatttgatcatatttggtttgctgccaaaatgtaaaattgtagtgaagaatgttgtacataatctcaattctagattacgtattaccaattaataggcttccattttcgtgtgtggtgtggtagtgggaaagaagatatgaagaggttgccttcagattgtcaattatatagcgtcgttttcactgcaatatatgtgaactcaatgagatacattattcattagatgtgacaagacgatcacgcgtgggcgtgattcactttatgtcaacaggcagcgccgaaagttgatagtgataactcgagctgccgcttttcatgtgtgctgttgtggactgtgcgcgctactggatatggcactaccgtgaagcgccgaaagtgtgttgttgtgagcataagttgttcaagcaccatacgaatgaaaagaactacgtagacgagacaaacacaagtagtactgcagtagtaatagcaaaagtagtactgctttacaagtttgtaagccaaaagaaacggtcacataaggactgaagaggtagaacactactgacgaggcctcttacccctgtccctcctaccctgcgccctaatgtgcccctgggagtacgtgagtcggtccgggggtacggcacggccaacccgtcctgcctgtacaggtgtgacctctggctgctcctgagtgtgcgcctctggagctcctccaagctgagaggagcctagtacgtcctggtggtctgcaccgtgcaagtcgtcgtcgtagaactggctagtaggaccagtcctaccggcgtgagacgaagaggccccagtaccgaagatcccggctgcaaatcctgctggacaaggaccatcagtttcgtataggtatttaacagtattaataaaaagtaaagtaccgtgtgggcgagggatcgacgctccgtgagaggaagagctggcgaacgcgcctgaagaggtggcgaacgcccctgcggagctcgcggaagcgccggtcgtgcctgcgaacgcgctcgaaggcatacgaggtcctgcgatgaggaaacgtgcagttaaaacatggtgacacattcgtgcaaaagctgaaacaaaaatgaactaatatctgggctgaactgtaccgtgcgaaaccggtgctgtaggtcgcactgctccgaagctaggggcgctcgaagacaaacgaggtcctgctccgacggtaggaccgcgaggccgtgggtgtaccggaccagctggaggtacgacgtccacggcgctgcgacaggagaagacgcgcatgaccgcacgcatcttctcctgcatccggtcgaaggtcgacctctgctcaacgtcagtcaagtgcaaacctctgttcaacctcacctggactgcggtgatatcggcactgatatcccgtgccgcatcagcctatgcaagatggaaataaaaaattcagtagttgtcctatattatgcaagataaatgacataattgttggaagtaatacaaattggacgtaccgccacgaagtagtctcggtcacggtgcgtgggatacgcgtccgtgacagcggcaacgtgcggctctggggcgtctggagtgaaggtcacacgcgcacgagtgcgaggaaggtaccagcgaaggtagtcacggtagttctcctccgtgtgtgggaagagctcgttgatcacctcctctgtagctaacacccagtcgtcaacgtactgctgtacacgtggagcccaaagtgcgcctgctagctgtccccgtcgagtcaacctgtgaagagaggtaaattgtatggctcgatgatgtaattatcataaaaatttagaaatgaacaatccgaactcacgagtggtcggcaggggggacggtcggctgcacgttgccgggaaacacctgcctaagtccgaactgtctcatcacacgctgcggccagtgaggctcaacgaaaatgtcgaacaccatcggcaggatggtgagccagtaagcctggtcgcgtgtgcacaaggacgaaagtcctagcggtgctctcgcagcgacggcctcttctgtgtacggctcccagatgacgtcgctcggctggagacggtcaaactcgaacacgaagtccgggtaaccacgtctcacctggacgtgagcgtaacgacgctgcaataaacatgatcggaattagacatgttatgtgaaggaaaaaaaaagaagaggactgataaacttataacgcagcgaagttgcactaaccccacgtcgacaccagtaagtccccatcgtgggaccgtcctctggccactgcgcgctgcgaccaaccccgtagggtgcgctgtccaccactggtcgccctatggcaaacctctcggctgcccaaagctgaagcaacataggacagccagcgatgatcgctcccgcgtcagtcttcgtgcacgcctcacagagggcacggtacgtggctgctagcacggcagaaccccagctccactgcggcacgtcctgtggctgagcatccgcgatggaccgtgcgtagtggaccagccggaagtccacagcgtgcccgtgggtgctagtgaacatcacccacccgaacaaccacaacaggtacgcctcaagggagcgtcggaccgagtaatcatcagcgtcagggtgcagaaggtccgcctacagttaagaatgaaatgttagtacaaaacactgatccggtcgcaaataagcacgtatgataataacaacttatttacttacagtgaactggagcaaccaagccttgctaggcccgactgtagagtacggaggaagggtggtggtcggtcctaggtgtggaaggcgcatcacctgctcgaagcgcgcagtgatatcctccttccacccaaaaacaccgtcgatgggaccaactggtgctcccgccagcggtagcccgagcaggtacgacacgtcctgcagtgtcggagccatctccccacagggaaggtggaacgtgtgcgtctcaggtctccagcggtctacaagagcggcaaggagtgaccggtctgcatcccaccgcttcgctgggtcacggtcgtccgccgccgcctcaacaagcctacaaagtggtagaaggcctgccgcacgcaacctgtatagagcaaacttcaaacataagtataaaacaaagcaaagttgagttgaaatgtgaacatacgcgtaccaaggaacgtgacgggggtcgacacgcaaccactcgcgcgacgtgcgtggacggaaggtgccgagctgtgcaccctcgactgctgacaggaacgagcggtggttcctgtcaatcccacggttcaacagcgccggtgtgtcgtacgccatacctgcatcaaataggttgatcagaaacatataaataattagttcaacataagtaataaatgttcataagcgaattactaacacatattaaacaagagtacaaacaaacaaaagtgtttagtccgaacactcatcacgataacattatgatacaacaccgaatagttcgcaatactactagtacaacaatagtcggaggtactcattacaacaagattgaattgaaattacacgatagaagtatttagtccgaacactcattacatcattttatttcctaaatcgaaagcattgttacaccatggaatcgcctgctgcgcgacgacgccttggccttgcgcgcctgcttgttgttccttcaccaggtggtcgcctaccatcacttgcctgtccagatagactagcatctgcgccgcttggaacttctgcattcttcgggcatgtcttgtaagtatggccgcgcagatcacacttgctgcagcgtaaagtcctcccacctgcttctgactcatccatatcatttctgatgcgtctagtttggcgtcgaccctttttcaccctaaacttagatggatctggaatataaaaaacttgggcactcagcgttgtgtaagatcctgagatcccgaacccatatatctcctcactccatgtatgaaagattgcttctttcctgaaataatttgagacgtacacattgggagatatgccacaatcaccggcagcagcaagaacgtgtgagcaaggaaggtgatgaagcttcggcttcatacaactgcaggtacatccaccatccgccttcaagacacattcctgcacggcttgcttgcgatagataccacgcctgctcctatcaacacacattatttcataccgatgcacttgtgtgccttgagcaacaactctatgtctccgtgcctttttgattttatcttccatgtactttgtcactacgttgccaaacactatgttgttatcggccatggacggaccaattttcttgtatcgatccctaaagtaggcttgcgtgccgtgaaggatgaattcaacaatagcaaccaatggaagtacccgaactcctcgcattacccagttgtacacctctgccaaattggttgtcattatgccataccgagatccatcggtgtcgaacaatagagcccacttctccttaggctcattctcaatccactgagagaaatttctgatggccgaccctgacctccttctcattgttggtgggtcatcatgtaatgcaccaagaggtatgggaggctcgtcaccttcaacttgtggtctgcgagattgctcatctgtttgcttcgttgtcaactcatccaacttgtcccacaactcattaaatttcttctcttggttctgtgcacagagcctcttaaagagctccataagatgcttgttcttgaattgcttgtagaaatttgcacccatgtgacgcatgcaccaccgactccgaacatcaggccacttagctggaagtcccttctcatcccaaccgttctgcaagtagtcaatagcccgcaacatacccgcatgacgatcatgtataaggcaaacgttgggcctcatacgcaccactgcaatgtgcactctctctaggaaccagtaccagctttcagtgttctcactctctacaaatgcaaaagccataggtagaacctggttgttcccatcacacccaattgctgtcaatatctgacctcggtatttacctgtcataaaagttccatctatgcatagaacaggtcgacaatgcacaaaagcattgatgcaagcacccaatgagaaaaaggctctttgcagcacactctttgttctatcttcaaccgatgtaaatgtatgtaggtcatagtaagtattattattcctctgggcaatggtggctaacaaacgaggcaaattatcataagaagcttcaaatgtgccatacctcatctcaatgatcttttgtttggctctccaggcctttgcatagcttatggtgtacttgaatttgttctcgatgtgcctaataattgattttggttcaaagccaatgttaccaacaacactgctgtacatctcacttgccacaaaagctgaagtgatgtttcggtgatacttctccaccccttgtaagtagcacttgtgctcggtcacaatgctaactttccaataatcattccatttacccttatatgcatggacacgccacggacaatcttccttcatgcacctcacttcatacacataatttgttgacttgaccaccctaaactctctctgcaatgaaactgcccaatgcttcaccgcctccttcatctcatccttatgagcataccttgcaccctcaattacctcgtactccttatactcccagggtacatgatcaccctctgatataacaagaccagagaagtcctcatttgcccaatcagtggccattacatcaccttcctcatcggatgatgcgtcgtcctccgcttgctcattatccgaatcttccctctccatttcatcaacaattataccgactctctccccctcatccgccatgcccatggcctgctcctcccttggttgattttcctcattttgcatcgatggtccaacaacatcccctgcattgctaggaccctccacatcttcggtttgcattgaaacatttgtatctttctcttgtaccgacacaaatataacgaggggccatgaccgttcaaaagccatttccacataccgtctccaagcagcagtgctgtccatcggcattagttcccaaaaataaccttctattgcacgactcactacaacagatactgacattgtgtagacttcttggtctattctaaatcctctcaacaaccaactataaattgactgaaatgttctctccgcaggcctatcgatgcccttagatgtcattacaaaatctgacagatcaacaccatctggaccaaatctaatatttccttcaccgtgaactatctgaaatgtgaccttacttgatattgtgcctgatgaaaacaataactgcgttaacctcgcatttctgtactacgccctaagttacattctctacaatattgttctctaaatttctaaaagtaggttacattctccagatcaaactaaactacatcttacaattaacactactgtctatgtctcaattcatactattatattctatgctctggatctacacatatgtgctgtgtgctacagatctgctaaaatatatggaactaaaactaaaacgcaacatatgtactcaaacgtaatatattagtacaaatgcaaaagatgtatgggagcatacctgtgatgaagtgagcgaaccagcagggcttcgccgctccccttctgctgccctcccctctctctctctttcgttttttttggatttttagtgaatataatgaaatttcataggggaggggctgggctttataggggggaggcaaaaatcgccctcccccagggcggcaagggggccgcctgcaaaattccatgccccctcgccgcccatttgcaggcggcccc

SEQ ID NO: 2865 - DNA, 19416 bp, Oryza sativa
  unsure (1)..(19416): unsure at all n locations
ccctcccagagggcggtaggcgactatttccgtcaattttcaaaatggaaaattatttttgtaaaacttttaataagaaaaattataaataaaaaaaattcgaagatcccgaagcagctagtcgacggcccaggcccatttaaagtcgcttcccttcaccagtgtggccatggcccatttgagaggcccacggcccacatagaatccgtcccattatcgccattctcctccccgccgccaatctgctccggcatcaggtacatgtgcctcttctccatctcgtttgatcgaaagcaaattggtttttctttgtcctatgtggtagtatttgttaggctgttgtgatgccatctggcttttgaaggcacatctgcagctagatcaatcgcacgcaggacaggacgatcgatcaatcggcttgggagttgggagtctcatctgtttgttgtcgccctcctcaaacagaagccttgctggaggtactcttcttccttgcacatagctgctagatctaggtagctactattgtttaaatcgagggtttgcctctcaacaattcaccttgttttgtccttgcctttttcttgtaactaatctggatgtgtattttcatccctcgagaggatatccattcgttgattgcatgatatctaaataattatgattttttttaaaaaaaattgacagcatagattaatatgaaatatatattcagttcaaaaaaatatgaaatatatcactccacaagcatgcaaaaccaaactggcaaactcaacttctgcaagttgcaacaaaaagaacaaattaaactaaaaatagttatcgtgcattcacagttatatttgttataacttgtagaagttgaatttaaacttgcacatttgtggagtgatatatttcatattaatctatgttaccaatttttttaattttttttatgattatttagttgagacgcacgaaacgagatgatatgctgatgaaatcactctcccaactaatttcaccttttctttttaccccttggactgcgtggtatttgtttgtcttttctgatgccatctcgcctttgagggcacatcacatctgcagctagatctaacgcatcatatataggacgcacaatagaatttggagtctcatccgtctgctgtcgcctgcaagaggtactcttccttgctccgagttgctagcgctatttacttgtttgctctgaattgctagatctaagtaacaagtatctaaatctcgatgagttgcctctcaacaaatcctcatctttctattctctcctctctgtactagtaactaattttgacttgataaatatattttgtcctctccgttgtaaccaattttgcctttttcttattttctcctctcacagtcacagtccgtctgtatgtatccgatgatggagtcgactttgggccactcgcggcgatttctgaatctgatcgtcggcatgtctggtgtcaaatcgctctgctgcatcgacctgatgcaccagccgttgttcaatccaacaacacctactacacagccaccaaacggcaacggatcgcaatccgtcccccagacaccagcggctttgatgatggagcagcttgtggttcctgcctcgagtttcagcttccaagcttcaccttcagcacccaactacgaccaacggaagattgagtgcttccccctgaccggtcgccaggtgatctgcgcggaccagttggggcgcaccttccactgcgacgcggagaggggccatgtcaggagcattccctgtctccacaagcccaagtcgatgcccttgtctctcttcgtacccaatcctgatgtcgacaatgacaaggaccttaatcgctaggactggggcagcagcctcttcgtcattgagaggttcccaaagtctgaggttagctatcaagtcgaggccttcgtctaccgccatcccagtccagcacgctactccaggacctggcactgcgagctccttcctcctccgccgtatctccatgaacccaacaagtacaatcgccgcctggagatatgctcctatgcagcacttggctcctcaagcatttgcatatccgtcaatggcatcagcacctaccgcctgaacatcgcaacccagacatgggaggaagttggcaagtggacccttcccttccacggcaaggttgagtatgtgcctgagcttaatctctggtttggcctctctgccgagtcccaccacttggctgctgctgacctctcctcgttggaattggactcccagccacagctactagtaggaccttggaaggagcttcacctgccggaggaatggaaggaatgcgaggattctcagcttgtcagtctgggctttggcaagttctgcgtcgcaaggttcttacaccctaatgataggattcacaaaggcgagctgggcgatgaggaattatctagccagaattgtatcactgtcttgactggtgtggaggtggtgccacgtgtcccgaatgccaacgtcaattcaaatagcagcggcagcgttagcagcaacggcatatcggaactccggatgatccctcacaaatcgagatgtcacacttctaatggcactatcgtccatactgtgttctagtaatttcgggctttgctttcaagacttctgttttatccattatgttttgtctgaataacttttggagttgaatgcaagagataatggcatttttacctttggacttggatcgagtatctccttgtgttcattgtatgctagtggtatttgtttcctcatctcccataatggcaggttatattaccatactagaaaatagatgcgccagttaacgtgcccgtggattatataacctgctcgtactatttagtacttccaggtgaggacatgttaccttgtgcaaccgtgcacatgcaatacacgtttcctgtaaattatgccatagtaatcatataaagaccctaaaaatttattgcattttacaacaataaatatcacacaatacatacatactaaaaattaactttatatactataacgtagtttcacatactacaaaacgttaatgtaaagcagctaactttgccaaatatataatgtcatatatagcttgataaatatttgaaaagctcatagaaatgtgtctttacggcattgaaatgaagtccgttggctatagtatttaatcgaaaagttctccacatctccagctccactgtatacataatagcttctcttcacctacagccacttcaaatatacccatcttcatctataattaaaatagcatttacatgatcatcactaaatttatatcacccgcggtgcaaccactagaagttcatctctctttcacttgaaaaaaaaatatgttcatcaaaatagtatccagaaaattatcatcagaacagtattcaacacggttgccttacttgaagtaaaaaggagataagaaagtgcgaacattctggaaacacctctacatttgatgttacaactatgcataccagtaacgtagattatatgagcatgtctccttgcctatataagattaggtctatataagaaatgaggttattttttataacaagttaatgttttctcctttgcaggttattactctaattacccgatggcaaaatcggaaaaaaatacgaatagaaaaaaaagcgcgcgcggggaggagggccagctggcgcgtacgcacgcattagccacccccaataaagagagatctgcggtggggcgcggcctacgcatccggcgcacacgcgtgaactaggaggcccctaacttatgaggtggaatatcaaagttgatgtgacttatgggatgaggatttttgcaactttcccttcaaattattccctcgaaaaatttagaaaactattctatttattttgggccgaaatacctccagccggcccatcccttcttttgtttccttccctcctctggttcctggccctaagctgattcgcttcaccagcttgggcaaggtccattcaaagcggcccacggacagaagccgagccgatctcctccccgccgccattctgctgcggcgcggtggagcatcatcctggcccttcttccccttgtccggcctcgctcctcaggtccgccgcttgcatcttcatcttgtttgatcgaaaggcaattccttctcttccttctgcgtggtatttgttcgtcgtcttttctgaagccatctcgcctttgagggcacatcacatctgcagctagcataggacgcacaattaatcgaatttggagtctcatccgtttgctatcgcctgcaagaggtactcttccttccttcttatcgacatacaatatcctggttctttcccttctctatgtaattaattgtctctttttgcttcttttgacggttgattagtaagtcctgtgccgatcgactcgacgatgagcctctcgtggcgatttctgaatctgattgtgggcgacaatatgcctcaaaccagatcaatttgctgcatcgaccttacacgacaacaattctttcagccgtcaccaccagaatcagcggtagcgcaagactcgactgctcagacaccggtggcagcttcaacgatggagcggcttcagcttccgaatccgatcttgcgcctgtggaatagatacttctttccgctctcagagcacaagatactcagcgtggacaagtccgggtgctccttgctctttgatgccaacacacgccacttggtgaccatgccattccttaacaagcccaaacgggatcccatctccctcttcgtcccaaacggtgatggtgacgatggcggcagcatcttgtcatggacagggttccaaaaccagagataggcagccgcgcgcaaaccagcgatcaattcgaggccttcatctatcgcaagaattttgtcgactgccaactcctcccgccaccgccatacctccgtgattacaagcactgtgagaggcgccacaagatcaatgcttatgttgtggtcgatggcggctcacagatatgcatatctgtggaggacgttggcacctattgccttgacacggcgagccacacttggagccaagtcggcgactggacattgcccttcgacgccaagctcgagtatgtacctgagctcaagctctggtttggtttctctgctggtgcccagcactttgctgcttctgacctctcctccatggattgtcagtcccagccacagctagttggtccttggaaggagcttgaaccacccatggaatggcgggaaacgtatgattctcaacttgtcaatctgggctctggcaggttttgcatcgcaaggttcttccaaactaagcgagagggctgttatgacgaagacgatgtatatctttggcaggatgttacggccttgaccggtgtggaggtaaagccgtatgtgcacgatggcagttacagtggcagtggcagtggcagcaggaatggcgaagtaaaacttgaaatgcacactcacaagtcgctgtgtcacatgactgagagatttggtatagatgatgtattatgaatgatattgaggctttgctttcaagcagatattccttgttttatccgctatatgtatcgtctgcgtctgagtagtttaggtaatgtatgagctatctaataaagattgaaagtgattgaagaaagaattgagaaaaagcttagtagttggaaaggtaaacatttatttgtcggggaaaggttggtcttgattaattctgtactttcaagtttagctatgtttatgatatctttcttcgagatactcaaaggggttcttcaaaagattgattattatagatcacggttcttttggcaaggtgatgatcataagaaaaagtacagacttactagatgggatattatttgccaacctaaggatcagggaggccttgggattcataatttggaattacaaaataaatgtcttttgagtaagtggttgtacaagctaataaataaggaaggggtttggcagaacttattgaaaaggaaatatctttataacaagtctataacccaagtggacaagaaataaggtgattcccatttttggtcagggcttatgaaagtcaaaagtacttttttagatatgggctcttggattgtgaatgatggggaacaaataagattttgggaagataaatggctaggtaacttggctttcaaggataaatttccatctttatatgctatagtccgaaggaaatcatccactattgccactgttatgggatctgttccgcttaatatttcttttagaagagctttagttggtcagaatcttgtatattggcatgagttgtgtgcttctattgtacatattcaattaaatccttcttctgactgttttagatggaattatcatcagaatggtaggttctcagtaaggtcaatgtatctagctttaattaacaatggttatgttgagaggaacaaatatatatggaaacttaatatgccgcttaagattaaaatctttatgtggtatttgcttaagggggttgtgttgaccaaggataatttggcgagacggaattggaatggtagcttaaggtgttgcttttgtatgaaaaatgaaactattcaacatctcttcatggattgtcattatgcaaaattcatatggagagcaattcagttttcttttggttttaatcttccaactagtatatcttatatatttgatgggtggcttttggggattgacaagaaaaagattaaactgatactggttggagcttctgccatttgttgggctctatggttgagtagaaataatttggtttttaataaatcaccatctatttcatatatgcaggtaattttcagggcaacgcactggctccggttttgggcacagctacaaaggtgtgaggatggtggggagtttctaaaggttgcatgccgcaagttggagtcgatggttatgcaattatttgccaattatggatggaggttcacaaatagacttcaataaatgtgttctccttattttggcttagtttcctctgtttttgtttggtgtcctatttagctgaactacgttcttttctggattgatacaatgtaataattggttgtagctctttttgagcaaaggctgggatgttaaattccattatctaaaaaaaaatccgtaccttattgcaatttaagacatgaaagtctccgggtggtattatgttaactagctgagtagcccacgcaattgcgcggctagcatcaatttaaaattatctactttttacaaataattttatttaaaattatcattcaattgattctaataattttgtagtttttaaaagccacgtcagtcgctaccccttacttctttgtcacatttttatttgcttactcgatctaccactgctattcatcatctttaaaactttaaaaaaaattaggccttatagtttttagagttcattgtcttgttgggttttgttttcataatttttagaagtatcgtcaaacatcgccaatttactactctacggctcatccgctgccacctctctttattgtcattgggattttaaaaatcaaacataattattgtttgtgttttttttactttttataagtctcgtcaaattgttattagcttcgccactatactgctctacagcccacccgtagcctcccctccttaatgttattgagattttaaaattgaacatgattatcattggggtttattttactctccataagtcctatcaatcgacgtgaccatgtcgcataacggcatgcccattgtcactgagattttatttgaggttttgtttatagtttctagatatcccatcaaccgcgaacacactccttcacaggcctattgcttctctcctctttattgtcatttgtcatcgttgtgttctaaatggaatttttttttataatttttagaagtcttgtcaaacgttgcctccatactactctacggtccgtccactgcctcttctctttattctcattgggattttaaaaatcaaacgcaattaccgtttgggttctttttttactttctagaagttccatcaaactgtcagcggctttactactgtactcatgtacagttcgcccgctgctccctctttattgtctttgagtttttaaaatttgaacatgattatcattggggtttatattttaatttttaaagtcccgccaaccattggctttatctgagtaatatatttcctttccccgaaaaaaaagtcccgccaaccattgtgaccatgctgcttaatggcccgtccatcgtccctctttttaatcatcattggaattctatttggggttttgttaatagtttctagatattccattaactgccaccactctaatcttttacatgcatgttgcttctcctatatttattgtcatttgtcatcattttataatttgtagaagtcatgtcaaaccctatcaccatacttctcttcggcctgtccaccgcctcttctctttattatcattgggattttaaaaattgaacataattattattttagttcatattttactttctataagtcccgctaaaccgttagtggttttgccactatactgctttacagcttggccgctcccttcctctttattgtctttgagattttaaaaattgaacacaattataattgaattttatttttcacattttagaagtaccgccaaccgccaagaccgggctgcttaacggcccatacggcgtctatccttttaatcataattgggattctatttgaggttaagttaatagtgtttagatgtcctatcaaccgccaccattctacttatttataaacctgtggcttctccccctttttattgatatttgtcatcatttgtgttctagatagagttttttttagaagcccatatttttcattccgatatttttatttataaattatattactacctgaactctaataatatttttataatatntcagaattaatatttttttattcaaaatttaattattctcgtcatatgttatagaaggtctctcatttcaatagtatttattttttaaaaaaatgtattcctagttgaactattattttttatttttttctaatttcggaatttattttattttttatttagaattttagttaatatcgtatttgtgtcctatatgatttattattttaatattttttttattttcaattttatagttgtttcaaaattgtattcctactcgagctatcttttttatttatctaatttctgattttattttatttttattctgaattttaattaatctcgtattggattcttatatggactctttttttaatattctttattttatttccgaatttcagttatttatttattgtattcctacttggactcttcttttttccaatttcagattttattttatttttatttcgaattttaattaatctcgtattgggttcttatacgaactcttctttcaatattcattatttttaatttcaaatttcagctattttttaattgtatttctacttggatttttcttctagatcgattgtgggctatctccgcctaatgtctcttctatcttagcatgtgcatacggcatgacatgcatgcagtgttctccctctttactatcaatggccatgtatgtatggcatgtatattttccagccatatatcaaacgtggatcactatttcaatttgcactctaattaccatctagatatggattaatgtaatttgttttgtactctaatgactgtccataaaaccataacatcaatattcagacaacctgtccgactcctaatcaatcaacatgttcgactcctattcattcaacatgtccaactgccatatttcctattatatcaaagttgctttctatttatactcaatattgtcctagataatctataccactaaaaatctagtacaacctacgatctaatggtgtaaatatttatctttttcttcaattcatgtgggaatttctagcctccacagcgaacatggtgtcttttttcaaaactgttttaataatataatagatatttttctctgaaatatggtagatcgtaagttatggccacctttgtttatgttttatctttcagtgctgaaatttatatggacgcgtccgatctgacgcaaaacatcagttggtaactgttgttcaaaatgttctatcactcgattaaaaatgttccaaaccattgcagcatatggttattattttggattgagcaatttagtaatggctggtgaagaagcatctgggattatttcctcctaagctgatgtagcaaacatgtcatccaggaacacaagaacatggacaagcctccacatctgttgacactgtacaccttacaattggagcttattcatggcttcttccactgcacgttcatagtatctgtcacgtcccaaaacgactctaaaatacatcatctaaattatgcctagaataattaaaacccgtgtgaaagcctccaacaattaaaaggtgcaaagttaaaagccaaataaggcttgggggatttttgtatatttcctaaaagcctaaaatgcgtaaataaattttagtggaattttcagagcacaaataataattattaagaaataaacaaagttaaaatgattttataaaaagaaaaactctaaaaagtcccctttccctccctctccctcttgggccggcttgtcccatctccctccccctctccccgcggcccatccggcctctccccgcgcgcgcgccgctgacgggcgggcccgcccgccaccctcgctgacgggtggggcccacctgtcatccccttcctcccgccgctcccgccgcctcgtccgcgccctagcgccgcttccgccgcgaatcccgccgcctcccgccgtctccgcgtgcaataaagagagggaaatcactccccgtgatcccctctcccttttccccccattttccctctctctctcgcgttcaaacgggcggatttgcccccgcaaatctcgccggcgccattgatggcggccggacctcccgcgccggtttcctcccttccccggccaccctctctcgacccggctctatttaaaccctccctgcacctcctccgtccgtttccgcctctcgccgcctttcctcctcgccggaatcgagctcgcgccgtcgctctctctcttcgccgtcgccgtcgagctccggtccgccgccgtcgtcgccccggaccacctcccacctcggcgccgcctccttcggcttcgccgcatcctcgccgacctcgtccacccctccgtttcggtcgccgaccgccggaacgccgtcgaccccgtcgacccgagccgcgccgccgccttccttcgctccggccgcctttttcgtcgtcgccgtcgacctagggtgagccgtggaccgccgcctcttttcccccttccctttccctctctcagccaccgtgcctatggccgccgccggcgaccataggggcgcgggcgccgcctcccgccggctgcgccggcttggccgtcctcgggcgcgccgagtggctgccgcgtggggcccggccgtcagccgctcgcgcccttaggtgcggctgacgcgtgggacccacggcgccggccggtgtgagcccgggtgcacccggtccaccgtggaccgtgaggctgctgcgtgggccccactcccgtggacccggtccgcgcgccccctcccctcggctgacgcaataaacccttttaaaattaaaatttaaatgaagaaattcgcaaatattcatttaaagagcatataaacttcaaatgaccataacttggccatttgaactcggaattggaccgttcaagtctctaatttttccttaagaagtcaagaagccatttttgtgctttgttcctgcttgttatatggagtttattagagtaaaagccttttcttttctgttggtcgtgtagacgctgcagcttcggaagatccgctcttcgtggaagttgaagccgacgtttgggaaagcgagcaaggcaagtcacatcatccttgaacatattgaatcccattttataaagttattttgatttaaattattgcattatcgctttatttaaattcccgcgttatcactgttttatctagccatgcctatgtacctttgttatgaccttattattgttattgttattattaccttgttcaccctagaataaacaaaaccccaactagtggacactctactcatggtaccactagtatgattttaggtagatgcttcgctggttaattaggcaacattaggtggttttacaactctagactttgggatattcatatcacctggacactatggaatggttggattattgtggaattggattcacacctccccctctattcaaaatcctcaaaatagttttaggctgggctcggggtgcatggttttgatagtagcaccttggccatataaggaccggtcttcgggcctctgttgcaaagcactaccgtacttccacatgtctagtgggtaaggcttagtttgtggctcagtctggttaaaaacaaaagtacatggatggagatggacgaagtcgggggtcgatggacatctctagggcaaatgaaggctacacgagctgcggcccggtagtcgagatgtcatggcacagggccggtgtcctgctgctaggggctcagtcctgcctacctgtcccggaggttccggccgtaggtggggttgggtcggtactcttgtctatggctaggatgggttggaaactatgtcacgtcttccgtccgtataccgtggtggtatgtggcacgtggttacacgtgaggaagatgtgtcttgtgggtaaagatgtacacctctgatcagagtataatctattcgaatagccgcgccttcggttatgggcaagccgagcaatgtacccaagttagtgttttaattcttaaaacctgcttaacaactaaaatgtggaatggttggcctgggttggcttgggacgagctgggacccagggtcgggttgccagttcggtctgaatcatcgtaggccttgggttaaggcaggttcgtgtgggttcacggccttatttaataatattgtatagctttaggatcgtatttacaaaatagctttgagcaactaaatgtcttttaatgctgtttgctgcaaaccctaaccctttatattataacccccttgtactcccttgcatttatcctgcacttgtgggtgtgtcttgttgagtacggtggttgtactcagtcttgctcaatttttcccaaacccagaagaggagcccctggatgatgaaggctttggtgtctagcttgtgcctgccgtcaagcgcctgtggtcgtcgctctagtcttccgctgtttcccgtttgtctttgtgtgtgctgggccttcgccgcccatgtaataaattaactatttacgcttccgcttgttaaactctgaactgtgtcaacttttggtgtaccttgcctcctgagacaaggaataatgcacgcacgtaaagaacgcccgttgggttatttccggtcgtgacagtatctcattctctgtgtagctttcactgcacggtcaaaatccctcttgtcgaacgcttcctggaaaggaatttggaccaggactctagctttctcctaatctgagaagtggcatacaatgtgagcctataaatcattccaaagctttctcctaggactctagcatttgttgaaagttttatggacttttagtatataatagatggcaggttctacattatgtctattcatgcatatatggttatctcagttctcagccttagcactgcttgtttgtttttcagagaaattagtgacgttattttttcttgttttaaatttagtcaactttctcaattattttctagttggttactgaactttggtctttcatactgggcgttttatcgggaaggaattgtcaattggtgcttcaactaaattatataagcatgttgtttaagctgccatactgagttgttatcatctgactgcaaactatccaaacagcacgtgaaacatatgctctcaaagaagcaatttggcctttttcccgcggaaaaaacaatttgatctagtagtaaccatgcgcatgtgcagttgtacaaacaccatttccaaaattctaccgcggctacaaattaattgagtaggaaacaaatataaaaactaaaatcagattgtcatagcattcttcatttactcgccctatttgcaacttccgactctgaagaaaaacactgaaaatgcaggttgcttagcctgctacatctgcatccttctcaatcaccgtctgcttagcgacaacaaaagagcaagggcacagacgcagcagctggcatagatacacacaaaacacacacgagttttacaggacaagcctattttagaaattttacatgtactctctcttattgatccaaagggttcgttcatctatctccttcttgtacgctaccttatgctgctgtcagcttcttcttcttcttcttcttcttcagtaactggtgacgatgagcagcccgatcgccgtgacgacgatggtcgacggcaccccgaaccggaggtggctccagaaggagaggttgtagccgaagaactgagctcttctagcctgctcgcagacgatgaggttcgcagccgagcccagtagtgtgaggttcccggcaacggtgctgacccacgctaggataagccaggccttcctctctgaatcgtgagagattgcagcagctgatgcagccactcttgtgccgagcagtagtactgaaagacaaagttcagaaatgttataaaagtgccacaaaagaattgttcagaactttgggataactttgacagtcagtatccaaaagaatattgttctgaagatttacctgtgggaacatttgaggccacatttgagaggataagaattaccacagcaagaagagcaacacccttagcactgtcaattcgtgaatacggttcaacgagctcccaaagtgtgttcggtatgccagttttgttgaagccatcgaccgtaataaacatcccgcagaagaagatcagcaatgagtatgacacctatcatcagacatggcaaacacatgaaatttaattgtcccaatgaacatgattcagataaattgttgattcaggcatcagtaagtaaaatcataccttctccagacaagcctgtgcatcagtaaaatcaagcgccagaagaacaagagccgcagtgatggctgtccatgacatgttaagccccatgagaagtgcaatgagcatgccaagagtgatgagataaacagcagtcttccacacaaacaccctccatctcttctccgcaacctcatcttccttctccttgtcgccattgctggcgggagacggcggcgagtcctctatgatcacactcctctgctggctagcagttcttgtgaacttcctggaggatgcaccttcatccctcctgtcagtgacagttgagacctcgaccatctcatgcgacatgctcgatgcccggagcgacttgatcgcgagctgtatgtccgcctccgaattcacactcctgctcctcagattctcattagcactggtgctcctcacgctgttgctcctgatgattggctcacttatgcagtccatatcatccgggttcagagatgagacgtgtgacattcttgcaggtgtgaacctgtgtgaggtgacctcgtcgtcggcgaccacctccggcccagccggctgcccgccttcctgatccttctccactgaaaggtacttccagaagtaacagaggaggatggcagcatttgtcaggacgccgacgatcatcgccgggaaaactccaagcaagaactgtccaaaggagatgccgctctccacggcaatgacaaggttctgcgggttgccgatgggcgtcgccgcggagccgatgttggagctggtggcgagggcgaggaggaacggctgcggcggcaggttgttctgcctggcaaccttgaggatgaactcggtgagcacgacgcagcaggtgtcattggtgaagagcgcgctggcaatggcggacacgatgcagacgcggaagagcaggtccttgctgcccctgctcttccaggagagcaggttgccgaggtacttgaacatgtcagccctctcgaggaagatgctgacgaccatggtgccaaagaggaggccgatgattgggaggtcgatggcggcataggcgtcctccggcgagatgacacggaagaggaccatgagcatggcgccaaggagggagccggccgtacggccgacgggcatgaacgggacggtggggaagacggccagcacccagaatatcccaaacgcgacacatcccagcactactttggaggtccctgccaacgccatgttagcaaatctctcgtcctcgaacgatcgaacgaacgaacgatcgattgatcgatctatactagagctaaaatgctacgaacaatttttcactgatgatgttttggtttttgcaagaacctgtcacgaactcacagattgaagagacagtacagaacaacctttccccccaaaattacgttcacaatctcaggtcaggttcaggctacgttcacaacctccttgcccaactcaaactcaagaacctgcagaaattggagcagacaaacaaacagaggctacaggttaattctaaaatctgtaaaaataagagagagaaggtaataagatcatttaaaaaaggaaatgtaaagatccttttgttgttgtggttgttgttgtaaaataaagtttctttgatccgggggaacgaaaacgaattagcaagaaacaacggtgttagatcgactgcacgaaaacgggaggacacatatttgatatttgagatcaagcaccaccacgcctactcacggtgtatcctgcaaacaaattcaagcgagaaacagaagcccttatcaatacaaaaatccttcgcacacttcaccaaactaaatgaatagagctaccgagatttcctcagataaattactgtagttatggctaaaaatccagattttttgttccccctattctacgcttcttgcagttgatcagatcgaatggattggagcttggcttaccgactaaaaagaaacgaaagatccagcacaaacccgtgcatgcagtggtgccaaagaaccccaggaacaagatatttttttcgattgtttcgtgagctacgactatgattggtctctggacgaaaagagaagaaatgaacttcggttttgggttgctcacctcggagtaggggcgtggagagtggagagtccacagtgccacgcgcaacgatgagaactttggagtttggacttggagaagtcagaagtggaaagaagcaaaagcaggcggcagcggcggagtggtggtggtggcgagaataaagcggaggtggaggaaggaaggaatggagggggggcagctaaataaagagagcgtccactgctttcatggatgatttgaggtgactggtgggtcccaccgttgagggtcctaggaagggccgatttatcatgtgaacccaaagggtggagctcccattgtgtgagtccgttttcataattttgtgatccgcatatttgggacggtggtatagtgctacttgaatacttcatcacaaaataaactagttcttgactataatttggatattctctttgtaaaaaaataaatatttaaattcgttgtactagactacgtcacatttaatccttcttaagatctctataaaaaaacaaatttataggaagatgtgacaccacctagaaaagcatccaatccttattaggatccttccgtctaaaaaaagtttaatctatatgaagatgtgacgctttgtccagatccaaaactaatcaaagatagtattatctttgtccaaaataacattttcagttatagaggttattatggagcaaattaagacaaataaaatgacctatatgagaattattatatggcatgtgaatgtaagtgagagagtagttaggggtaaaatgaggaaaatttgaatgagataggattcatcgaagtgacaactagtactctattagtaatgtagaagtacttatttagagacaaatttaaatcctaatatttcatttattctgagacataggtactatgatatcatatgacggatatatgccgatcgcaaaattatatgttatgattgtggaataccgttttatatgggaatgtatatatgattactctgtatatatagttttttctatacatttattatctccttgctttatatatttatgaaagaaaatggagaatttataaagtaaggactatattggttggtacacatggggtgtggggctagcagttttcccatacgaactctcctcctatgattcgcgaagttgccaacgatttggatttgcatgcttggtttgctgttgatttggattgcgcgtgggacgtgtgtggcggccagcggagagatcgcgccgtttcttccgatacaagaaatctcgacgatctttgaagccaaaaacgcgtccggatgacgaagcgatcgacaagattagcatgtcattgtcgcatgattttgccgtatttctagcgaataatgggcatcctgtgggttctcctgcttccatccacgctaccaatgattgtacgtatgcaacgacgttttggtggtcaatttgcatcacaacttatcacagccgcgtgagcgcgactactctggactttgggacactggagtttggagtggagtggcaatggtacgaagtagtaccacaaacacaggtgatcgtttggcctaaaactgataagccataaaacgacgtataaaaaaaggaataatttatagataaatttgtattcgcggttcaaaattcaatgtaaaaaataaactaaggtgaaaaacctaaaaaccaactctaatttaaatttgaaaattcaaattttagtagataattatgagctgaaggctaacaaagacgaaccacctctactttgggtgtaagcgcgttagatccattattattatagatggacttcatgctagcccaaagcccagctagagagaaaattaagacgagcctggtcttatgggaaattttgtttagttaccgattgttttaattattttctgataaaatagattattttcataatttgcattaattattttctgataaaatagtttgaatatttgtattaagggaattaaatttagccatgtagtaaaactaagatcagtctcgatttaggccatgtatgattcagcttaggattattataatctgaattattaggaataagttcaaacaaacatatagcttattatgatagattattacaatctataagccagattactataatctaatc

SEQ ID NO: 2866 - DNA, 2741 bp, Oryza sativa
tcttgccgtgggattatcatactattcaacatttcaacaccgacagttacctgaaaacttgtcattttgagcctccacaagcggtgatccctcgagctgcaaaacgaatatttcgaattagaggcattgatcacaatctacaaaatacacctaccgccattagtgaagctgcaagtaggcaccaccacaccttgcaggagaggaggctaatacagcagccgttgggctcctcgtcgacgcgaacaagtagcacggggcagacctcgagcgcgaagaagcggaagcggtagacgtatcagcggaaggtggactcgtcgacgcgctcgatgcgctccgcgtcgagcaccgagtactgactcgccggcaagctcatgtactccgctacacgacacgagcaaagcaaaacatctcaggctcagcttcagggcggggatctctccgacaaacgaagcgcgaggcaaaggcgaatcccgagcccggggttagtactcgggaggggaggaggactaggagataccgaccgagcgggcgggcgagctgctggacgaaggtggactcggagcggcgggcgacgaagcgcgccttgggtgcggacgacacggccgaggaggaggacgacgaggaggaagaggcgcgcacgacggcgcggcggcggcggaacgccgcggcggggaaggggggcggcgaccggagcgacgcagccatgccgtgccgggtgagtggctagcggtggttgcggccctccgggaactggagcaaatgaggcggaggtggaggcgtggtgtgggggaggaattttgggttcgatttttttttaaaaaaaatggacggataagatggagtgggatggtgacgggtggtagatctggccacatctgggagcccgggttgggcgatgtgttcagcttatcaggtgggccaaggaatccttgagggaaaaaaaaattggaatcctccttagtagaaaatttccttgctcactgaaaggtgggccttaatcctgagaggctggtatatactagtactgttgcatacacatcggtggccgctgtgccggtaccgtatgtagcactactacgtgagaaagtgacttgttcatctggaagaaaatttgtgacggataatggtttctgaagtacccactgttttgttcattattcccggtgaaagtccaaactttcactatctgagtgaaaggtggaggtaccgttgaattttcgagttgggagtttgaatatttggtttttgaaatgtgaaactttgaagcaaatagggacatagtatcacctaaggagcatacgagaatcacatactccattcacaaggaaaagggggtttagttaaaaacccaccatctccggtttttagctaaatcagattatcagactacctagaaaggttaagcgcactctaacagagttttcttgtactagttcaaccaaaaattatgttgagatttacaaccaaatgtgcctcggtgcaagatagcaagatgaattgcacctactacaacaataatgtaaataagctatactcattgagaataactcatcagtcatcaatcaaaagtcattgggccatgatgagcaaaattacatttttcatttcaacttttgtacatcatctccgaagagctaatacaaattacaaacctattgcctacaatgcaacattagactatatccaccgacaatctatattccctagcttacgttgcacaaatgatcgtgtgatgtcgcttcaccagatctcagatcagatgtcatgcttgtttaatcaatctcagcatgcacgtaatctacaaatacaaaattcttctggagcgtataaaatgcgtacgctacagcggcactaaccaaagcagcagcggcaagcaataatctgaactgaacatccgcaggaatcccagcagttgcacagaacgccactgtcgctcccatgaagaccttttgcagagtctggaaggcgttgtatgcccctttgcaagatgagcatttcagtgtgtgctgctcatatctatctagcatctgcataggtaatttgcaactcggtcaacatatagtcaaatataaggatacaaggattgaagaatacatagaaacgcaagcataaatgaacatgtttttcataggaagtataagttgaaatttacaaggaactgctgtggttgaatcttcaaatatgtggaactgctgtggttaaatcctcaaatgtcaggtactatgagtacttcaaagctatcatacctccatagatattttaaagtacattactgagcttcacagctaaaggcgccagtaagtatgacaattaaaatatagcacagaaacaaaaaaaaatcgtgccaataatgagcaacataaaacctttgttttgtgtccaaaacaatatatcaaggttcatggaaggagtagtgtgcaaaaatacttcatggaaatcaattatctgtgcccataatgaacaacatcaaaccttttgttttgtgtccaaaaaaaaaaaaacaaagttcatgcaaggaggatagtgtcaaatactttatggaatcagcgcgtaaaaagttcttgcgagcaaggtagtaaacataactaaattccttaaaccatctaaagactagcttcaaaataaaactgcataaatgctctcacataactagatcccagaaatttttacctcacgctttgaaaggacagtggaaggcaacacttcttggctaggatttccaaaccagtcaggttggctgt

SEQ ID NO: 2867 - DNA, 996 bp, Oryza sativa
atcttgcccgtggcattctgatagacactgagagtgcccgccaaggtggtctccagttgatgctcctccaggattacacccgcatcatcaacgaattgaatggcacgcggacgaccgattcgcgatgaggtgtagaaggagtagtatagattcttcttgtggaacaggaaacgggcggtggccaccacattctgcggattgtaggtggtgtacatggacttcatttcctcacccttgaggaaataggaggtgcggcccgttagcaacgcagcgtaatctataaatagggatcaaatgaaaggtggagataatccaggtgttagataaatacaatagttctcttgttaattaaatgtaggagctggtgaatgggattacaatttcccgcaggatttggcggattctattgggatctgggtgggtgtccggtacttttgtacttacgtttcatgttgcgctcttcctcttcattgggcacgggcacatccaaggctacatccgtatctgaaagatggagggaatacaaatagagaataagatgatgctgggcgataaggtacgaccttaaatggaatttagatagcaacaaatgcttcaaagcaaccgaaccgccgccagccattcaccatccatccagccagccatccagccagccatccagccagccaaccaactatccatccacaatttgtggacacaattccggcattcaaccaaaattccagttgaatgggtgaatggtgaatggctgaatggacgaatgccaggggatcatcatgaatggcaatgcaactatcaggtagagatcccacctccgaactaagaccttccatttccacctctcgcttccacccaggtggcattcattaatcgtgcataaattgagggcaggtagaaggtagagtttctcgaacgggaagtctaacctacatctaactagggaagtgctttgtatttgaggatgtgcggactctggggttctgaattcatgggtac

SEQ ID NO: 2868 - DNA, 770 bp, Oryza sativa
tcatcacgatactcatagtggcctgagtgagtctggaaggctgtcttgggcttcttttcaaggtgcaaccctaatttgggaataccctgccttaaaatcaagttaaaaaaaatacttagctccaaaaagctcatccagaagctcatcaatgacaggcaaagggtattttcccttaattgtaattgcattcaggtgcttatagtctatgcaaagtctccaggtgccatctttctttttgactagcagtgctggtgatgaaaaagcactattgctgttttgtatgactccagactgaagcatttcagttacttgacgctcaatttcatccttgagtgctggggtatgcctatagggtctgaggttgactggacttgctccttccatcaccctaggtcgacggcgacgacgaaaaaggcggccggagcgaaggaaggcggcggcgcggctcgggtcgacggggtcgacggcgttccggcggtcggcgaccgaaacggaggggtggacgaggtcggcgaggatgcggcgaagccgaaggaggcggcgccgaggtgggaggtggtccggggcgacgacggcggcggaccggagctcgacggcgacggcgaagagagagagcgacggcgcgagctcgattccggcgaggaggaaaggcggcgagaggcggaaacggacggaggaggtgcagggagggtttaaatagagcccggtcgagagagggtggccggggaagggaggaaaccggcgcgggaggtcccgccgccatcaatggc

SEQ ID NO: 2869 - DNA, 3638 bp, Oryza sativa
atgagagcataaaattcactctaatttttaatagagcggggatctttactgctgttttcctaaaaagggcactaacaagtagattgaaaaggaggtaaatagagagagctacaaaaattgcagatacctgccaccatgcttttcctggcatgctaaactggaaaaagttccgagcactacaaactatagaacgagtcttccctggggccattggaatgttgaaagagcaaatccatatgacccatttctgatctccaaaaatgggtaactttgtgtctatctcaattctacaaaaaacgaaatactaaaagatcagaatcataagtggagttactggatgtgaaactgatatatgagctaattcacatcaaaaggcaaatgcaatgaaatgggaaaaggcatgattagagtgttttgctgaacatacttgttcagtgcatagcaaggggccacaaaagttgcactgatgcgagggtttccagaatttgaccctgaatatccccatgcaccacttgattccatcttgaatggcaaaggcctggctcgatctcttcgaccagtgacctgtgagaggagttaaattttgaggcaaggataatgctgcctagttaaccaatttctttggccatgggaatcgtacttttgctccatgaataatgaagggaagacaaatggtctaagttgtggatttactgaaagtgcatcttagataatgaatcatacctctagtccatgtaccatgaatccataacagacagttaatacagtagcctcgattaagtaagtattattcaattttagcactagccagtagcttaagtaaagagactgaacgatgctgcagctacattttcatatcaaggtgcaacaggcagttcaaaacaaaacattggcaatcatagtccaccagaagccactgttaagagattcaaccaaaaatagaactactaaaaccaaattgaggtatgatgtgcaagtacggtacacaacaaaccatcctcatatctcaaatgtgcaatatccaggactagcattgcgtgccagtacattaaagtaactgatcattctcaaataaaaaatgtagcattaccttgtggtgagcaaattctatatgcgacggatcagagacgttctccatcaatgtatcatagccatagtacagatccctctggatggtcaccgtggagaacgcaggatcctcaaactccttcggtaacctggaatcaaaaacaggatcaaacctcgtcaccgacgaccttaaccaaactcaatcaataaaccactaatccagaatatacacgcacatcggaggcttggtagccgtggccttctcccacccattctcgtcgggccacacgaagagcagcccttgcgagacgagggtggggaacttgatcgcgcacgccttcggcgacctcacagccttggcctccggcccctcgggcgccgcctgcgggatccgggtgcacgcgccggagccatcgaatgaccagccgtggtatgagcactgcaagcaccccgtctcatcgatccgcccctcctacgaacacacagacatccagatcatcgccgtgaattcaatcggatcaaaattggcgcaaaagaggaagagattggaagggcgcgtggcgatactcataccgagaggggcgcgaggcgatgggggcaacggtcgtcgagggcgacccactcgccggattttgggtccttccagatgacgaggtcgcggttgaggagctggaacggggtgggcacgctggggtcgaggtcctcgacgagggacacggggtaccagtggtccctccacacgaacttctcgtcggccgacgacgtgctcggctcggtctccccgggcgcctggtccgcctccccggggacggacggcggcgccgccacgcggagccgtgtgtcggcgcgggcgcggcggaggcgcaggcgaccggaagccgagagcgccgggagcgaggggacccggcggctcgccggcagcggcctcggggagaggagaagagatgcggtcggagccatcacgggcattttcgtcgactcgcttgggaagcctcggagatctgaggtttctgtgtggttttgaagatttttggcgtgccggtttttatagctcgcacctggtgtggtgagtggtgactgaggtaggcgaggagaccagtgttcttccagaagaacagagtagtagcacgatggaggaggaggaaggcgagagctaactggcactggtaaaatcgcctgtttctggcacgaaaaccagcagccggaagggggattcgaattttctcgtgcggagaggtgagaaactgaagaagagagtaggaaacggaggtggaggaggagtccgtggttgcgtgacggcacggcggaggaggcgggggacaagtgtgcagcaggagcacgcatggcgttttgcggggtgtcgtgtggtggagcttcggctacgcagcggcggccaacttccctgggtatactcactcgtagaggtggccaaacgggccgggccaaaacgggcggcccgaggcacggcggaacctgtagccggcacggcccggcacggcctgctacagtaacgggccgtgccggcacagcacgagtagccgtgccgtgcttgggccgccggccgagcccgcgggccggcacggcacggcacggctactgtagtaagtccgcatctcatccttccgcaagtccgtatctcatccctcccaactgacggcccagcccgctagccgcctccgcaagtccgttgagcacccctcctagctgatggcccagcccgccagccacctccgcaagtccgcatcgcatccctccgcgccatttcggttcctgggccaaccgtgccccgtccacggcccatttttcattcacgggcccgtactgacacggcgggccacacgcatgccgtgccggcacgggcacggcccggccatccacgggccgtgcttgggccggcggctcggcacgtgggtcgggacggcacggcccgtttcatgagccatgcctaacgggccgtgccgaaacgggccgtgccggacccgtgcccgtgccgtgccgggccgggccgcccgtttggccacctctactcactcgtgagaatgacacgaacccaaccggcttgtgggagccggtccgcccattggattctgggttcacttcggcagttcggcgccgtggacatgaacaggcagtgtacggaactttgaccgcccgcgccccatcagtgcactttgtgatccagaaccgtttgatactactatggcatttatttatgagtaaattgcatgttgggcctcatatttttaccatggttgcaagttgcaccggaggtatgcaccttgcttaacctcgtcctctgcccatcgtcgtgctcaacctttggcctcccactgcgatgcgctacttaagctcgaggttaacagatgccatgaagcctcaccttgcaatcttgcagtccattgttgtcatatgctagccacaagatggtagaagcacaaaacaataatcatcataaggctgcaatccacctgcccaatgtaaatgtcctcgaacatgtagagcttggagtgtgaccaactgaccatgggcttgctgacttggtgaaggaatactactagaccccctccccc

SEQ ID NO: 2870 - DNA, 3364 bp, Oryza sativa
agcaatctccacaaaatcctcctcgccgccggcgccgatcggtaaatcttcaccaaaccaaagccaagctattccctgcagatagctcgacagcaatgggggcaatttttctttctttttttcgttccctcctgagctttagtgcaaacctagatggggagattgagatccatcacaagtgtgtggctttgatgctaactctgagagagctttggcattagtacagcgctgactttagatagctagctacctgacctgttactggtcagagaagagaggaaatagagagataaaagagggagccagaggtagaagaactaggaccaagatgaatcatttggtaaatataactggtccaatatgaaaatgttgctttaccctggtgcaggctgcaacaatggtaataaaaggaggtctcatatgcaatttatttttattttttttttgcaatgaagcataattgaatttttacatcctttttatcagcttcagaggcaatgatgtcaagtctatacccttaaatttaaagatgtattttttttattaaagtatcttatatctagaataaatttcataaaactacatttacttttatcaatctatcataaaactgtatatttaaaaaacatgtatcataaaactaccgatttaacaccatatcttccataaaactaaagatttgaggtatcatatcagaaacatctgttttatcacaaaactacgacttttataaccccaatatgctatagataagaacttaaaaatctagttctttgataacttcactgctaaatctgtagtttcatgatataatattttaaatatatagttctataataaatttgatgctaaatttgtagttttgtaatacgcatctttaaatgtgtagttttgcgatagtttggtaaaagtatttgtagtttttgtgaaatttactcttatatatattagtagtttagggttgatcttccatgttattagagttatgtttggttagggtttgcttattgcatgtctttgttggtgatcatttcgtttgtgggatccttgattttcggttagcagtaccgtctttagagtcagctggtcaggttcgttgatttgttgggtgatatcggtttattgatttgtaagaggaacaaagatggtggctggtacttattcattaccttttgtgcattttttttaataatgaaaataattatatctccggcttctgtccatgggcacacaaccaaccttttgtgcataatagagttgatcataattatggatgtgcttgtttgctcatgtcttgcagcattttaagatgtagagaattttttttctttgtcgatagatcttttgttgtaatggttatcatatggttgtaaattattgtcttgtttaataacgttatcagtcttgtcttgcaaagaaaatcatggctagtgaattaaataaaaatacaatgcatttcttattacacgcgtgtgagaggttaagcaagttcctcttatttcttgatcaaggactcaagttgtatttgatttgtcacgtctctaatatgatatcctgcgcatagagttctcttccagatatgtatgaatttatttgattttttagttcaaatggattccgtagtgaaaaccggataaatcatagcattcctagttgaactgaaagtgatccatttctcataccacacattgttgtagtagccttttgctgttgctactgcttttgttgattacacgatgtcgaaatcaaggcatgcaacacgtggtgtccccttgaactaaaatcaggagagggcagctcgatgagaaaatttcaggtcccatcaccagcaactgtaccacaattgacactgccactcacaccccccaatttccttggccacatcccaaagagatatttttggcaaagctaatcttcaattctggcagcaaagcgctccaatgctaacacgcaaatatccagctcaaaaatccttttgccccaccagtccattagtgcagctcaagaatcctcttgcactatcacatatgcttgcactggatgaattccaaagaaatttcatcaaaagttttaggctccacttgcatcaaagaaaattctgcttctgatgtttcctatttcactctgcattttcgccattcagagtttcagacgtttccaaacacaccaggctgcaccaacttctatttttcagcctgccatgccatgttggatcagtagtagtagacgacatggatgggctggaagtctggaatgacaccgaacactgataatcagtgttgcttcaaaatgttgatatcttgatcacaccttaattagtgagacaatgcagaacacgcaccaatcaccatcaaggtttgttgtaaaccacacaaagtttaaaaatgcaataagtccattcaccagtcgttatgcctctactgatcattgcactttatacccagaatgctggacaaaagaaagaaatgctaagcatgaccacaatcagaatgtcacatatagtagtagtaagttgtaacagtttaacaacagtaccagcatcacatataatagcttagcaatgaaaagtatccaagataacacagacgtttacatgccagttcctactcgggcattctcacgaacacaaggtggacaccaccaacatcactaagatttccaactaacaaacgaaagtaaattagcagtatcgcgaaccccctttaagagatgtaaaggggctagggtttcgcacatttcaaccccgggtcgccgccatcgccgcgtggagggggcagtcacttgggcagcatctgcgccgctgcagccgcggctgcctcctgctgctgctggaagttgagcgggcggcggaacagcatgatgtgcggctccggccggtggatcgcgtagtgcacccacccgcggctctgctgcactccgatcgcgcgccactcgttctgcaaataaaccccatcggaaaaacccccattccccaatcagacaatcaacgaatcgatccaaccaggaacgcgattctacacgaatgtatttggagatcttgaaggttacctcggagagaaggcgattcttggggaggagcttggcgacctccggcggaaggacgacgtgcctgcgccgcgccggccaaaaggatcagaaactagggttttgcaacggagataacgagaagattcaagaagaggggattctcatctacctgtactcgtaggtgtcgtcgaagtacttctcggagtactggatctggcccatctcaaccccaactcctcgatcaacttctctacaggaaaaatccccagaatcactcaaaaaagccccaaccaaacaaccaaaatcccaaatcacgcagcaatccggaagaaacggg

SEQ ID NO: 2871 - DNA, 3374 bp, Oryza sativa
  unsure (1)..(3374): unsure at all n locations
tggagctcagaccgggcgccgccgccgccactcccgcgtttccgctgctcgcagtgacatgccgccgcgccactcccatgcctacgccgcccgccaccgccgccgctccggccctcgccgcccgccgcaggagagaggaagagagagagagggagcggcgaggagggagaagaactggagggagggcagagagaagggacacgtgggtcccacaattttttttatgtgccactgacaaatggtcccacacatatttttaaactctaaatgccacctcaacgccacgtgtaaagaagacccggtcaataccgccacgtaggcgccacgtcaacaaaaccgtccttcaaaaccgccaagggagtcaaattgcaccggttttaagagtttgggtgtcgagatatccggtcttgtggtttagggttatggattagattttgatcgcttttgagggtcactaagtgtacttattccttttctaaaagaagaggccgaaacaacaaactatgggccatgatgggctgaaacctgaaagaagatctagaactccacggattgtggcccatttatctaatgttcctttgtgggtttttcttttatgacgaacttaaaaaaatgcccgtgcgttgcaacgggtgaaggctattttaatcttattatcgttatacggtttagttaatatgaaatttactgtgagaattcgcttgtatatatatttttctagaaaatcatgatctgagaattcgtttggatatatatttttctaaaaaatcatgagttgcaattaggagtctgatcatctcaagttagcatgcgagtttttttaaagagatttcttatacgactccatccatatttccaaaagcgaacgaacttaaaatcccgactcaaatacggatctatattttcaaaagcaaacaaacttaaaaaccgactcatacacggatgtcgtatcattatacgacagtaccggcaaaaaatcttcaattttaatttttatataaatagtagagataagataaagatacatgtgcatagtagcttgattgaatatttctctgattaggttttcgtatttctcttggcaaccgtgatcgatcggttgctgttcttgatcgtcttgctgcacgcgtggattttcgatatgtgggtagtaatagatctcggctttaatatcatgatttttttaaaatctttttgaaacacgtataaacagcagatcgtattggattgagtttctgataaacacagtaggaattcttctcgatacagtgtgcgtgtagagaaaaatcaacaaatcaacaatggtatgtcttgctgcttgcctcggtgcacggcgacacaactgactgctgctggttggtgttgatataggtgcgcgacagcaggttccaaaccgtgttgccgaacagatcgcatcggcaagatgacaacttcgcgatggtggttggttcgtgacaatgcactggacgaaacacaatcggccgaaggcactgatccgaacaagcaaattttggaaaatccaatgtttaaagctcatacacagtgggacaaataaatagttaaattgacagtgtgtcacgccccgaactagccccgaacggagctagcccgtgacgctccaaattaacctgttaatcgataacagtcccaggaaacagtgtcggtatcacaagaagacataatatcacggcaacagaggtctctttattacagagtaggagtacagtcatgttgggctgcggatagttcccgagctcacaactgcattacaaaagggaaagcggaagccaagacttggaccattcatcacaggcgcgacttgggaactaggtcgaaaccctaaaactcatcgtagctgacttgctcctggaagaactcctcatcagcaggatccacatcatcttcttccacaactaggggggattatttatatagagcaagggtgagtacaggagtactcagcaagccatgggaattaagtgtttaatgtagacttcaaaggaaaggctgttgtttttgcaattggttttatttaaactcctttttgaaacaactaagtgagtgcttctcaaacgacacggattagacagtgcatctcgtccggtcggagtatgtgcaatgtatcaatctttgaattgattcaaagttggcacccggccaacggctttcaaacggccacccgggcctggctgatcccatcagccgcagattttccaaacatcgaacccattccacaatagtaatttcacaagcagtagtcaaacaaaactacgctaggaatcacctcacatccgcccatgaccgtgggcacggctgttcgaatagtttaataacctctacagagggggtacactttacccacacgacattactaacccggatcacccagcccgtgcagaatggccacgtctggagactttgaggctttcatgacaaggcgcatttcgaaagccgacacaggttcaccatatgccaacgagaggggtcccagaccaacaccaggttagttcccagaccatactgtgccaggaaacccgggggttctccccagcaccaccccgttgaatccacatgtctcttggcatcatggctcccccgattagctaattactcagccaggggcgtcccattacacctatgtggtcgcacttgtcttatgttcggatgaaattccaaggaaacagtccttaagtgtaagagcgggaaaccgtactcccggtacgtcctctggtttgtggttttggaaattcatttagttcgcaagcaccgacncaggtgtcgggttttccaaatcttttgtaaaaccccaagttttacccatcgttggatattttaaatttgaagggaagtgttccaatgctcgagcccgaaggcccgtgcatcgaagcacaacagtcgacaaaggaggtctaagtgttcaataattcaaggagggtaattgcagcaattgggattgggaccagcaggctatctcacaagccgcggccgaattactcgtgttaatcctattcatgcaatatttgcggaaaagaaatacttagatttaaattataggtgtaagatgatcaaaggtgacttgccttgctcgagatcttgagctagatcctcgaaatcctcgcactgcgggtcttcaggctccgaaactacacgcgaaacgggacaactcaacaaacggcgaaaataaagcccaattattgacctctaaacgtgctattaaatagatctcgagatttgaggaattttgggagttgaacggagtcaaacggacatacggttgagaagatattgaatttctaagattattggatttttggtctaaaggaaaaaggatttaattaaacccttttgaaaagaaaagaaagagggaggggaaa

SEQ ID NO: 2872 - DNA, 2727 bp, Oryza sativa
  unsure (1)..(2727): unsure at all n locations
gcgccccggtgaccccaactccatccggcaccacctcatccggcaatgcggcgcgtccagcctctgcacctgatccagtgccggaagggcgagaagaagtgcctcatcccgagcacgttcatgcgcgtgttccagggcacgcgcttctgcctgcagccgccgggcgacacgtacacgcggcggtcggcgttcgacgccatgctcgccggctgcgtgccggtgttcttccacccggcgtccgcgtacacgcagtacaagtggcacctccccgacgtgcacgaaacctactcggtgttcatcgccgaggaggacatccgcagcggcaacgtgagcgtagaggagacgctccggaggatcccgccggacgtcgcggagaagatgacggagacggtgatcagcctcgtgccgaggctgctctacgcggaccctaggtcgaagctggagacggtcaaggacgccgtggatttgacggtggaggcggtcatcgagagggtcaagaagctgaggaaggagatgcacggcgccggcgcgtcgtcgcgactctcaacggcattaggtgcaaacaccaatggaggtttccaatcgagttagaccagatgacaaaaatagttaaaagggatatgatagttaagttggagagcaaaacatgggatttgaaggagtttgatttcatgtttaagaaaacgtaatttgatttcacctcaccgtacgtaggtggccgaatgctgaagcatgcgtgtctctattggttgtgggtaggctgaaataaaattttgatccgtgcttcgtggaaatggattttcagccgagaggatgtctctcgcatgccatctaacaaatgagctttgacatcacaaattaatacgtgatatatcgcttgaagttaaaattcaacccaagtcatcgcaaaagaaataaattaaactctaaatagttcatgtacttgtgtaagttgaatttaaatattcatgtttgtaaattgatatatcaaatactaacttctctttccatttgaaaaaaaaagcgtttagaccataagaaacgagtgacacctccttttggagaaaaatactttcccagtgcttcatacacagtagcttttgtaactagtgttatacattacgaccgctaggatctctttgattcggcaagaagattgcaagggctcgggtaggctgtgcatgggaaaagacttttcatacaaaaggaaaggattaattaaagagaaccagagaattgaataggtatggaattaatcttcttcatagcttttgatttatttggtaataaaaggattaaccgaccaagaccaggaaaggaaatggtggcagctcgcgagtggtggccggcaatcgacgagatatttaactatctgccatatttagatgtggcaattaactatttgacactagacccacatgtcatagacacgtgtggatccacgtgtcattaagataggggtggcaaatagttaattgccaaatctaaaagtggcaaatagttaaatgccccgcaatctacacgccttgagccatttaggcatatctttgatgtgccgccgctcgcttgtggccattgcgctacgaggagtaggcgtagtgaaagagaataaaactccgaccttgtcgtgtaacactccaatcgttgtgtgggccgttgggctttagcttttctattcagctttgggctttaattcttctcggacttttttattttctaaaggaataagttcacttagtgaccatcaaaagtgattgaaatctaatccgtaaccctaaaccacaaaaccggatttggaggacggttttgctgacgtggcgcctatgtggcggtattgaccgggtctcctttacaagtggcgttgaggtggcatttagaatttaaaaatatatgtgggacccatttgtaagtgacacattaaaaattgtgggacccacgtgtcccttctctctctcccctccctccagttccttctccctcctcgccgctccctctccctctctcctgcggcgggcggcgagggccggagcggcggcgggcggagacggcggaggcgcgggcgtggcacggcggcctgcgactgcgagcggcggagatgcgggagtggcggcggcaggcactggacggcgggcagcttcaccgcctcctcgccgacgacgaccaggcgtttgagcaggaggacggcggtgggaggcacacgcggcaggttcgacgacgacgacgacgtcctccaccgtccagattgggtgattggctccggcgtgctggcactagcgtggagcgtggcgcagctgggttgggtggccgggccgcttgccctcgccggcttctactgcgtcacctactacacctccaccctgctcgccaacgcaaccgcgcgccgcaccccgtcaccggacaccagggnaccgcacctacatggacgccgtcagatcatacctcagtaagtactcacctcctcaacaaacgccatttttttttctttctcatctccatcttgttggttaaacctgaacgcaatgccaaaatattttcagagtcctagagaggtgttccatgttcatgtgcggaatctcccagtacgttaacctgtggggcaccatggtcggctacacaatcaccgtaaccataagcatggtgtgagtaaccgaacagatcaccccaactcccctcccaactgaacttcgccatcggtcaggctactaaatttcgtctgtttttatttcc

SEQ ID NO: 2873 - DNA, 1807 bp, Oryza sativa
cgggcaacatcatgcggctgttccagaaggccaccttctgcctgcagccgccgggggactcctacacgcggcggtcggtgttcgactcgatggtcgccgggtgcatcccggtgttcttccacaacgcgacggcgtacctgcagtatgcgtggcacctcccccgggagcacgccaagtactcggtgttcatctccgagcacgacgtgcgcgccggcaacgtgagcatcgaggcgacgctccgggcgatccccgccgccaccgtggagcggatgcgggaggaggtgatccggctcatcccgtcggtgatctacgccgacccgaggtcgaagctggagacggtgagggacgccttcgacgtcgccgtcgaggggatcatcgacagaatcgccatgaccaggggaggctacgcgagatggtggctccggcctaaacaatctaggcaagcactagacgctcgacgacgcagactaagttaatgaattaaatgtaggatactcgatcaatttacagcatgtagaacgagttgatatcaatcatcagtttcgctagttgatactatcatatagatctttgtatacttctgtttgttccaaaattcgtttacatcaagatttgcacctgtacgccccacggccacagttgttgcagtttgcagattctgatccacggctgtacatgtacggaccgaatacgatcggttggaaaacacgtgccttagcacaataaatctcactttgtaacatacaacatatatactcgcacttcaatctgtaattccgttgagaatttcactgccagaaaagtggatcttcctctttcttagaagttgattgtaaaaaaccatccaaattaagtgttatcgtctcaataaatacttgtagcatctccaacaaaattgctatttttggctctccaaatatccatttaaccatcttgccaaaaataaatagagagatgaatttgtatttcattacaacggtctctccatatattacactctgtaaattgacaatgagtcccattttgttaggctctatgtgcttcttctccctccttccctctagatctttcctctccccacccatagtgacatggagaagcaacagcagcagccaacaggaggggcagaatggccttctctaccacctcaccggagctaggagggctagggctgtaagtgggtcagccgcgaaaccacctataggtcaaaataagcgggtttacggctaattttagcctataagtgggttttacgggttagccacttacaccctaaggagggccacctcttctgccatcgcatgatagcggggggagaaaggagggcggccatggaggtgaggtgaccggcaccggagaagaaaaggcggtcgacggacggtattggagaagggaaggtgacgacgatcctcttatggtagacggcggcgacaaaggcgaggtggccagataacaggcattgccactgccacgttgatgatccctagagattgagatagagtactaccagggaccaacttttatcttacactttgtgtacaagcacttgtactcagaaaaaaagtatatccatccctcaaaggaatgcctcttcgttttttcatgttcatacttttctttaaaaaatagtgagttaaatcaatatgtcactccacaaaagttcaaattcaacttatgcaaatagaaacaaaaataacaaatttaattataaatagaatatgcactcacatttaaatttgacatttttgtaattatatatgtcgaatttaaacttgtatgtttgtgaaatgatacatagcatgttgat

SEQ ID NO: 2874 - DNA, 3136 bp, Oryza sativa
cagctgtttctcttgtaacaaaaacactgtgcaacagacccggaaaaatggttgacatttattactccctctgtcccaaaaagactttaactttggctatgaatctagagaagcatgtccagattcatagtgaaaaatgaagtctttttgggacgaaggtagtagtacctaagtatctgctcttccttttcagataacagctatggtgccaaaaataactgcattgcaagaagcactgcccaaatctattggacttctttcatttgatggtggtatagcaggtaatggtggcagccaggtttttaaattacaatgtgtgtgttctgtttccgtttggcctgttaatacttgcccaaaagagaaggcaaagcatagtatatctgaagggaccatctatcatcttaggagcactcaagttcaattgaaatatgagatggcattggtgaatagcactccataatatatcttatctatcctagatattgatgctactcagagactgtattctacaattcttcaattgattctgtgaatgttgcgaataggtcttaaagtggtgttattagtaattatattactccctccttccaaaagtctaagtcctatttctttttgcaccaagaccaagaagcaattaattcattcaccatgtgacaaaaccaatgaacatgcaaccaataaacactaaaatggcttcttgggttcctatcaacaatttaatttagcacataatgactacaagtaggacttagacttttggaaaaatcaaagaatgaaataagtcttagacttttggaaggagggagtattatattgcacctttaaaggacaagtagttgctagtaaaatggtgtattgccaatttagttcctaaagtggtgttcgagtagctataaaaagtttgtagtcttttgttaagaatgggatggcctcaatttctttggacattgtggttattgacaggctcatttatagtcaccatataccaaattaaatattgttaaattccccgcacacttactactaactgcagcttgtgtatgtcataggttgtcagaagatagttcatgaaatattgacttgggaagcaaaatcagaagtgaaaactgaagttcttcatgatctcaaggaaattgggagtgctttgtattggatgagccttctggatattgttttggtgagcatatgtttgtacgcaacttcattagtttcttttctagtcaaaatggtgccctgccgtccttctctgtgctgttgcatgtaagcatgtgtcctagaaactaagcttatcgtagatattgaaaacaaaaacagtttagcggtatgtagagtatagtcttgcagtacacctactgagaggagttgagcatcccttggtctttgcacctaggatatgaggtagagaatccatattattacttagtcatttgtattttattgggaccttgcattatgaattatctctgaaagatttctccaggacaagtttgtgtctcctcacctcatgcagccatattaatgctttttttgtccaatctgctcactgttatgctgttcggtttataaacattataaattactggcctatgcggttttcccttacacaatggaagtcctttcaattgtggattttttttttattccagtcacatatttgttatgaagtactctcgttatcttactgacaagcatgctcatttttccagagacaaatagacactacacagttcatgcagtctgctccatggttgggattgattccaggaaatgatgggcaagtgaagcatgcatactctgataatactccatttaccactttgttaagtgctgccaccaatgcagttgcatcaagtcctgcatgcccaaatccatcttcatttcttgtcatggcaaagcaagctgaagctgccagtaagtgcagagcctatttattgaatcatattttcaaatgatagttttgtgttgaagtttttttttagataatggaactttattgaactcagccatgtgttgattttttttagtatcaaaaaagaaaaacaataagaaatttgttgtggacccgtgccctccaaaggtttggcaggaaatggctatctcaattgtatcaatggtgttatgctatctaaaccagttagtctttgcttgaatgggttgagtacgggtggcatatcatcctaattgttgttgaacactgagatttggttgaaatttctacaggtctactctacaaatcaaacctaaactctgggagtgtgcttgagtatgctcttgctttcacgagtgctgcgctggataggcattacagtaaatggagtgcaactccaaagacaggatttattgacatcaccacatcaaaggacttttatcgtgtttttagtggtcttcagtatgtaagtagacttcattatcaaatatctgttacagtatgtatatctatgtcatccatcatttacagaccttttagccaacagctggtaacaagaaatgttgggtgacaataaatagttttatggtaataaatagtttttcttcttttttttttctttagagctacttggaagagagcatcaatccttcgaggaaacaagaaatgttgggtgactctgtagcttgggctggctgtacaatcatgtatttactgggacagcagcagcattttgagcttttcgacttctcttaccaatttctcaacgtggcagaagtagaaaatgcaacagtttcactttatcaatattcagataggaacaaaagcccgaatttcttgcaggtgagatcatttcccgatgttctagatctgaagtaaaatgatactcataatattgtacttcatttttatttccgacattcatgatgtgcatgagtagggttacgagggtatccttgaagcgatgaggaaagccaggaggctcaataaccatgttttctccatgttgagagcacggtgccccctcgaggacaagattgcatgtgctatcaagccaagtggggcgcctcttcaccgtatgaagtttacgaacaccgtttctgcgttcgagacattgccacagagagctacttgagaggctattcggcgtgtatgtgtttccttccttcttttttttccttgtacgtgtgaggtcatatgttttatgtt

SEQ ID NO: 2875 - DNA, 10887 bp, Oryza sativa
cggctcggcccatcaccggcttgctcggcaacatctacaacgggcaggtccccttcgcgcggcccatcggcttcgcgacgcccaagaacggcgtcccgatccccaactccaatggcgccatccccacgtacaacggcaacaacggcatcccgctggacaccggcctctccggcgctggtttcctgcagccggctaagggcgcctcggcggcgcaggtgcagctcggccccgacgggctcagcctcgggttcggcaccatcaccgtcatcgacgacgtcctcacgagcgggccggacctcggcgcgcagccgctcggccgcgcgcagggcgtgtacgtggcgagcgccgccgacgggtcggcgcagatgatggcgttcacggcgatgatggagggcggcgagtacggcgacacgctcaacttcttcggggtctacaaggtgggatccaccatgtgcaagctgtccatcaccggcggcaccggcaagttcaagggcgcctgcggcttcgccgaggtgcgcccgctgatcgccaccgggcagcacgtcaccgacggcgccgagacgctgctccggatcagtgtccatctcgcctagtatagtacctggagtgctcgaccatgccataagttttgccgttggttctcacgtccttgggttgggttgctttgctttgggcgtttcatggttgcgctgtttgctccatgtgcaatgatcttacaagtgtgtgtgcgtcctctgcagggattaaactttatgaaagcagaaaaacactttagtattatggtaaatccatttgggaaagaaagttactttcatgtgcattcactgtaagttgggctccagtcattcatagcatattagcagcctcaatcacaacggtatttcacttcaacgctaagaagaaactgaattggaaatcatgatggatgtacattaacaacgagaatcttagattttatcagagaaactagcaagatgagaaactgcgtcctcaaggcgcgacaagtgtacagcaaacctgtccttcagctccgccaagtctgtttcactgagagcactccgcatgatcttgagaccgttctgtacaagcatcattccttcacaaattctatctggcatcttcctcttctttgtttccacatcattagtaactgaaacattctcaggcattccttcacaaattccatctggcatcttccttttctttgttttcacataattagtaattgaaactttctcaggctctggaactagaggaatttccaagcatgattcaaccagtttcttcagcattctcccctctgaaactagtgaacatatttgctcttcagaccatttgtcatctcgcaaggctacctctttctgaaggaaggctttcaattctgacataaacccatcctcatctatgtccacccctgtgcatgtgtaggaaagggcagcatctacaggaacaaatttccagagctgtgcaaaagaagtgcgagcggcaaagtacccaaaggaacccattgcaaggtgaatgagtgcccaatgccgctccctcagcaagaaatggaacagatcccacattgcagaacaaagtgggtttgcatcgtcttcagtagtgttcaagtgaccaagaattgccataaatgaagccattgatggtttgcactgagagattgctgtatttgaattatcaaaactggacatgaacagagtgtgcaactccaaagttaacttctccaactcactgaacgcacaaagatgcctcatgtgcgtaataataaccaatatggaactgatgtgcttgacaaggaggttcttactgctatcaggtgaagttctataaagattaatgagagaggtggcaatcttgaacatagtagcaatacttttttcatcaatggtaacgtcctttatttcgctgcataaaatattgtgtacaaaagaattgtttctttggttccaaaaataaaagcagcattttagcatcagactgaataatagtaagagacaagggacttaccaactctggaaagcagaggctagagcatgtacaggaaaccctattatgcccgaactagaagaagttggcaagttgatttctccatgattcttgaagtagttctgattctgtagatacccagcaaaagaagtgaacagtgtcttcacagcatgttcctttacaccacgagataatgaatcaaaaggaaatccttccatcaacagtgctaagtacaagatcgatgacttggaagagctatcattcagcatggtataaatttgatcaattgttgcagacgatgcatagctcaagatgttacatgatgcacgagcaagcttcctcagagcactgagaggtgcaagaacttcctctggtgacgctagagtctttaacagaagaaatagctgattgattaaataggttgaagtttcagcttcagcataatgcatgaagaaacaccatagctctgttagaatttccaagcaaaggaaatggggatggaaaaggttctcaagtaagaagacttcaaactcactccaagcagcacttgaagaagaagcagcaatcataaaagtcttcaaggcttgtataagagaagtatatacaggttgccagacaaccttaggagaatcatcatcactacttagtgcaggaatttggcagccaagtacatatgagtagacatcttccaacgttaaaatattaagaaacagatgtagcttcttacataattcaatgaccacctcttccctcaaccatggggaagcattgaggaagtgcaagaacacagtaaattcagctggtaaaagtgccctgtttatattatcaacatcagaatccacagaaaaaatgcaacccaatgtagcgaaattcattgtatgatcaacttctccggtgtactctgaattaccggttcgtactttttccaaaaagtactgcacgagctggcatttagactctggacttacttgtgatgacttcataagtgtgtctaacagaagaaaggaactaggctccaataactgaaaaagtaattcacttgctgctttcaactggggatctctgcagaacagaatacttgagtgtgaaatcagcagtgcacaccggattatgctcttgtatatagccattgtttcagatggatatatagaacaaatcctagcggcgttcgttaggaaatatttgattggtaagaaagcccttctagcttcagcggtaccaaggacttcttgtaatggtacacaccatctctcagtagcaaccctcagagattcaatggcaactgagataggaattaaaataatctctcttacattcaccttttcttctaccatccctttaccaagctgcagtaaggaaattatgcccttccatgatatattcagtaaaatcacctggcttccaccactggatgctgcatgggttcctattttacacaaggactgaatagtgcatgctgtaatctgggcaatgttgctagtaagatctgtctctttgtgttcctcagttgtctcttctttaggcatgctcattatgcactggtctgattttgcagcctcggagtacactctgcacagtttgatggtttcatctagaaaaacaggtgcagccttagcaacatgtcctgtagttccgagtttctgtcaacagagagcatagacaatgactccatttctacaatattagcatttcaatgatttgaaaagagcactaccatctcatatgatcaaagttggataaaaaaacataaattttagcctgacgaatctatgtattagtcaagggtaggaagcacttccaattaaaggatgaatttccaatattctcacagaaaacatctctttaggagtaaacaaaacttgtaagtaatttgaaacagataaggtctattgttattgtaatgtcatggaggtaacatatttactctagttggccattatttgctatttcccctttagatttttgttgctaagttactttcaggagatgaaggatatatatatgcaagatagcatataaaactatcttataggacataaatcaagcaacatgatcataaaaaaaaaggagagaaatatagatttcggtcatgcaagttaaaccacctgatacgaccattgtgtaatataggaactgaaccgttaccttgtcaagtattgagctttcagtcagggttagtaactccaaaataaagtcgccaacagcatgcacagtatcttcggcaatgcatttagatgcaacagggaggtgcttggaagagatatttaaggtcagtgcaattatctgcagtcaaataagttgaacttgtattggaacattctagatagaatcacagttacagaaaggaataaatgatgtaatgaatctccagaatgtagaacaattaagtataaactaatatgagctggtgaaaaaaatgtagtgattgagagtagtactgttcacttgcataggtctgcattgaaaaaaaatgtagtgattgagagtaatgtacaaatgttctttctgttattactgataactacatgtattgcaatgaaatacaaacagatcttttttaagagagagagagagagagagagagagagagagagagagagactcaaagcccttgacctcaggaaataatctggagtgttcttcctcttgggcatcttcagattcatcaatagattcaacagaccacaggagatgcctcacacaccacgaaccagcctggcataggtgcaccaaaaaacaagcaaatgttttgattggttgagccagaaagcagataggcaggcaaggtaggtacagctggcacttatgatgaagcaagactccatttggaatggcaacaagtacctttgaaccaagagtaagaaatggccccaagcaattggttgtatctaattctgagcatttaagagcaacctgcagaattgacttgtgtagcatgcagtgtgatacaccggaacatgtggaatcatcccacgatgcctaagatgttgtcaaggtaccataagaaaactccttactagaaaacactgacaacgtccactaagaaacaatgaatcagtgagtccatccgactggctacatatatcatcgtgtttctggatatatcaagtataccgagataaagcaataaaggatacgatcagactttcaaccactaggcccagatcatctgcacacaactgaaaaggatcctcgagttggttgataagggaaattctgttctccaaaacctgctattatatacagatcatgttgttattaatgcctggaagagtatggattaactagagcgcgcacaaatccccaaaccccaacggccaacacctacagaagttcgcggagattcatcttaaatcccacccagaaacatccattcccccatccccaccccccaaatctacatccattccactcgaccgaactctctattcgtggaaaccaatcacggccgcagcactcgaacaatgtatcaagctaaaccctagaagtggcctaacggagcaaatggggacgaggagccgcacgagcacgcacctcggaggacttgatggcttccacgagggacccgagctcgctcctcctcctcctctcctccgcctcctcgccggcggcgccgccgtcagcctccatttccctcccccgtctcggccgtgcacctcggctttcccgcctcctcccacccctctgcgcttcgtggaggccaatgtccaatcagctggagatccaggccgagatcatttgtggccgtccatgggctgaatcggcccattccgctccactttagccggttcaaacggtttgtcgcgactctcgttggaaacagttattcgcttggttgacttttgaacagtactacttctgatcatttatctcattgaaaactagtacagtagtaattgtcatacttaagttacttagcaaaaaaaccaaataaacgataattatatactcctattctttaataataggaaaggccaaccgatgaagcccttagttgtcatctactgtaaaaaaaaatgtgaaagtcatatattagtttacttaaatgccgtgggaatggctgaagattagcgtgccacctcagccgtcttttgcaaaataaaccccatgcttttgattaattacgtgccggtccttgctatgtccaccgtccgatcttgagataggctcgatctggccgtcacgttccccctttggcggcccttccacacccgtgggatcgttggatctctaacagacggtgtggatttcgccaacacgtccaaaccctagccgcccgtcctctcctcccccatgcgtgccgtctcgcccttctccccccatcgcgccgcatcctcaccctcctccttcctcgcgtgcgtcgtcgccgccgcaactccctcctcctccactccctcaacccctccactccctcaaccatctcgccgtgccgccatcgccgcctccactccctcaacaagccatctcgccgtaacgccatcgccgctccctccccgccagatctcccagtgaggagactagggccgccggatccggtgatcccattctccttgccggcggatccggcgccctagagaggaacgagagccgccgccctttctcctctttcatccctgccacgccactgcctcccaagccctctccaaccatttgattcatcggccttggcctccccctccagtggatccggtcgccagccggacggagtcagcaggccgccgccacaccctcttctcctctccctctccatgagcacctcgctcagtgccatgagaagggaagggagagcgtaggctcagccacgaccgcgacgaaggcaaccgcggctcggcgacgatggttgcctgcctgcctggtcgttcgttctctctcttttcctttgttgttttacctcagtgacatgagaaggaaggaagtgattggacattagttcttgatgattacagctttgatttgcttctaacgtgtgaggcttgatttagttacagtgtgtatgttatgtagaaaaatttccctctgcatgtacctcaacactgtcatgtgtgatcaaacttttttagcttgaagcaatgcacactgctactaaaatttctatatgctatgattattatttattcagtcaggaattgcatatacagctatggggggcaaaacgataatgttgataggtttatttgttcccatttgtgctgcagggtgtattttcatattcagatagttttggaagctacaagtacacatggcttacctcttgaatgtacatcaaaagagtttttcatatgctgctgtactgtgttcctcattttcagtgatgaatgctatatgctcgaagcacattcattacaggtatgctccacaccaatttccatatggtttatttttgttcatctactatatttcctaaaatttccatgcataaatatttatgttagctcgaaagaaatctgtaccgttatttgccattacctttgtacagttctttcattctgtaatcttatcttctcgagtggtattgatgtgttgtttgcatctgcttgaagtgcatacactgcatgcatgcttcagcttcacatcaatgttcatgtatgatcatctaatatatggtagcagcatttaactcagtgaagtctttcattctgtccaccatttttgctgctcaggttttttgttccaactatataaatgcctagatggtgaaaggaatttctctgtacaaaagagaatgctcatttatttaagtagtaaggcatcatattcttttagattttatagaatatcttagcaaaatttagagatattagagccaatccttcatgccatatttctgtacaaaacacgaagggtgactgatatcattcctttgagtgatgaaaagaaagatgataccatttttgagtgatgaaaacattatcagtctctagaatgacctttatttattcatgcttcatgacatgcctctattttcttttttattaggtcgcaaaaagaaatggatatggattgggtccatcatggaaacagacacaaatttcttttgaaggtacatttcaatttagtttgtgcatcaactggttcaatgggaatgttttcctagacatgtcctaaccgttgcgatccaatggtaaagcaatatcataagtcaatctttttaatattctgtctttcagttggtttgcttttacatgtctatgctcagagagagattatttcactatttagttcaccggtcttttttacatgttttttttcattaattgtgaaaccacacttttaaatcctaaaagttgtggagccgatctgtttcgtcaaactatagtgtaacatgctgcttctgtgctctacaaagctcattgtttccacattttatattacgccagctacttacaaaagggccagagaagaaaaaaatgggacctacctgaagaagtatgcaatgtagaactataaggcttatgttattgcatccatactttggttaagtgatcatgcatgctttcgctcgtaaactttgccatgtggtagtagcactttgtactacctctgcttcgaaaatagatagaacttctggtagaaaaattggtttcatgtgttagaactgtgatgccaggctgaaaatattatctctctatatataaatggttgatactatactattttagctgtactaacgttattaaaactttctattacctttgtcccaaaatgtaataacttctggccctatatcttgaaaggaatgtttaggtacacagctcaaaattgcaatatattttgggacagaggtagtatactttttttcagctgtactgatgtcactaatcgcacataacggaggattgttgttgactagggcatcggcatgctacacttgaaaaaaggtcattttctatctgttcattttagctttgcatgcatttaatagaaccaccagttggcatggtcttctctttgtagcatccaatagtccagtgtgattctagcgtatagagaaaaaggggtaccatgaaacctctgtaaactcattgtaattgacatgtaatttgcctttttttttctatttattcaaacttcctatacttttgatttcctcctttagcctagacactatttttttgtgtgttccaatttttcttacaagggtcgtttataggatatagatgaaaacatgaaccaacgctataggtgaatatagatacatattattccttgaacatattggacttcaattgattcgggcggcgcggcgtagcgcgcttctattgctagatactttacttaaacgtcgtgggagtggtgaaaatttaggccgccacatcatcaatttttttcaaaaaaacccttgctcttttcgctaatagcgtgtagatccatgttaacatggctgtcggatcgcatgctagggttgatctggccgtccacgtttcccggcctgactgcccttccaccatcatcagatcgttggattaggggaacggacggcctggatttgccaagaaccctagccgcctttgccttgcgtgcgtctcacgtccaactcggccgccaggcgctcttctcgcctgcgctgcctcgccctcctctcctcacgcgcatcgccggttcgccctcctcccgccgccgccataccgtcgccgcttctctccccagtaaggccgccgcacctgctccggcgttcggtctcccgccggtggatccggccacttggagccttggaagtgagggagcaagccgtcgctaccaccctctgctgctcttcttctccgcacctccatcgcccctctccccctctcagctccgctcagtgccagatccggctcaggggccgccggatttggtaggaggaggaggtagcagcagtgcagctattgaggagaaggaaggaggagggtcgcgacatggccattactgtgatgagaacggttagggctcggttaggtcgatggctaggaacgacgacggctagcggcttggtcaggtcgacggtaaggaacaacaatggctcagtctttcctacgttttttctgcttttcattttatttttctccgggagaggcaacctgatattgttgggctatttgcgctgaaataatatgacatcttgcctggatcacctactgatacgcattggagtcacatcgaggagcccagagtaaccttccgttctgtctttaagcaataacaatcccaattgtgaatttgtgatgtctaattttatatctctaaaatcccaattggcatgtccaagatacacggacgaagcaatatctgttcatgaatgtgatttgagcaacatatataacaagtaggttgtgttcagttttttttcctcggctcatatgggaaagactagggatgattttgatttatttattttcttattggtacttaaaaaaggatcatttttacctgtttacacatgagtgcttgcagtactaatacgaatcattgccatgggttaacattgaggcgattacgccacccaatttggtgagaagatagcaggtggaggttagcagggctgggcatcccttgcttcaggtcttgctgtccattcatgctgctaggacatgtatgttggtcctatatacccttcctcagccaccatcctgcttttcttttgcatctgttatgtatgctaaattgctaatttccgcatcgcattatttgttcttagttgtagctgtcttcacttagaatgcacatgcctattttcattgcctggtttcttcgttgtctatggtaagttcaagtcggttaatgcatatgtttgtgtttcggacttttttcttagaatcaacaatgttgtttagtgacacacattattttttcccctctactcttttagtttgatatgaaacacatttctcatacactccctccgttttttaatagatgacgccg

SEQ ID NO: 2876 - DNA, 6522 bp, Oryza sativa
gtcatctattaaaaaacggaggtagtatttatttttattcttagaggtaatagtatgcacacaaactgagcaggtattcttttcaggctcttttgaagaggttaggtgtttttatgtgatctctgcaaattattgattctataatgaggttgcgtaaatatgaagtatgatattatctagattccaattacattgtgggacatagtaattctcattgctattgtaggccatagtgtattgattcctgtgcatcgcttctttctggagttcagttaccacgttggtgcttcatatgcaacagcatggaccaatttactatgccatgtcctaagaaggtttgtgcatgacaagaaggtatctaagataacactctttcgttaatgccaactgttaaacatagaaatcaaagtaatttattttgctaccatttcctttaggtggcactcacatattgttcaattgtactggggacattaggctttattactgttattgggatcaatcagatatgcgttttctgctggttttgctcatggctatgtacacaagaaattttagattataaaataaatatgatggaccaatgtttccagctactacttccggtgtacatccttttttattatgtgtcacttcagatttggtctttgttcaaacctgcctataatatcaacaagaactaaaactgaaagatttcaacaagaatcatgtacttgcaaaaccattgttcaaaatccaagatttcatccctgaagtgttcgtttaaaagttaaggcaattttctgttccggattagcctttcggcctgcatcaatggttttaaacaatctggttggattcagttgccctatgagttacttttgtagtactgatgaatctgaaaatttaccctgagttctattgggttctaagttaatccatggtgtattcattcaaagttggcatcccataccacataccgctgagataatatattgctagtttggtggaactatttcactgattatcatatgttatcacatattggttgcatatttgtgcaaatggctgaaacaattctatttttatttaatcgctttgcctttcaagctatattattgtttcagactttgtgatgaactttcttgcaagatatctaaagcttatctcaaagttgataagttatgtactaatttcagtattatgtttgcttttgtcagggctagagaatatatgcattagtgtacttgaaacaaaacagggtagagtggcccaatggcactatttgtctttccaaatcgccactatgtcagtacagataaacgaatagaggtatgatcatttgtatatggtttagatttttcaacaatattgtatcaaagtattgttttcctcatatcttggactgtagtatgtccttgcaggatgtaaatgttaactcaagttacatttcatgaacatatttggatctcttttttgtccacacgcagcgtagcgcgtgtctattgctagtagtaattagacacagagtagatatgttccaaaggtggtgagaattaggccttgtttagttgaagaaaatttttaggcttggttgtcacatcggatatacggatacacatttaaagtattaagcgtagtctaataacaaaacaaattacagataccgccaggaaatgcgagatgaatttattaagcctaattaatctatcattagcaaatgttgactgtagcaccacattatcaaatcatggcgtaattaggcttaaaagattcgtctcgtaatttacacgcaatctatgtaattggttttttttctacatttaatactctatacatgtgtttaaacattcgatatgatttcataaaaaattttattttcggaagtaaacaggccttactaatgctagatcgatctgacagaggccgttgaccattgattcattgaattaatactcctatctccaggagtgtgaatacggtgtggtgtccagcctctggatctgtcggtaagacagtaattaggagtgcactagaagcgcactaggtcagtaatagcccaaacctaaacggctagaagtattgacgagttcgtcgcatctgcattgtctaattttttttttcgagacgacacgtgttcttacataaatatatatacgctcattactataaacacacatagtaccgtataagcatattaaaagatttattgaaaccgtattgttttgatatttttgaagttgtcatagacatctcatcaacaatagccaaatgcctcgaaaaaaaaagcgccaaatgcgagcacccgtaaatgcaatgcctagattttggtaagttaactaaggctgtattcgggaggtgagatggggaactcacctcctgtgcatgcaaaatagagcgacgcattttcttatgattaattaagtatttattttttaaaaattatattaatataatttttaaagcagcttttatatagaaaattttttaaaaaaacatatcatatttagccgtttgaaaagcgtgcatgtggaacacgaggggtgtgagttgggaaactcaccgaaaataatacaacctaattactccttgaaacagcgaaccatcattttcattcggtggcggagctagacccggctaccatgggcaatggctcgggctccgcctggcaaatgcagctatgcatccatagattaacacttaattagcttgctaattacattgcttagttcactactaggccgtatgaagcaacaccacatcgacagatgtgcttaacacaaacttataaagcaaatgctcatgttaaaatgatctatgtattatatagacttgtatattttttttttgtttgctaggtttgctcgagctcataaaatattttgaatccgccactgttttaattaaatagaggagtaaaactgtacaagtgtacaaagtgaaaaaggagataatgtaatgctcaggaccttcagtccgagcttactaaaactctagacaactgccgagatgtaataccgttgcttataattcacccgtaaatgcattggctagattttggtaagttaactaattattacgagtcttagtttttgtaatacagccgcttgtaatttactgtttgtaatgcgagtacaccagtattttttttttagcaaaaccgatttcttttacttatatttgagagtttgaaccgggctcgcagatggaatcggagagacatctgccccgtacccgtacgtacgtgcgggcgtgccgcggaaaaactccccgattccgtcgaggagtcgatctcctccaccgcgccacacccacatatacaaaatctcgatcccgctcgttcaataacgcgtccgcgcacggcgacacacccgatggatcgcgagcggcggcggctgcgcggccgcggcgggaacaacaaccacccacggcgcgtcctggccgacgtcgtcatccgctgcgaccccacatggctggtgacgatcctcctgttgtcgcttctgctactggggaaggcgacggggaccacggcgacggtggtcgtctccggcagcatggagccagggatccggcggggcgacatgctcatcgtacgggagcggcgcaacgacggcgacggcgacgacaacatccgcgccggggacatcgtcctcttcagcaccgaactccaccccgtccccatcgttcatcgcgtcatcgagctccacgagcgacacgacggcggcgcgaggcagatgctaacgaaaggtgacaacaatggtgtcaccgatagaagctccctctacacggggcagtggctgcacgatcaccatattttgggaagagcagtcgggtttttgccttatcttggttggccgcgttgcttgatccaagattttgtacttgacaaactgaatttgtgacgccggtaggcaggtttagtggaagctttgagcttgtttcaccgatgattgactggcttgtgacttgtaatgcgagccatttgaagttgtcgtagtgcttgtgggtagagatatgcaagtgtaccggcccgtgaatacaattgtaggccaaaaaaagtgggtaacctgtaggttctcagtcgtggttcggcttgctgcacggttatgggcaattagaggttaataattagttgtgtttctttctataaggtgaaaccccacgcattgctgcgggaatttagtatgataacaataaaaaaacatgtaagatagctagataacatcagattaagtaaattaatatggtttataataatttaaatttaaatagtatgtagaatggtgattcaaacgtaaaaagtaaggtggtatgactttatggaagaataaaattaggaagatagtttggaccgtagattaatcatctaaatgctaaaaacaattgatgtgatatgacttatttagaggaaaaaaggagaaagataatttagaccatagattaatcatttaagcactaactaagtgagaatgaactatataagtatataggatatcataaaacataataaagatatacattgaaacattattttcaattatgtgaattatgttggatgataatttaacatgtttgtatttgaaaagctcttaaattataaaaactataaagatatagcatatttgcatgatgtttaaatgtgatgattgttagtggatgatgatgtggcatcttgttaattagtggatgatgatgtagcatctttgcatgttaagtttaaagagttagtgggggataattttatagtaagatatgatttctctgtctttttttctcttggagagaggtgaaaaggagaagtaggttgtagaaggaaaaaagatatacagtacatataaaagtttttcttacatatattttactttgtcgtttcggtaatgaatcttgattttttgaattcaattgttgagaactttataagagttctataagaattatttaagtactcataacattactcactgcagtatgtatcaccagcagaccagctctccactcatcaactctttctcaatacaagtcgtaggagtgaatgtacttaagtactagtgtcagaaaagaatgaaggactcttgaaacaaaactggaaccagaatgccattttctggctaaaagatccgaaacatccaatgggagcgcagacgaacccactgagatactggctcacgtggcacactattcatcgcaaaaactagcatgtcaaaaaatacattcgtattcagcatcaactggtgctacaatattatacactggtccgagcgcgtatgtagaactgttagtgttgacatcttaaacaaatatgaactctcattaaacaatcaatcactggtaattacactggtgcacgtctgtacaactgttgactgtgtatgtcacacttcttttgagccacaatttaaacttatttttaactcgatgacatgttaaacaaatatgaactcattaaacaatcagctagtaatttaatgtctcccatgcaggtgctaatatactgcactctctgtcaactctgcaccgaagcaagtgtgcgcaattcaccaacttggagattagtaacaatttgagcataggctctacagtctcggttagtccccccagatctccattgcagcagagtgtcgccattgcaagggtgcttggtgaagcgtcctctatagggatagtctttgggtcttcgtcttcctccaatcagttctcgagacattggtgttgctgcagtatatattctacactcgaaatgcatattagagtgggcagcacgatcagacaagtggtgagccaaagctgcttcacatttttcttccttttgatcgaattggtctctcgcttgcatttcactccatggatagacgtgcatgaggtttagtgtggtgattagttcttggatcttgaatcggcagctgatcaaatccgcgccgaaaggcggtggtcggcagcaacgccgggcgaaggggatggagaaggtcgcggttggcttgttgccgccgctgcggttcatcgccgtcctcgccgtcgtgtcgtggacgtcgttcatctactgccatttctccttgctcagcggcgggttgctgctgggccacggcggcggcgacgacggcgccgacccgtgccgggggaggtacatctacgtgcacgacctgccgcgccggttcaacgacgacatcctccgcgactgccggaagacgagagaccactggccggacatgtgcgggttcgtcagcaacgccggcctcggccggccgctcgtcgaccgggccgacggcgtgctgacgggcgaggccgggtggtacggcacgcaccagttcgcgctggacgccatcttccacaaccggatgaagcagtacgagtgcctgaccaaccaatcggcggtggctgacgcggtgttcgtcccgttctacgccggcttcgacttcgtccgctaccactggggttacgacaacgcgacgagggacgccgcgtcggtcgacctcacgcagtggctcatgcggcggccggagtggaggcgcatgggcggccgcgaccacttcctcgtcgccgggagga

SEQ ID NO: 2877 - DNA, 898 bp, Oryza sativa
gccgacatggcgcctacgtggctgccacgtgggccggcgggaggttgaagaaggcgacggccggaacggacagcggacggcggctgcaaatggcgggacgaaccacgacgatacaggcaaaagcgagcacaccgggtggttgcacgagacgaggggagacgagccaatggctcggattcgccggagggagttcgacggcggcggattgcggcggcggcaaccggcggcgagaaaagagggaaacggcaacgacgcgactagggttcgattcctccggactagagcatctacgcggccaccgtagtccgtttctagcatcggattagacggagacactacaagagaggccggcgacgtgcgggcgctacggagcacgggcggtgatggcggcgagtacacagcgagcggcggtagcggtcggggcggcgccagctatctacggggaggctatacgagcttctaccgaaaactaaggggaagaggacgaacgaggagggagaacggggaggaggcactaccgtgcggggtgaaggggcgcaatgacgatggccgacggtgcggggcgtgatcgctccggcctcgggccggggaagaggaaggagagggtgcgcccggagtccacgtcacgcgtcctcgctcgtgccggctcctccgacacgtgcgacgacggcgaacagggcagggcgcggcaatggcgagggcgaaaacggggaagattggtttggggaggggctcgggtttatagggcggcaatgtcggtttgggagggaggaaccgacattgggcggtcaagccagcgagctggctctccgactagcggccaaaacgacgacagggaggatgacgctggcggggggaaaaagaagaaaagaaagagggaaaggagacttgactcttg

SEQ ID NO: 2878 - DNA, 6562 bp, Oryza sativa
ggttggttggcgatgcgtggcccagccgccgtgcgtcccgctccacggaccaacgcttccgagcccccgatgcgcgcggccctaggcacgcgaagcgaaccgtgtcgcgcggtgatgccctcgtacgcctcgcgggccgtggtcgcctattagccgtgatgcggctgcactcctcggacgcctcgcgtcgcaggccgcattcgctggacggtcttcgctgtcggcctgcggtggaggccgcgcggccggcacatgcgaaattggcttccacggaccgcgcacggagcgggccgcatggctgtatgggctggcggagtttacacgcctcttctgccgtgcagcttgcggccatgataaaccgaggttttccccctttttttcccctagatcagacatacttgtgcagttgtgcggtgggctatggttgccaacgctgaggtgcacttcggtgagaatctgaatggattttgaggataaaaccgagctattattgaaggttttcagtaatttgttgttgtaatacaaatatttaagaaatacaatctcatacctttagattacatcatatgtcttgttcaatgactataaatgaaacaacacacttatcctttctttcttatatagttacaatcactgctcgcaaaggcatgatatggagaatgcatgagccatataatgtgatatgcacagttcttttttgtcatctattttattagcaaagctgatgagccctcgcctagtttcttttgctgttgagatccaatcccattttaataattataaatatgatttttttagtgttgacaatatcataaatctctatcaagtaaatcaatcatatacataagtatcacaacaacacgtgacggacgcaactttacaatatagatggagcggtgaatagatatgttctcgctcgacaagagcaattgaacccaacacatattgtattaatagttcattcgcataattgtctcaatctattgggtgttcacagttcacatattgttttacctatttttgatggtccatgactactataaaagggtagaggggtcttggagtcgtggggcgacacgggtcgtagctgggtcaatcgacccaccccgcctaatgggtagatctgccctttgacgtggtgcctttctctaactttagagataatggttttgttcggtagccattgctgcacaaccaaaacgctgcaccccaaatttacgacaactggatcagcaatagaaacattgtttaagttgctatagcccaaccacattaacaagcttccaaacagagccaatatagcacgttctcttcgaaaggacatagtaaatgataagtagcatatttttcccgacatagatatgacaaacaataattactccttacccgtaaacttaaaaactacaaatatccgctttaattttctaacgaattgtataactatttattccttagattcctaatagatacgcaataatgaaccaacacaaccaactccctcccataaatatttgtatgttgttttgccgtcagacttgctcacttagtacctgctattttttaaggtgaccgtacatgctgactatttgttttttgaaaaatatgacgctataaatatagttactcccgttgtccaatactttctcgtcagcaacacaatatttcgttaggaagtggattgcatgatgaatccttttgcacaattgtttggcctactattttttacaattataactaatttaaatttcaaaatgttacaaattagagattagaaaggccaaaaaaggcgaaccgtaacagcccaacaaacttcgtctatactcaatagttaagtactccagggagtattaagcagcacccaaaaaaggacaaaaacaactgcaaaaatcgagtacagttcaatcacagcaagaaactccttgtaccctgatatgtcacgaaacgcattcaccgctgcgtacaaaacaggatgcataaaaggatagaaacggcaggcggcatcatcctcattcattcagttcttgttttggccacctggggcgcgtttccactgcttaaaccttaagcaaaccctaatggaaggtgctggttaaccaaggggggcgtgtttagtgagatgctaatacatccaaatcgtccagggagacacagtgcttgctagacacaaaacttaagaaccaccccacccccacgtgaacgccatggggtaattaccatcgttaaaacctatggatttctcgcatcatcgcaagaacccagacaaaaatctcttgctttaacttgcaaaccgaagcaaaaaaccccaaacaaaaaggggtaaaagggcttgatgataaaaaggccaggggatcaaatagaggtgccaagaaaaatcgaataaaaattttccatttctttatcccccgagtcgtgacggcggcggcggcggacatggttggtgataaggacgcggcggcgctggctggagagctgaccggcgacgcgggcgccagcttgaacggcttctttgaccacacggtatgcgtctctctctctccaatccccgtgtgagaggttgggttgccgtattggctaggtaggcggctggaagttttgattttttgcgtggttcttgcagggtttggagtcggcggtggtaggggaggggcaaggggaaggggaggaggaggaggagctggagtggctttcgaacaaggacgcgttcccgtcggtggacaccatggcggcggaggtggagtcggcggcgcccggggcgccggcgcgcgcggcggtggggccgaggaccaagggtttgcggcggcgccggcgggtgactgctccgtggagcctggcgccccttctgtcgcgcccgcgtcaggcggcggcggcggcggcggacgcgggggcgccgcggcgccggtgcacccactgcgccgtggatgagacgccgcagtggcggctcgggccggacggcccccgcacgctgtgcaacgcgtgcggcgtgcggttcaagtccgggcgcctcttcccggagtaccgcccggcgaacagccccaccttctcgccgctgctgcactccaactcccaccgccgcgtcatggagatgcgcctccagagcgaggaggacgcctcggccgccagccgcgtcaacgccaaggcacgccgcgccgagcgcgcggcggcgcgcctcgccggcaaggacaagaagtgatggaacaaaaaaccgttgcctcttccccggcggaggcgaagttggacggagacgattagcgcgtgtcatctcatctccttttgcatttcttttcaatttccattttgtagaacattaggattagagagaggtttaagaacatctgccaaatcttagttcttggcaaggaaagatcgacagacatcaaagcagcctctcgtcatgctcaatttttcctgaaaccatggcaaccttggtgttgtaaacaaagcaagcggtgaaagtgctgttgctgtttttgcttattaggtccctcctattcctggtagtagcagtagcaaaggcgatcaacatacacagcgtctgaatgtctgaatgcgacgtgtgtatctatgccatcatcggccgggcaagccgctgctgcagccttgcagccgaaacaattttgacggctctagcagtctaccagttccatttcttcaggtttggctgctggtagtaatggtagtatggtagactggcagtagaacatccatatgcatatatccatctctgtgtgaggctgaggcaccggcaaggaatgaaaagggcactgtacttattacccgtcgaggcacagtggcgctgtgctggttgtcgattcgtgtcgccgggcaatgatatgttctcatttcatggggtgatgctgctgcagccgcgttgccatggcaagaagcggattaactagttcgttgcctgaacgaaaacgacggtgagagcaatcctcacatggatggcgtcgaccgggagaggcgcaggtcgcgtggtccgcgaactacaggtctacagcaacaacaactcgtggcgctgggggactagctggtgtgtgctggtgcgtagtcgtcgccgcgcagcgcacggtcggtcctgggcatttcgtcgcggtagggggcgcggcatctcaggggcgagatgagatctttatgggtggcagtggcggtacggccccggagcacgtgatggcggagagcggagaggaacactcgcggtctcgcaccggccagattgttgtttgcttgggttgggtacttgcgttgcgtaccaccagggcgcagaaaacaaatgggacaagatcgctagcatacccggatgaaggcggctacagcctaccgtatgtgagatcgcactctgcttatgattttttgtgtggcgtacttcccttttattttttatatctagcagatagttatactccattctctccaaaatatagctcttgtttcaaaagagagcactctctctaacttggaatgtaatcgtttttaggcttgtgcgtaggtattaaggccatgtttcttttagcctatgattattataatctagattattaaaccagattactgtaagctggattataataaactgacatagaataagctgtgagttgtttgtttgtctagattattggaggcatggattattgggtttgaaaggctaaagtctataatgccctcagctatctattcggttgatggtataggtgggtaatttttctcaattatgtaggggtagtgggtctttagccactcaataatctgaaaaaagctcctctagagcagcttattagattataataatctggcttatagattataataatttgctataataatctatttgtttgtttcagcttactcctaataagctagattataataattctaaactgaatcaaacagggcataagaaaagtagtaagaagaccatactatcctatatagggtctgttcggcagtcgtgactgtggctgtggcgcagccaacaacaacagtgccgcaagcatcagtgtaacgtgcgactgttgtatttgcagcgcggtcttctgaacacacccataattattcctaaggatcaattagtaatttagtatgcactgctaggaacttagtggtgccaacctatttgctgtcatcttcgcacacacgcgtgtgatgcattggcgccagaaattgaagatgcaagagctagggttaaacacattaaaaactcactaactaatcacaggagatgaacaaatcaaaatttgaagtactaggcagcaaaaccatatgcgcggtaatataaatgagaggggactacatatatatttattgacaaattttttcctaaaaatttaacagatgtaattatagtataattgtagtgtaattacactgtaacttatatgtaattacactgtaacttgcatgtaactacagtgtaacttatatgtaagtttcacataattttgaattgttagatctattacaagatttgttttggtgaggaagaaagcaaattatagcacacgcatatgtgaaagaatttgttcccacgaccaccattttatagaaataacatgttacagagagatttttaaaaattacatacaagttacactatagtcacagtgtaattacatgtaagttccagtgtaattacactaaaattgtactgtaattacatctgtcaaatttttgaggaaaattttgtcgacaaatatatagcaaaatcgaaatgagagatagtaaaaaaaaatcactactcataatggcacatcacatcaataatagttaatctatcgtcttctatttagattatgcaatgtatgagtaagaatttaattgaaggcacaaatcggttgttcaattttttcaaagaaatgaaacacaactcttaagtttactatccttacaatattcacaccagagtaatacttaatcacaaactaatattagcaaactgatccaacaaccaaactaaagtctatatataacaaaaatgaaaaaaaatacttgttatttcgttaacaaaaaatcaaagaagtaatgtttatgaacatgtcaataatcagctctctttgaaggtaaataattaatttgatgaaaaaagtttttctcaacaaagtaatagtcataaaaaaagcaatatgatcaacacaagcatagctaaaaagtttagaacaatccgtagtaccaagacgaaagatgatgacatacccatttaaatttgctaactaaatacatcaaatattgagtatccataataaactagtaaacaaagaaagcgcaatatactaaaaacacaaatatgaattacacgaaaacaaataaactcaacttttctttttccaatgaagtgaactcaaagtcaccctgaccagaccgaccctgacccatccaaggaaaccgtcggtcggtctcatcagacacgcccggtgcaccaaacacggaagaaaaacctttcctctttccacggttctccctccctccctccccgatccactcctcccactccgcccgccgcccgccgcccgccgcttgcaccaccgccaaaaaagaagaaatccatcgcccatgcaaccctccgtgcccg

SEQ ID NO: 2879 - DNA, 1868 bp, Oryza sativa
atctgccctgtgaaccggttgttccggaggctcagcgaaacgagcctctggcacgacgcgaggctggccgggatcgcgccggatagccggttgttcgacaggtcgagggccgacaacgacgggcaatcggcaagctcgtccggcacgccaccggtcagctcgttgtccgccgccgcgaacgtctgcagcgcagggatggacaggatgttcgacggcagcgccgaccgcagctggttgtgcgagaggtcgatgaaggagagcgacgtcgagagcgccaggtcgtcggggatctcgccggacagctcattgccggcgagctccaggcgctgcagccgcggcagccgcccgagccccaacggcacagtgccgttgagccggttgttgtgcgccctgacgcggacaagcgtcgaacacgtcgtgagccccgcggggatcgcgcccgtgaagacattgttgaacagtatcagcttcgtcaggttgccgctgtcgcagagcccggcgggcaccggcccggacaaggcgttcgtcgacacgtccagccactgcagcggctgcgctttgccgagcgacggcggcaacgggccggtgagtgagttgttccacagctcaagcacctcgagcttggggagctcgccaatgccggccgggatgccgcccttgatcttgttgcacatcaggttaagcagctgcaggttagtgagctgcgccaactccggcgggatcgtgccggtgatcgcgttgtcggagaggtcgagcatgatgagggaggagaggttgccgagctccttcggtatctggccgccaatgttgttcttgtagaggtaaacggtgttgaggtacggcagccggccgagctccggcggaatggggccctctaagctgccgatcgccatgtcgaggtactggagcttggcgagattgccaatggcggccgggatcgcgccgctgaactcgttgtacccgatgatgagctgctccaatgacgagagctcgaacagctcagccgggagagcgccattgaggttgttgcccgagaggcccaagaacttgagcttctggagcttgccatacgtcttcgggatgccgccggagaagaagccacccctgaagtcgagcgtctcgagcgcggtggcgttgccgatgtcggccgggagcgggccggcgaagttgttcccggacgcgttgaggtgcgtcagcgaggcgcacgccccgaggccggccgggaacctgcccttgaagttgttgtcgctgacgtcgagctcgcggagcgtcgggatggacacgagcaccggcggcagctcgccgtcgaacgcgttgctctgcaggacgatcgaggtgagcccggcgaggccgaggatgtcgtccgggatggcgccgctcaggttcatggcggcgaggttgaggccggtgaccgcgccccgggcgtcgcagcgcacgcccttccatgtgcaatgtggcgcagagctccatcctttcagctcccccaatggatcgacgagagacgccttgatggccagcaacgcggcggcctcgtcaccggcattgcacacggcaatgcagctcaagagcgccaagaaggagaaggacaaggtgaagaacaagtgtctagcacttgtcatgctcggttcttctgttcctcccttgtcctctacactcctctggcccctctctctctctctcacacacactgtttctagttttgtgttttcattgccttgtttgaagcaatagagaaatggagggaaacttgtaggaaggtatataagaggatgtctatgattaggattggattaatgcattaatctatgtgtttggagacaataaaatactactttggggcatgctaatgcattggcgtgctaatgtgt

SEQ ID NO: 2880 - DNA, 1904 bp, Oryza sativa
ggccagatcgggcagcttggaggcggctgcagcccggacgcgccggcggcgggaggaccgccggcccggatggcgtggggacagccggccggacttcgcctccgccggatccgacggcggcgggggcaggaggggcggcggcccggatggggcagaggcgggagaggcagccgcccggacggcgtgggggcgacggcggcccagcgtccctgcatcgacggcggcgacggcggcaccctccccttccggcgttggcgtttttgtgcttgtgatgttcctgtgttgttgttgttgatgaaatatgatcttgtgatggtcttcttgtagtagtgttttctcttggaatttgtgatgatttccgatctgtatttggattgagattgagattttgtttttgggtttgattggatgcgggatttggagaggaggagcgcgtgaggttagagaggagagggacgaaaaactggtgtgacgaccagaaaaatacaaatatttatactagttatagatctaacgattcaaaattacgtgaaacttacatacaagttacactatagttacatgcaagttacagtgtaattacactacaattgtaatataattacatccgtcaaatttttagaagaaaattcgtcgacaaatgtatagatggtcccattgatttcctttacatcctaaaattgtaaaaaagtataaacattgtttacatcaattcgtagcccctgaacaggaccaaatgtaaatcagaactatgtaaaaaggtagcagcagattacaagaactataggtacaaaaacaaacacgtccgctaatgccaagtattcgcgtctgtcacgtcagatcctccggtgaaaaaccaacttttctactataggtaaccggagtcgggcgacgtcgtgaacaccggcttgtccttgtccacgacggtggcggccaccgtggcgctgctgctcttccgccggggcttcgcctccccgagcatggtcaccacgtcgcgcatggtgggccggtccttgggtgacttggccgtgcacagcaccgccacccgcagcaccagcagcatctcctcccgtacgtggtcgacgcggccgccgacgctggcgtcgagaagctcctccaccccggtgttgctgcgcagccgctccctgatccacccgacgatgtcctggctctcgccgtactccggctcgatcggccgccgtccggtgaggagctccatgaggacgacaccgaagctgtagatgtcactcttctgatccaccttcagcgtgtacccgtactccggcgcgatgtagccgtacgagccggcgacgacggagacggtctcgtgggcgcgcgccatgacgcgggcgaggccgaagtcggcgatcttggcgtccatgttgtcgtcgaggaggacgttgctcgacttgacgtcgcggtggatgaccggcggccggcagtcgtggtgcaggtaggcgagcccggcggcgacgcccgccgccacgttgtaccgcgacacccagtccatcagcatcttgcccttccgctggccgtgcagcgcatcccacaggctgccattgaccatgtactcgtagatcaccatcgtgtccaggttgttgctcacgtagcccagcatgcgcacgacgttccggtgccggagccgcccgaggagcttcacctcggccgcgaactcgcctcccgcctcgacgtccgtccgcccgtccaccgtggtggcctcctcggggcacccggcggcgcgccacagcttcttgacggcgaccacggcgtggtggcgtggcatgtcggcgcggtacaccacccccgtgccgcccatgccgacaatgttagcctccttgatgcacgcgagcacctcggcgctggtgaaactcaaccgctggaacgccgtgaggcgccatggccac

SEQ ID NO: 2881 - DNA, 6897 bp, Oryza sativa
ggcggacaccgccgccggcgccgcggcgagcattgcccgcgcagaacttccgctccccgaacccgagcgcgtctccgatcccgcggttcccctccctccgcctgccctcgtctcggagccgccacctaccaccgctactgtcgccaaagtggaagatgaggagaagcccacggccgtcgcccaccaggaggcggcgcccagggattacgcgttccagcgagcgctcaagaccgcggagaacaagagcgacccgtgcggcggccggtacatctacgtgcacgagctgccgccgcggttcaacgacgacatgctccgggagtgcgagaggctcagcctctggaccaatatgtgcaagttcatgagcaacgaagggcttggtccgccgttgggcaacgaggaaggggtgttctccaacaccggctggtacgcgacgaaccagtttatggtggatgtcatcttcaggaaccggatgaagcagtacgagtgcctgaccaaggactcgtccatcgctgccgcggtgtttgtgccgttctacgccgggtttgatgtggcgaggtatctttgggggcacaacatttcgacgagggatgccgcgtcgctggatttgatagattggctgaggaagaggcctgaatggaatgtgatgggcgggcgtgaccatttcttagttggcggcaggattgcgtgggatttcaggcgcttgacggacgaagagtcggattggggcaacaagctgcttttcatgccggctgcgaagaatatgtcgatgttggtggtggagtcaagcccatggaatgccaatgattttgcgataccatatcctacttacttccaccctgccaaggatgctgatgttttgctttggcaggatagaatgaggagcctggaacgaccatggttgttctcgtttgctggggctcctcgtcctgatgatcccaagtctatcagaagtcagcttattgatcaatgcaggacatcaagtgtctgtaaattgctggagtgtgatcttggggagagcaagtgccattcccctagcgcaatcatgaatatgttccagaactctttgttctgcttgcagccccaaggtgattcgtatacgagaagatctgccttcgactcgatgctggctggttgcattcctgttttctttcatcctggttcagcgtatgtccaatatacgtggcatcttccgaagaactatacacggtactctgtcttcatccctgaagatggcgtccgtaagggaaatgtcagcattgaggacaggcttaaaagtatccatccagatatggtcaagaagatgagggaagaggtcattagtctcatcccaagggtgatatatgctgatccaaggtcaaagctggagaccctgaaggatgcattcgatgtttctgtagaggcaataattaacaaggtgacacagttgagaagagatatcatcgaagatcatgaagataaagattttgttgaagagaatagctggaagtatgatctgttggaagaagggcagaggacaattgggcctcatgaatgggacccgttcttctctaagcccaaggacaagggtggagattctactaatccatctactaatgctgccaagaactcctggaaaaacgaacaaagaggtcagaactaaaatacaggtagttagatatgtgatcgaggaaaggaactagatatcctctctagagaagctccttgcaaataccttgcccatatgtcaaagatcctccaacgcagtagctctgatgatcatgtatgttcttgatgatctagcccctacaggtgtaagtggtggtagaaaagatgcttggggaaaaaaatgcacggccttcgagttgcccttataaataccatttcacactctatttttgttttgctttgctcaataatcctttgtaagtccttacgggatttataggtatatcaattttgctgttgtttctgttttgtttgctttgatctgtatgtgtatggtttagaatttgtgtatactacctttttatactcacaattagtaagcaatcaaagagatttttgtagatatgacttttttcaagcaagatataacttttgtgatcgcacatcatgcttcagaaggatgcatccttgcagatttgagatagctctactctattgtaacctaatggcaacaggacatttatttctgtttgttcagttgtgtagggctgggccgctccagttaaatgattgtggaagcctaaagttgtcctattccaatagctttaacaggctatatagttgactatacataaataacaaactccattgttagttacctccaactgaacttgcttgccaatgatgagctaaataaggtagatgctattgtctatcaaacagtgatagtttttgaatggtcttattattgattattactactccctcttttccatattgtaaggtgttttttagttgttacggaacagagggagtaattgcttctaagctttatctagcactgataagatcgagggttcttccatcatttgtcaatgacttcctcagttcctgttcatggctatgtgccaatgtatcctgccagatagattgtttgtatcttgcaagaaactcagatctggccatgtgggatcaacttttggtctaatatctgttacttcatattcagatttatctggttgggaatttagagattattggtgtcatcatggaagtgtagtagtgaattgatttaacaaaaaaaatatttattctgttagtccatttatggcagcgttggaatgaggatgtgcttacctcttctctatgcttgtggtataggttgatgaacacatcagggctctctgaagaatgaagtagaagaaattacagttctaattcaggtatattctcgcaaccctgctagctttgaaatgcaatacatattagctatctatattagcaaggcatgtagtggtgcaactgaaattttcttttaggaattgacttctgacaatatatgattagcaaactaataattttatcactatagttgtagttttctgaaatttactcatgattatattatagaatctggagagtttgtctggttcttgatgtgtcggtccatctgactatttctctcctttgtggtcctttctgatataaatgagactatgggaacattatcacgtagtaccaattagtaactggtacggttcagagtgacatttacttttgttttctgcactatggctgtcttaagttgccctcttattgaagctcatggtatctatcacaagaatctacattcatagtacaaccatccataataattgctgcaatctagtataggtataaaaatctggtgttcatctcttttgagaagaaattaggatattattgttgactaacagccggtcattagttcatcaaagctcgcaagtcagaaaggcaaggccacgttcatcgcttgtaagccaaaagcaatcatgtcctgcacgttcccacgttgctgatgaacttggcatgaaaaagcacggcattgttccgacctttggggctcggatttggggccctgcaagtaagagatggtgttatatccaagcatgggatccaatcggtggtgttatatccaagcgtacagagggttattatattggacggcgatgctttttagtcgaatctcttgttttaatcatttgcttgttgctttccaagttttgttcctactacgagtttatgcttaaagcattcatcctcaaaagctgatcttcttgtatggagtagctgtgtatataagctaatattaaactagactaactttaccataattgtcgggctagagagtaaatacatgccttgcatatgaaaaatagtcgcaacaactgtagtttgcatctgtttaaccttattatgctgttgtaatccgtatctgcacaaatcaaccgttttcagagcacttgctactatagttgcttcctggttgtcagatgtcgacttcgtttgaagcccgtatcgcgcttacaagtggagaaggaaacaaggagcccaattcccatcggggctcgggagccttgacctcgtttccgcctctcaaagttcggcctaccaaagaactggatatatcatctgccgatttttggccaatacgagcccaataggattgtctgaggccgagtttagttccaaattttttcttcaaacttctaatttttccatcacatcaaaactttcctacacacacaaacttttaacttttccgtcacatcgttctaatttcaaccaaaccttcaattttggcatgaactaaacacaccctgattcatgagctattcttcctaagttcagtagaaaattcctcgatatatcttttgagtctaaaattcgtccctaaatcgaaatatcaggtatagcacatcctttaacttatgataccgtgttaactttggtttctcagtagtatagtggttggttttggttgatgtggtgagcgggactcacgtttgccccacatgttagctgtcctctacctctcccacacgcaccgggaatggcatgtcgccagcaccgtcgtcaggacgtggccacggttgggtcattggaagtccaccgcccagaagttggcaacgtcggggcaactgcattgtctctctcttgctcgcatcacgcattccctgctgcgtcccgtacccaagccaagctccgatccatcacaatcaccagccgcagctacaaccacagtgaaacgcggatcgaaagttgtgaccgagtagggggcaggaggtgtcacttcatttgccttccaattcggtcgtcccatgcatcaattgcccccgtgcacgtgccgccccctttgtcgtctccgcccccacaagcaacctgtatagccacacgcgaaaatttcccccctcttgggtattgtggttgctatagttgttgcggtgagtgggaggaggaattggagggatcagggatgaatataaagaatggcaggggttcggagatgagggaagcgatggcgggtgcgggtgcgggtacggcgccgctggcaaggcaggggttgatatagtcgttaatgttcgacaagttctagagtacactgggagggatgggagacaggctaaggaaggattttgggtccatgaacatggacgagctgctgtggagtatctggacggtggaggagagccaagcaatggcatcggtgttggggatggggagaaggatgggagggcgcgcgacaaggatgacgaacggggcgagacgggaagaagacgactcgctgaggaagacaatgctacttgccgtggaagtttgctcctccacgccgttgaccgtgccctgtggccccttcctatcagtcggcatgggttgggggacggaatggctgagctagcttctccccgccgtccactgtcctcctcgctacatgtcgtcggcgctcgtcgtcgattgtcgtcctcctcattgctcgccgcctgctgcccctccacactgtccgcagctagccaccaccctggtgagatgggaacggaggggagggagagagataaaggtcactgacatgtggggccacatgtgttccacgctaactcagcgttgttgaccctggtcaactagtcacgtcatacaaaactagctgctatattgtcctgagacctagtaatccagttttgtaagttgaggggtaagttatacctggtattacggtgcagggatgaatatcaaactcggtgataaattgaggaccaaaagtgaacttattccttcttcctctcctggagaactaggcctcgttttgccccccacgcgagaatccggcagcaataacagtacggcctgccctgtgagctctgcacctctcctgctgcaccaaaattgggccctgttacccaccgtgattgtatcgctattatattcaattttgctatatatttgtcgataaattttcttccaaaaatttaacagatgtaattacagtacaattttagtgtaattacactgtaacttacatgtaacttgtatgtaattttcaaaaatctctccgtaacatggtatttcggtaaaatgaaggttgtgggaacaaatcctttcacataggtgtgtgctgtgatttttttcttcctcaccaaaacaaatcttgtaatagactagcaaaagtgcccgtgcgttgcaacgggaattgtaaagaccaaaaaattgaggaaaagttgagaaatatttacattatgtaattcattgaaatacaaatttcggtattttttaagtaggtaggtgtataattaaattagtttacaagtaaagtaagtgcgagaaataaaatgatatggttaaaattaattttattaaattctccatgattaattatgctatttggaattttattggaatttgcatagcttaattgctaattttcataatactaacatccttgcaatatttatttgaatataaatcttccactctcttgttgggccattttcagcccattttattatacagcccgcagccaagccggccgctttcctcccttctcctctcctccgactcaaccgcacacttgtctggcccaaaaataagtctaatttactccccctactttatctctcactgtcgcgtgggccctaaccgaaagtcgaagttaaatttttttgttggaccggtcgacctgctgcggcccatgaagcgcacgcggcccaatagtgattctgcccgacgcgggaccgagccgttcgtttagatggacggctcagatcggctcctaatccattaaaaccccggaccgaacccttatccctaaccctacctttttccccttcctcctcccaccgtaggccactctctccccaccggcgactgcgcacctcccccacctccgccatcttccccgcgccccttccccaccgccacctcgccgtgcccctcccccac

SEQ ID NO: 2882 - DNA, 6983 bp, Oryza sativa
ctgcacccccggcccatcttacctgagagaggaaaaatagacttttgtggaggaatttgatttgggaaggatttggattcgggatttgaatttgacgatagatcggggattcgagatcagggattggcacatagactgacaacaagcaaagaaacaaatttcgcaattagggtttttagaatttaaattttcccgctaggcgccacgacggaacgggcgctacacagtgattgtgttgcgaggtggatttggacacaacgacttaccaagccaccgtcaaaaacatcttcaatttttataatagtagagattagcaccagacaatgtgatgattcattgaatagaacatgaaaaaaaaatacaagactattgccttaagacagtagccaagaaaaaggaaaaaaccaccatcatcacgcgccaacaacacctacacacaacccagtagaaagctagcgttggaccgactgccactaggccaataggatagcaacatcgggactgcccaaaaaccaaaactaacaaccgggcaccaagctcaaccctatttacacctttgggattaaggggggagagggtgagagagaagaatggatcccttctcccccctacagcccgccaacatagccaacttgcataagctaggccgccactgtaagaggataacatgcatttagagagagcttactccaattaccagagaaagtttttggaaaggggcctcctagacgtctccagggagatcaacgacgatgagcaccgccgccgtcgtccgttgaggtcttagggagaactacaacaaggttttcacccgccagctataacagaaaaaagggatggctcgacaacgtcctcaagaaggaagatgatactcgaagtgccgtcgttgtcgtccggtacagtcgggctaggttttcacccactgcctgccccctatcgatccacagttatcgcttcattactccaccaccggccatcctttgtgagcacgtggacaccaccgcatcgacgtccccgccggccagcctccgcgggtcttgtgggcttatatataatcgcctaacatttctctgcatgcattcggcccaacatgtaggaactaggaaataagacgaggttcaaccgaactaggtcactgccattgcgggtcgtgccaaaatattctggaagcttctagaagctagaaccatctggtctaggattttactgggagatatagctgggctccaatcacatggtaagcccaatttaacttggaaaaagtacacgcaaggccctcaagatacaaagccgtctctcaaccacaaaaccggatatccggcatccctcaacttataaaactggtccctcggcagttttaaccccggttttgtcccacgtggcgactgactcagcgtgggacccacgtgggccccacgtatcagtatgaaatgtcatctctgtttcccctcttttctcgtctctctcttctatctcaggtgacggtggtcgcgactccggcggtgaagggcggtggccggcccggagctcggcggggcgaggcaagagagactgcgcgagctcaagacgtggttctccggaccactccacgcggagtcggcgccgggctgcgggcggagcgcggcgggcgagagcggcgatgggcgggcggcgggcaagctccaggtcgctccgtgcgagtcacgtcaccgggggcgcggcgactggtgggtgtgggcggccgccctcctccgactttgccccctactcctcgcacatcacctcctgccggaggcaggcaggcgcggactgggcggcgatgacgacgactcgccctcctcatctccccgtctcccgccggcctcctctcccacttctcccgccggtgcggtcggccggctctccccccactcccgtgctgcatccaaatcgaattgagatttgagatagtgggagagcgccatttgagttgagatggatgccgtcggcggcgggaaggtgaagaaggcgacaggcgggaggaaggccggcgggcgaggaagaaggcggtgacgcgctccgtcaaggccgggctccaattccccgtcggccgtatcgggcgctacctcaagaaaagccggccggtcgatctcctctccgccgctccttccccatcggccgcgccgaccctcttccccaccgcgtcggtcacgccgccgaccctctttcccaccgcgtcggtgacgccgccgaccctctttcccacacacgcacctcaagatattcctctctacccatcctcagcagacatggcgagaaaggagggggaagggctggatctggtagcgatggaagaagagctggatctgtattcttgggaacccgtggtgacgcttgccatatctttgctggacagagccatatcctacttgggtgaggacactagctgggcggaggggcggaacaagaacagatttggtggtttcagcagtcaaatgttttattatctccaacctgccagaggaaggtttcaagacttccgtctgcgtctgattaattggccaaagtcgtactgttgtggctatgaggaaatctggaagttcaggattgcggttgagctattggaggatttgatcgaggagatcgaacaccgccggctggaggaagatggtcgcattcctgccttgttcatgaatgctaaggcaaagatcgccttcaagtttgcgacaaatgattatttcagggaggagtgggacaggctgttccaggagttcacaaccttcaggctagaggacttgatcacggatatcgaacaccttagactggaagagagtggaaaaaagatctccaacaagaagtttgcgagatctcctgatcagtataaacaacaggctaggctatttttcctgctagagagaggtgtatcacgtttacgcgaccaattaccagcggtggtcgaacatgtggttagccaagatagggagctggttgaccttgagaaggaggagttgcatgcagagctggttggccgagatagggagaagaagcagatagtgcagtggttggtcgagcaaccagctgaaaactctgagataatttttcctttcaaaaaaaaaactctgagataatcagcgcagatcatatcaggctctctgcaattctgggtgtggccggcatgggaaaaactaggcttgccaagctagcttgccaagaccccgttgtgtcaaccactttcgattttgttgtgcgggtgcaagtgccttatgatttcacccgggagccgccgtcgccggccgcaccaccctttggccgcgcgcgccgccgcctgtgcgagagcagagagcgagaggaaggagagaaatagagaaagagagactgtgatgacgtggtctccataacatgtggggcccacgtgggtcctacgctgagtcagccgctacatgggacaaaaccggggtcaaaaccgccgaggggactattgtgaccggttttgtaagttgggggacgcggatgtccagtttgcggttgagggaggattttgtatttggctaacaagttgagggaccttgtgtgtactttttccatttaacttcgtcctatggaagacccagcttaaccttctgtccactgacggcaaccatcagggctgaacagcccaaactctgttgatgtaggcccaagtaggcctaacctggaaactctcctgtaaatgtgtacacaactactaccgtatattcagatgatcagatcctatattctccctgtttctggctcaatatagagtcgacgatcgtgtcatcagttttaaataatcgtcaataccggtctaatttataagataagctcagttaatgaagtactccagtttttccataagccataaccctaaacatttcgtttggtactccctcctacccagcccacctgtcctctctcctctgtgaatgtctcattgcagatttgcagcctcatcatcagcacagcaggcgcagaaatcaagcgtgtagcgagcgcaggccacatccaggagtatctttcagtccggatctcgaggcactgtcacaatggtaaaaccgtaaaacacgcagtggaaatttgggagtaaacagactactgtaggagcactaaacctaggcacattgctaatctgctgtttttgtcagtgtgcgtcactgtctcgacatggtaacatggtctgaaagggaaatgcactgtttctgattgaaggctttgcctggagcccatggggcacacacgatgacacgaagtcacgaacacgccggtgatcgtggacccaacaaacgtcgcgtgccgccaagtttggttcggccggccggccggccggcaagtctctcgacccggtggcaatttctttgatgctaaatctcccatttggagcgtaatgagttgacaaatggcgtcatctcccggcagttttgggtaaccggagactctcaccgcacatgccgacgacgttcgtgagacccactccctccctgttcagttcagggtacatttcctacaatgatggtgctcgactgtatcgctggagggacaggccggggaccaacggaaagtgcgtaaataatgtgtggcaaatagtaggcagtgtgcttcaacagacacaacctcctacattttttctactagtatcctcgatcaaatttacatattctcttcgtgttttttgctgtgtcatgtgcctttggtccaaccaaggagtagtactagaatccatagctggctttataacggtgttacgccatgctgatgccaaggtacaacttgtgctgttttatttgattcttgccctttgcgttgcatggaggaccaaaaacgattccatgggaaggagaactggagaaggggaagatacagtaaacaaaagcaggtgtcggcagaccagcacactgctatatagtactccagtgcaaatagttttttttaaatcccgtgtttcattctggatcatgggggtggatccggcaccgcgtgacggcaactgccgcaatagctggacagccggcgcaaccggtgcctgcgaccggcacgtcaccgcgcgcacattgccctgtctccccactttgaccgcctaccgacgatttcgccggcgagagagtgatcacgatttggctgcaggggcgtccccgtctgcccccctattcatttttctgatttctgtggttgctgccaattgaactccggtaggttacaaacgaagccacctaacaaagcgtcatcttctagtaactgaatttttctgtgaccgagtcgaagtcgaaatcgatgtgcaatgatttaacagacgagagcacaccggtgcttagatttccatattgtttagtcaactaacagccggtaggattcgagtaatttcaactaactgcatgtttgagaatttccattagagagttttgttaccattacatcgaagtcctgtttagaaagtaaaattaatgaaccagagattgtgttccaaacaggtctcgatgaatttggttacaaagaatacaggctgcaatttaagtagtctaattttaactcttaaactatgctcgaagtctatttattatgatgaaaagtaaaagataaactattttttatatctttgggttaaacgcatatatgtattaggtttcacctattttacattctgccactttttttttgctaattgctatataatcccactagtttagcatgaagatgatataatgccattctgttgtgttagatgacaccaacaccattaatttattgtgaattgactttgttaggcactatgaattataaacgcacattgctactaccttcgtcctagaatacttgattctttagaattcaaattttatcccaaaatacttgtcattatggagtactagttgtcccattaatcactttctattcaaaagttttcccattttaccctcaataaccattccacttcctatcatatattatttattaagggatattatatttttttattaaaccttaatatatactaaacaatctagaatgacgactattgtgggacgaagggagtaaaaaatatgctcctacctcagtttgagatgaggggtatttatgtcgtaatagaatgccacggaactttcaacaatttttacttttcctaatttcaaaatttaaagatacattctccaatccaaggacaccgtgacagttagctggttttcggtggtaaattgacaattacaacatgccctaatagcaaatatacaattgtttctacaattattacatataaaaatgttgagtcatatttttgtcacggaactacttttacgtcacatgtctgatacgttttacaaatgtaaaaaaaaaaaacaatggccaatggttactacagagaaccgagctactagcagtttttctcccggtgagacaggaagtaaaagaaaaaaaaaacgacccactgccaaatggttgtatcaaagcatcaacaattcaccccccgcatgtgctggtagtatgacggcgtataaaacagcacatggaaacagatgaaccacaatcatatggtaaaaaacaaaaacggaagctcaccttcccaccgccacgtcccggctccccatgcgaccgcgcctatggacgggcgccctgcccacgccactgcccccaccgtcgcacgacggccgcgtcggtcgccacgtctccatctccctccacaccacctggtttcctcttcagtttcctcctcattattcctcctcttcccccctcgccgcttacaacatccatccccaaacccgcattcaaaacaagcaaccctcctcccgaatcgaacaaggaaacagatatcgcctctaaaacccccatcgtctcgtctcgtctcgttcccctctccatcttccgcggctttccgcgcgatccaccgatccggtttccccgcgccgtgcccggagtcggcgctccattcccgcgccgggttttggggtggtgtgttgatgcggcgggattcgagccctggcctgtgagttgggcgatggctcggcggctgcggg

SEQ ID NO: 2883 - DNA, 4856 bp, Oryza sativa
ccatagagagagagagagagagtaattctgagttgaatgaaatcaaattaggttgaccatggttctgccacattaatattttttcttgtcgtactgcgcattttcatttttatactataacaaaaacttgtttcttctaggttgtctcgaaacagttctcccaccaacgcataattgatgttaagtagtactttctccaattcatattaataagcatataaccaaaaataaaaaaaatccaaatttatcatcacataaccattgtcccttagtttggcgtgtaccattattgcatctatacatgagaattaagtatgcatgtatgcatgcagacatttagggatacttaggctattcctaacccaataattaggatgatgtccatagcattaaataagctgccacctagaatgaaaaaggatgtggcaagtgaataaatgaggaaagagaagaaaaccatgtcttgcctaacagatggtttctacacaacatccaagacatcatgtgagataagtagcattaaatttatgtcggtgacatgggaccgggagtatcatgactagaggcttgaggcagacacaatcgcctacgtggcctggcaccctcggggggcgtcgggcccgagggtgatgtgttcgccctcctctttatctccccgagggggtcggaccgctcccgcctcggccccgagggccgaggcgccccgaccccttgtgggttttgcgccgcgtatatggggtaggtgagcatagcggggctcacctaaccacatttattgcggtttggacgagcgcgtcacgccgcatgtaacgcagtgcagcgcgctcgtctatccggtctgtgaccagtcacagaccggtcagatcgtgggttaggtggcgacaggcggtctgacgcacgcctcgccccatcccgtcaggacgagagcctccaagcactcgtccctagccggagccggcgtgttagctcctggagatggcacgttggttccggtcagatatatgccaggcttcatcctaaccattacaggcaagatattgtatgaagaagggcgagcatgcagattgttaaactgacacgtggtggacaagaatgaccgatttgagaccggtctgacaatggtcatgtcgtcagcagacagccatgttcccacgtcgcgcctgcttccggcggaagtggaggtaggtatgggccgtcccatcagaaggtcattcggacggcagccatacaaatctccgtccattaatgaagagaagtcaagttggagggaagagaggatgagtccccacacaaaagaaagagagggagagatggtgcatgtggtatccccttgagatataaaaggaggaccttgcccacttagagaggggggaggaaaaaggatcccagaacaatcgggggctggctcacactttgtagcttcttcatacacagatccaccaaaacacaggagtagggtattacgcttctcagcggcccgaacctgtatacatcgcccgtgtcttgtgtgtttccactctcgcgaactttccacagaccaggagcttagaatctcacccagggcccccggccgaaccggcaaaggggggcctgcgcggtctcccggtgaggagccccaagctccgtcatctggcgcgccaggtagggggctctgcgagtgatcttctgagctctcgcactctttcgtgtgtgccaagcttttcctgttcagcccaatggccgaacaagcaaaggcgcacaacctctctccgagcgttagcggtgacgatggggagccaaacccacgccgtcgagctcgtactccaccgccccctccacgccaaagtcctaggcgggaggaggcgctcgagagggtccaaggatccgcgacttcgacgtccacgggtgatggggaagggcggccagatggggagcgtcgcctcctcgtctacggcgacggcagcacgccccagggcgcgctccaagctgcgggcgtgctcctacgtcacccgcccgttgtccctgacccggagtctccagcccaacgttggctggacgacgtggccaacttggtcatgacggcacggcagcgcctaggtgctggtgggcggtcctccgccaccaagacctctcgcgctgctaccaccggctccgtgtcgtcaaggcggagggcgcggcgagcggcggctgttgctcgccattcggccgccactccttcgtcagcgccttcgacccaggaagatctgcgtggggggccggatgcccgcatcagtatcgagcgccggcgtaatggccgacgtgctgcccacgcaacggagggcgcctcctcgtccggagtgtcacatcaacacggacgcggggatcagccctccgtgcccccggttggtggtgtcggctgtagagcatttgtggcgagccttcggaacgtccgttggcccccaaggttctggcccaccatcgccgaaaaatatgacgggagcgtcaaccccgccgagtttctccaggtctacacgaccgggatcgaggccgccgggggtgacgacagggtcatggcgaatttctttcccatggccctgaagggacagacacggggttggctaatgaacttgccacccgcgtccgtccactcttgggaggatttgtgccaacagttcaccatgaactttcaaggcacatatccgcgcccaggtgaagaagcggacctgcacgcagtacagcgaagggatgatgagtcacttcgctcgtacattcagcggttctgtcaagtccgcaacaccataccatgcatccctgcacacgcggtgatctacgcgttcagggggggtgtgcggcacaaccgcatgctcgaaaagatcgcctccaaagagccccagactaccgcggagctttttcagctcgcggaccgagtggctcgtaaggaggaggcatggacctggaacccctccggttccggtgtggcagcttcggccgcccccggatccgctgctcagacagggcggcgtgacaggaggaggaagaagaggtcagcccataccgacgacgagggtcatgtcctcgccgtcgagggcgcttcgcgggccacccgaaaggggaggcctgcgggcgacaaaaagaaggaggccggcgctcccagcagggagcgcccaaccggcaagtggtgcatcgtccacaacacttcccttcacgacctcgcggactgccgcgcagtcaaaagtttggctgagcggacgaggaagtgggaggaggagaggaggcaggagcgccgagagggcaagtccccggcggttccttccggcaatcggcgaagtgaggccaaacagaaggcccccgccgaggacatcgatgacggcaatgatgacctaggtttccaagagcctggggccaccattgccactgtcgatgggggagcgtgtgctcacgtttctcgccggagcctcaaggccatgaagcgagagcttctggccgcggcccctactcatgaggcgacgcgccgggcgtggtggtcggaggttgccctcaccttcaaccagaccgaccacccatcgtgcgttgcccggggaggacagatcgcaatggtggtttcccccactgtttgcaacgtgaagctggggcgtgtcctcattgatgggggagcagccctcaacatcctttcccccgcagcctttgacgctatcaaggccccggggatggtgctccggccgtcccagccgattatcggtgtgacgccgggtcacacttggccgctaggtcatatcgacctcccggtcaccttcggtggatccgccaacttccgcacggagcgggtgaactttgatgtggcggacctcagtcttccctacaacgcggtcctagggaggcccgcgttggtgaagttcatggcggcagtccactacgcctacctccagatgaagatgccgggccccggtggccccatctctgtccatggcgaccttaaagtcgcgcttgcttgtatggagcagcgcgcggaccacctcaccgccgcgtccaacccgagggaggcgacgagaggcttggcacctccgcccccgcccccccgaggcagcggatagtcacatgcgacgaggtcccggtcaaggaggttgccctgggcgacggcccgtccaagaccacacggatcggtggtcttctggatggcaaataggaacacgcgctcgtctctttcctgcgggcaaacgctgacgtcttcgcatggagaccggcggatatgcccggggtccccagggaggtgattgagcaccgtctcgccgtgcggtcgggcgcaaggccggtccggcagaaagtacggcggcaggccccggaacgtcaagccttcatccgcgaggaggtggcgcgacttctggaggccggattcatccgcgaggtcatccatccggagtggctggcgaacccggtggtcgttcccaaggcgaacggcaagcttcggatgtgcatcgactacaccgaccttaacaaggcatgtcctaaggacccttaccccctgcctcgcatagatcagattgtcgactccacagcggggtgcgaccttttgtgttttctagatgcatactctggttaccatcagattcgcatggctagggaggatgaggaaaaaactgcattaattacccccataggaacttattgttatacgacaatgcccttcgggttaaagaatgcaggtcctacttttcaacgtactactcgaatttctttgggtagccaaataggacgtaatgttgaggcttatgtcaatgacttggttgtaaagacgcgcaaccaagagaccttactctcggatctagcggaaacttttgagagtctccgctccgcccgcataaaactgaaccccgataagtgcgtgttcggtgtacctgcgg

SEQ ID NO: 2884 - DNA, 26799 bp, Oryza sativa
  unsure (1)..(26799): unsure at all n locations
ccgcccacacgctcctgtcgtcgccggggaggggaggggagaggaagtgcaggagccgcggccgcccgtcgtcacccgcccgcccgccggatctgccgccacgcgctcctgtcgctgccggggaggggagagggaggggaggagctgcggccgcccgtcgtcgcccgccctcccgccggatctgccgccgcgcgctcttgtcgctgtcggggaggtgaggggaggggagagggacgggagaagccgcgggccacccgtcccgcctgcgcccgctgccgcctccccatgtctgccggccgccgccgagctcaccgccgtcccgcctgtgtagaaggaggcaaaagaaggtgagagagagagaggaaaatgagtggaggagaaggaaggtgagaagataagggagagagaggagagaaggggccggggggagagagagaaggaagttcaaattttttgaatgggatgggattaggaggcccacctgcgaaaatagggttattttcgcgtgcgggcctgttaagtgacttgcacacgaaaattgattttcgtgtgcgggcgacgacccggcttcgcttcccccatttttctgtgcggtctcacttacggaccgcttggaaacaaaatggggtggcgtccacgaaaatcaatcctgtagtagtggcccaagctcggtttctgcaaaaacactatcttgttttgacgattcccgttgactcggaatgaatttggatatgagactggatgcgtttgaaaggtagttagataagctttcatcaagtccaagatcacccaaatcggatggcatgaaggcgctatgttcttttgaagtcagtgctatctccggaggccgaactaaattccaaaactcattgggcattaatatcttgtagatcctctattcatcggatgtattttttggcaatgatttatatttctcatgcttggttgtatgcatatacttgatggtcatatcatcctccccttcttgtctggaaaccgtcctcggtttcttgttgcaattgtcgtcataggagagatcacatgaagaaatagcaaacgagcaaacattgagtagcatcatttgttcctcataaatcctatttacatcaataggaaaccaactcacttcatttaataaacatgtcttaaaatgatagagaaacttgaccatagaatctaatggtgcataacactctccttcttgaatattgtcattgatcttcaagataagttaggtaaatttatcccaatagcataaaatttgtacgacccatttagtttctcacatttttccatatttggaggagtatgtatatcgaaacatatataaacgccatacaccttataatctcctctagtattatatttactaatgacatgataattattccaagaaaaacatggaaaatcaaaaattttcttctctaagatatttagatcacaaagaacaacaaattcgatagcccaaagtacataaagaacataataatttcagctcttcttggtaatcagcagtaacaaagacacgtttattttgagtggaaaccaaatattcagaaatagaagtaatgtgttctttcactagttgtggcatgtatataagtgaagcattgcacaactcttcatcattacaagcattatcaatatcaacacaatctgaatttttagcttgtgataagacaaattagaaatctgttccactagaggttgctctaacatagcataattagaggacaattgtagcatatcacaatctttcttaccatggttcagttgaccatctgttaaattacctgaaacgctctgaaacgctctgttcagctagtttaggtggttcattcttgttttcttcaaaattgtgttttctttcctgcacgatgttatatacagtagaaggtacaagaatattctcatgtatcatagacatttttgtttctttctcaatctgactttcaatatcgcaagattaccaaaatcagagttgacatgaaggcgctaggtccgtttgaagtcaatgctgtctccggaggccgaactggattctaaaactcattggactttaatatcttgtagatcttccattcatcggatgtattatttgacaatggtttttatttctcatacttggttgtatgtatatacttgatggttatatcaataactgaccatgcatcaccgaaattacagctgctactttagctctctcggtcgcgatactttagctctctcggaatgggaagtaaatcagagacccttgtaaatgtcttttgtgtagtagtgtacccgttatttggagatgagatccttaattaagtccaactgattctatctcgcctgatcatctacgggttccatatatataaacaatgcttgagacaggtttctcccttcacgaccccagtgtctagcattcgcgaaatgtttgggaatttcaattctagttatggacaatatatacagcaggaatgcgatgcaacaggaaaccacttaactggattaagggttaaataagacaatttagaagtctttagtacccaagacttgatgaaggaggcgttgttccttaagtccagcaaccaatatatccgtgtcagccgccaaagtccaactgatccggtgctttcagtgaatactttgtcactaagggtttcttcaaatcgaagtttttattgagatttcgcaacaagtgagaaagaaaatgtgggggcactctggaggtgattttgggtgacaaatttttttttaaaaaaaataaactggagagaattttcgttgcaaaacctaaaactccaagctacataattgctgcggggtgttgctttcatgaataattgttggggggaaatttcgtcccttgccaattgttacagttgcttcttaggaatcatattgatatgttcgaacaacaagagggtagaactgcttgtatagttcactaaaaagcctactgattgattaaatcaatcaatggcttgaaactgtaaattcgaaatcagtgcatctaagggtgagtttgagaggaggggaaaagacaagattgggaagatacgcaaaacgaggtgagtcattagtatatgattaattgagtataaactattttaaacttcaaaaatggattaatataattttttaaagcaactttcatatagaaaatttttacaaaaaacacaccgtttaatagttcgggaagcgtgcacgcgaaaaatgaaacaaactaactcacaaactcctcgtgccgaacgctccctaagttctaacttatagccatctcgacagtggtgtttcctatcttagagaaatcttgtcatccttttgcacataatagtgagattttattcgtccagactatatgaaatgaattatcaggtagaatggatgtgcaactgtgcatgaacgtccatcgtccaaaaaataatacaaaagtaattatattgtttcttcaactagaaagaaaacctgcgcagatgcgcggacatcttatttattgttttatgaaataatgttaaaagtagtcatatctcacgatttgtacgttgtgaggtagaccgtagtctttaatatgcttaagaatgtatgtcagattaagaaaacattttatctcagttacatataaattcttctattatcacataaacttattatcactattttatctattaatagatgaaactgtatatgtcttacttatttccaaatccatatataaatattctaaaaataccacttctaccgattaataggatataccattaaaattaaaccattaaagttaaacatgaatggccatttagcacgtgaaaccaatcataatcgtaaagactttcttactctactgtcttgaatgataggtctctcatcaagatagttgtgctccctcgagaacttggagcacaatttaatgtctaatttactatcacacccttatgtagtattgcattggtatactgggaccgccttaactcagcctatatatgcctctgttatacttacaatagcgtagcaaaatctcttgtttatgcttggtgcccctcggagaaggacaaagaaaagataaaggtgttcaaggtagttgtttttttttaatttttgagtagatttgtgttatagagtagacacaatatgtttaagattttgatcattactactcatatttttatagtacagctagaatactctcattcgaaaagaagcgaggtctatcaccttatggtacctaaaagaaaatagccaaagagagacataccaccacgataatctccaaagcgctatattattgttcaaattttgataaatacctatagtttagcacctggtttagtttgaacacctactattaacaacaacacatgttatacctttactaattaaaataatgtatttattcttccaaacatatttatcaattacgtcgtatatttgtcaagtaatatttgatatcctaaaatatgatataaaattatttaaaaattatcagaacattaattattatatattagctcaagatgtgatgtatttagaaccacactataaattttataagacacaaatattttatttaattaaaggaatataacgggatcacgaatttgatatataattcaaaaataatttaaaagataactgtctatatttgatttgatatttgatatttataatatagacctagtttatatttgcgcatatttatggagtaatatatattttatatggtaatgttttatattttaaagaccatcaattttgttccatgcacgtatgttttttattacatatattttttattggctttaccattttctacggtaggtacgtgcatatttttttctttctaataatagttatacgtaagcttttgttctcaatccgtactttttttttctttgaccgttaaggtgcatatatgcagatctactaagcagtacgttatgttttatttttgttttcatctttatttatcgtatgttttcttccttcctccggcaaacagtacatatagaaaggtattatatatagatctgatttattggtacaaaataatgggtccactaattaaaatgaaaatcaactgtataaatttaatcgaacggtataaaataatgggtccaccaatttaaatgaaaatcgacggtgagattagattgtgccatgtggcggcctagaagcaattgtaggagtgtcatatggcggcttgagagcgtttgtagaaagtttaatggacttttagtatataatagaagatagatagatagctcgattcctccattcttatctagttccatgtactgttgtacggtccgtcttaacttttcagaaatttggccgttagataataaaaaacattacaaatcctcaatgctaaattacaatgaaatataataaggttctaaatgaactttacattatttagaagagcaattttacggtccttgaggaggtaccatgaggtatcactttttttattgtaaatttggtacctcttggtacctaggtactatgagataccatgagataccaaattttacactatatttttggtacctcatggtacctcctcaaggaccgtagaattgctctatttagaaccattttcctcaagttcagtttatatgccattttcatcagttgcttttaatggttctcttttttgagatatttatttttatcagagatttggctaataaaaagatttcacctagttcagcattactaaactaacattcggtgctgcttgttgacagccaaccgctacagtaaaataaaatgaagatatatatctactggagagggagtctctccctggtgtcaaaaacacaccggaacgcatggaaaacacccagtaaagtatgttacggagtgccccacccggcaatcatcacccgggagtgattcaactttcccgtgcatgcatgccgagtgtgcttccgacagacactccgtaacaaccagaaattgccgggcgtcatcgaaaactcggcaacaggctgaccacaccgtccaacggagcaaactcgtaacggaagactaggactaacggttaacggcgataattgcatagtgtagcagaacacccgggaaagcgttagagcttaccgtgtgtctactagtagacacggtaaagtattgcttgttaccgggtgccaacgctaattaacacacccgtgcatcaaggggaaacgcccggtaagagcactcgtgcacacacagttacgttactgtgtctcatcattttgacccaggaaatttgttttggtggggtaaattaatacgcttgatcattaatattagatgcaccatgatactagcatcaaaataacacacatcaatggcaatcacacataaaagacaaaataatgcatttagaatcattgacatccattttcaattaataagtttgatgacaatctggtaaaaaacaatagcaatatcaatctttcgaacaagaaatctatcttctcgcgagtacatgctaggacaaccaagaggtctagcaaagaatgagtccacaaagtaataagaaagagtagggctatgttgattgatacaaaggcaatttgacagcagctcgaacgatttagaaaatacgctggctgacttggatacctgagactgcataaaagaagtaacaattgagtaggtagaatatcataattaaagaaactgatctatttcaaaacaactctttcatgcgttgaataaaagcatactactaaacaaaacaattgaaaatctcttttattcgtactatcgacatagtaaagaaaataattaggtaatctggacccatgcatgctttatcccaagcctcaagtgactagtcattgaagttctctaccgatattccggtgttgtttttgttcaagcagggttgtcgttgtaagagttccctatttggagctagacatcttaaggctaattgcattaattgctatggaaggaaaataaaagacagaatcctccctacagttgaatgaatattattaattaaccagggaccactaaagcttgggctaagggcacccgcgatggttatatataggctctctacaaaagatctatgtcagcatatttttctacttggaagagattaaatgaatagagagagagagtaaagctatctactaacctatagatagtctatagagaaaaacgagacaatgtattagagagctatagatacttatgtagacatagtattgaggtggttactactaatctagtctattgctgaggtgtacatgttttatagagagcaccttactttaccattgtaagtgctctaagcagaataggttagccaacttatacaccatagtaaatggttagtatgaaattaagactgctacagctagggtagaatagatattgcatttcaaaaggtcaatatccaagaatgggattgttgtgtcttgctagacatatatgttaatgtctaatcataacaattaacaaggcacatgcaggcatagttgctactcaaccagatcaaatgttgcaatatcatgacaaaaatagtgttccacatggagagttttttacatcatgtgattcaattttcttacaagttgaaaccgttatgaaaaataatcacatatttggtatagcgaaaataagataatgttagcttacatattacaggacctggatgttcataccactgatttgttcaacaagcagggctacaatgttgttcgtgtgacctgccaagaaaaaaattactgtgaaatggcatgacaagcataaagccatgtaaattttggtaaagttaacatggataggtgccatacaaataccgaactaaattgtaaattctctaacaatagaaatcataacgagttaaatgaaagagtaatttgtatattagacccccttttattaccactgttgcagtctgcaccaggggtaaaaggaatatattcacattggaccagttatatttaccaaatgattcaccttggtcctagttcttctacccctggctccctcttttctctctctgtttcctctcttctctgaccagttaacaggtcaagtagctagctatctaaagtcggtgctaatgccaaacttctcccaggattagaatcgaagccgcatccgtgtgatcaatctcaatctccacatttaggttcgcacttaattaagctcaggaaggaacgagaaaaaagaaagaaaaattgcccccattgctgtcgagctatctgctacagggaatggcttggctttggcttgattggtgaagttttaccgatcgccgccggcggcgaggatcgtagaggggggcctagtagtattccccaagggcatgaactgtaccatggatgtcaccaagccggcaagcccatggtcagttggtcacgctccaagctctacatggtcgaggacatttaaattggccaagcggattgcagccgtatgatgattattgtttttgtgcttctaccatcttgtggctagcaagatcgcaaggtgaggcttcatggcgtctgttaacctcgagctcaagtagggcatcgcagcggggggctcaaggtcgaacgcggcgttcgaaggacgaggtcaagcaaggcgatgggtgggatggatcagctggactgctggaggaagaacgggtccgagtagaaacaattggtgaagatagatggtccaaagtgaaaatatgtgcttatctccggtgcaacttgcaaccaaggtaaaaatatgagacccaacatgcaatttactccaaaaataataaatgctataaccggttacttttttctgggccggcgagatctgatataagaaatttcagtattgtttactttcatagagacccaaaaatatacaattacaacttacaacatttgtccagaatggccattgatttcccatactgcaaagtacgtccagtactcttcctaattccattatgtttctttctgttgcacacagccatattcggctcgttctatttaacgccaactcgatccatttctacacagccctcacatcccacatgttctatcagtgagtaattattgaattgacagtgtgatatataggaacattctaatatgggcataggaggttaacggagaaatgatagcattatatttttctttggtggccaacgatgtgttgatttcccttgcacccagtatttctttttctggtagcaatatcagatgggctcttgagctgctcagcatatgtacagtatacatttggtccattattttttctgatccacaaccagtatatgttcctcagcatgtacaatatacctttgctcgagacatggaactagatgtccagtttcagaaagagttgtgactgaaggtataaagaaatacaagtaccccggtatacataatacattatatatgttacacgctctatatagaactttgcattcatcatccagcctgacgaagagctttggaatcctgttaggattactaattatatttgcattattcagagttctattcatatattagcgtttcttgaattattttgaggggcatgctaaatcataatacaatatcaaagttatctgctaggtgtttatgtattcaattaaaaacaaattaaagaactaaattttttattatacttctagccagtatctgctaactatatggtgctaatggatttctagatctatgctggtatgcccatctgcacttgtacgtgaatgacccccctgtagagtaaacaaattaaaccagctactatcattatagtggccaaattgttgtcatcatcctcctcttctactcctctgtggaccttgaacttaactgtggtaggaaaggaaattaacatcaccattatatatggaaacgagaaaacgaacgaccttaacaaagatttgttttacatttaaacattctgttaagtgaaaaatcaattgctctcattatcttcgtattagagcttctcgcagaggttttggtgttcagggaatgattcgaaggaaccttactaatattcaataattattgttcaaattagttaaaacaagcaattaattaatgtgtgctctcaaatgttctttcttggacactttgttttttaaaatattggtagtaggcaagccgagtttgggaaattaataaatactttcacctttttgacagcaattaaaatttatgtcttcacctacaacgaccgaagataattgctaaagagtaatagctttgctcttccaacgctatcaagccaacatatagtgacaaaacacacatctttccccttacatgttcttgcaaatttgagactacgaatttgtcctagctggttcccagttatacatattggatacaaaccctcgctgcaggaccacaactatcgattggtatatgggaatgagaggacaaaggaagaacactataaatagaggcgtcaagcgtccaacattctgtcatactcctgcagcgaaacatctctgtctgacctgcacctgtccacaagcttgtctaggtagatcgatggctgtgcatgtagagagcgtgtgtgtgagatgcagccactgttgcctccctctaccatctgctgggttcaatgtgtcggatgaatccttcaaggggaagtcgttgccatctctctgcatatcttgcattaattagtggcatcttctttttcataaagtatttgttacatacagaggtgaaaattaatgcagcaaaatagggacaccataattaacgcccatatgatataattatattgtggcactttttagtgtccaatatgaaaataaacatgaataactacatatgaaaacattatttgtgtctgtcgaaacaagatttcggcaatactaaaagggggtggctattaagctaaaaaagtggatgtgtttgaagacaagaaattttatataggttcaggccttcttagttaagaagtaataccctactcctgtccggggatgattccgccgagtgtattattgatcgtatgatctaggagaaagtcgtgtccatagagggacccggacccctccttatataggggaaggagtccgtattacaaaatactgtttatatccctaacggaatatgtgattatagataaattacaatcgtaaccgactagaatctcgggtatctccttgacatacaagtttagaaactaacccgagtcctcataaagatattctatctatatctagtaccccgtacctaaccagactatacatgccgtgtagatatgggggtatccataatctccacagtagcccccgagacctttacagtcgacgaaatggccttctctcagaacataaagcaatgatccgagtgcttcaattccttctgctctggtatgccgagtactaaaatcaaaaactgtgaagggcgaaaaaagaaataaaactgggtgcatcgagtagatgcacctaattaggtgtagcccccgactatgtggttagttaaaaaactaaacatgtagtcaagaaccgagtggttttacaaccaaacatcatataacaaagcatacgtggtattcaaaaaaacacctagtcgactgctttttagctttaatgtatcgagaatgaaaatatgaaaggctgagtgataaacactcaaaaaagtccacaaataggcatatttgacaagaattcgagtaagaaactcttaagatgatccgccaaatatgataaaaatcatggtaattaacgagtctaatagtctaggctatgaccctcaccacaaccaaaataagcatataacatgccaagagaatgactcttaataaactagtcatctcgaatcaacccaaacagattttgcagcttaataaagcttataaaaatagtataacacctttctgtcgggcacctttttatttgcatcgtagtaattccaaagaattatctaaccgcgttaaaaaaggattttaacagcatcgggtcacatcattgtgagcacaatttgccaaagaaaaaaagcacctaagtccctagggatcacaacgggccatgctggtaataatattgggctgaagtactgtataggtccaggctcattagcactcccgataccctaacaaaacaccgtagtccaagcgacgcttcgacttccccgctgagactctcgccatttccccattcctcgctagagtacaaaaccgcgccgacgaagctagggttcatcaatccgctccaatccatcctcaaaaaactccacgaaatttctccgcgcgtccaccgcaccaattccccatccctctccagccacatctcggaccaaattagaccatttagctcacattcatggcggaagagagagaaagcttcgagagtcagtgggcgccctccaatgtgacggaggagaatctgaaagaaatggtggcgcacggcgttcttctggcgaaggaaatcattgggtggcgaccagcgttcggcgaagctttcccgacccctgatacacacgaggtcgtggtattttctcacttcttctatggcggattttctcttccaacctcaagattcttccggggaattctgaatttctatgggattagcctgcatcatttgaatccaaactccatagttcacatcgccaattttattcatgcctgcgaagcttttctggcattaggcctcattttgctttgttccgccgcatcttcttcctcaagccccaaccgaacaagagcaagccatgcgttgttgggggcgctggtttccaactcagaggaacattgagccaaaagtatttctccatgcccttcaagacctcaaacaaaggctggcatgcaaactggttttatgttcaaaaccctgaacccgcagtccctgagtactcttgtctccctctagtctatcaggacacttggaactcgctgcctatgggaaatgaagccgctcaggcagtagaactgatggaccgcatgataaagctgaaagaacaaggtcttcaaggagaacagatcacccggcatttcattaagagccggttagctccaattaaggagagatctcgcacagcttttgaatttgacggcaagcatgatccaaattgtgaagatccagattcccttgattttaaggttatgaaagaaagaatgtacaagattttctccaacgctatcgtagtcagctattcacacttgctgccagtggtgccatacaacgcattcaatcctcctccaccggtacgtatccaaacacttcaaccttcctcaaaatatggtcttgtctcttgttaaatcagttgacaatggaagatactatgctcaggagtttgctttgatgaagtcggatcccccaatcgctcagcgtcgatcacctcgccgtcaaactggtcaggggagcggtgaaccaaagatccggtctgaagcccagccgaacacctctaatccagccggccagtcggattcccgcaagaggaagttagttctgagtgacgacgaaggcgatgatgctggaaagcttggagataaagaaacaatcggaaaattgccgaagcatgccaatccaaagaagaaaacatccagtcgtcctatgccgaagatcaggaagttttccaggtacgaatcatataacgatcttccttgtattgacgctcacttatcatgaaaacaatgctgataatataactcaaacttgtaggaaaccatctgatatagacccttttgggaaagactctgatccgactaacatggagacgagttcctccaaagaaactgggccgactgcaaaggatcatccgagtgacaatcagccggcaaccgacaatgtagaatctagctatcaacctccgactggaaaccagtcggccgaagctgaagtcagagttaaccaggagcccccgactggaaaccagtcggacatagggccaagccaagagattcctgaagttgaaactcaagcaaacagccctcgcggacaggatgccagcaatgacccaagatctggatctcctgcaaaggcacaagaatccactcgtcctcgtccggaaatcatcacgggtaaatactttgtctgaaatcatgttgatccaactgacttcatttgattgttcaacctttatccatggacacattaggaccaatgattggtgatgaagaagaaattctccgaatacgagtggctgaagattcgcaccctcccattctggtcaagtggtgggatgacgacatacaaccttaaggaatcgtaataaataggcaaaaagaggatgaagaggtatgcctattgaaaaaggcactcggccaggcaactcgcattgtaaacgtaagttccttgacgcctgacgtcaaccatcttgtttgccatttagctcgagcgctaataaaactattttgcagaggattcaccttaggaatgaagcaaaaacagcaaccttagagaaattagttcctcatctcggaacccttgaagctaccagagaccaactgcacgaggcaaaagaacttgccaagaaaactgagcatgatctaagggatcggatcactgagctccaggagtctaattttgaattgagtggctcatcaaaaggtacacacaaactctgtccaactaacttgtgctgtcatctttgtaatttcggttaaccagagtcaatgtagtgcaagccgccaagatatctcaactggagagaagcagattcagactctggaaaatgacaaggcagaactggcaagacagagggactcggctttgaaggatgttgaaggtaccatcaatcgataccccaaaagccattatcttctatatgctaactcattaatgtgaatttgttgatgtagaccgtaagatcaagtcgcaggctcaattcgacgtcctagtcggcaaaatcaagaggctcgaaggggccagggatgaagttgctaacgatgctaccccactggtccaagcaatgttcttcaataacaacggtccgagtacattcgatgcttccgaaatcttcgacaagctgagagttgctccggatacatatttcaagaacatcaaagaggccgggagtatgggagcgagtctggcgttggcaatgaccaagttcctttacccaaaaatcgacattgatgccattgatggatttgcagacgggacgagcgaagaagctgctcttgaccttatcaatgatgcgtagaaagccatcgacaagatagcagtttatgtagtcgagagattccaagacaccgagcttcgaccgactggtcctgataactccgatgatgaaaaaactgatactgattgatgtaatgtgataacaatgattctgatgatgatgatggaggcacaatttgtacaatactgatgaatatatgttgtgcttagtgtttcaaacttagcttctgatttcttaaaagcttttgtcaagccttattgagcctaaaacccgcaaaagctattaaaaagctttcagtcctcatggactaagtcgaaaaatcaggcaaggcaatgataaatcaagtaagcaaattgaattgataaagatcacactccattattattataatagcccctgactaataacttcaaggagaagcttgatgttgtcagtcaaaataggggaatacagaagcaaaacttaagcataaaaacgacgtagatgttcgatattccaagagttgttgataggtgtaccgtcttcatgtttgagtcagatatgaacctggccgagtgacttctgagattacaaatggcccttcccataaaggggataacttgtgccgatcccgtgtagtttgaatttttcttagaaccaggtcgccgactaagaaggctcgtgatcggatgttacgattatgataacgacgcaacccttgcaagtatcgggccgactgaattaaggctgcttcgcgggcctcttccagtcggtgtagatcatccactcggtcttctccgtagcgctcctcgcgaaaattgcgaaaacgcaaagattcaaattctacttcactaggcaacattgcttctgctccataaactaggaagaatggcgactggcccgtagaacgactaggggtggtgcgaaaggaccaaagtacggatggcaactgttccacccatttgccggcataaggattcagtcggtcaaaaactcgtgcctttattccttggagtaccatgccgttggctcgttcgacttgcccattgctcataggatgcgctacggaggcataacaaattttaatgccgaagttttcagaaaaatctttaaatactccgcctgtgaattgatccgattgggtaccccaaaccgatgcacaatgttgatgaaaaaatctctagctttatctgccgtgattgtgatgaccagtttagcttcaatccacttggagaatttgtcgatagccacaaagagatgtgtgtaaccgccaactgcctttataaacgggccgaccatgtcaagcccccaaaccgcaaacggccaagacagcgggatggtttgcaactcttgggctagcagatgagtttgttgggcgaaaaattgacaaccttcacatatccgcacaatcttgtcagcatcggacacaacagtaggccagaaaaaaccttgccagtaagccttgccgacaatggtgcgtgcagcagcgtaattgccacagataccagaatgtatatccttcagcaaattgtctcctttcctccaaagacacacagcgttgcacgattcctgatggacttttcttgtacagctcagtctcatgaataatataaagcctgctgcgcctggaaatccgctcggcttcatctttatcttgggggagttcttggttggtcagaaattgtatgaggggctctctccagtcggcttcaaccatggctatgtcttgagtgtccgtggcctcagctgtttctctccttggtacggttggttcgtaaagatgttcgacgaacacgtcagaaggagccgcttcgcgtttggatccaaaatttgctagtctgtcggctgcttcattattgtgccgaagaacgtgggtgagtttgagtccatcgaacttatcctccaacttgcgtacctcttgtcgataagcgatcatattgtcgtcaaggcaggaccactctttcataacttgattaacaactaactgtgaatctccgcgaactatcaaacgcctgattcccaaagagattgcgatccatagtccgtgaaggagcgcctcgtattctgccacgttgtgagatgtagagaaatgtatccatagcacgtagctcagtctttctccagtcggggaaattaaaacaaccccggccccagtgcccgaaagtctctttgacccgtcaaagtgcatagtccaatactccatcttctcctcgagcgtgtcctcttggcactcggtccactcggcgacgaagtcagctaaagcttgggacttgatcgaagttcacggcttgaacgatatatccaaggacatcagttctaaggcctattttgtgatccgcccgtttgcttcacgattatgaagtatatcgctgagtggaaacgatgtgaccaccatgaccgagtgaccttggaagtagtgagataatttcctgacggtaattagaacaccatataacagcttctgaacttgaggatatctcgtcttggagtcggccaaaacctcgctgacaaagtagattggtcgctggactttctgaacatggccttcttcttcacgctcgataaccagaactgtgctcacgacttgagaagttgccgatacgtacagtaatagcggctcttgtgggtgtggtgaggccagaactggtggagtagtgagaagtttcttgaagtcttcaaaggctttctgtgcttcgggtccccactggaaattgtctgttttctttaacagcttgaagaagggcatcccccgctcgccgagtcgtgaaacaaaccggctgagcgccgccatgcatccagtcagcttttgaacatctttctgggaactcggcggtttcatgttgaggatggcgttgactttctccaggttggcctgtatgcctctatgagacaccataaatccaagcagcttccctgacggtactctgaaggtgcattttttagggtttagtttcatcctgaaagcgcggatgctcgcaaaggtttcttccaggtccgtgatcaaatcatccttctgcttagtcttgacgactacatcatccacataggcttcaacattgcgaccgatttgagttgagaaacgtctctggatcatgcgttgataagttgctcctgcgttctttaatccgaaaggcatggtgatgtagcagtaggccccaaagggcgtgatgaacgaagtcttcaagcagtcggattccttcaatcggatctgatgatatcccgagtagcaatccaaaaaactgagcagctcgcagccggcggtcgagtcgactacctggtccatgcgaggcaacccgaaaggatatttggggcaagacttgttgaggtcggtgtaatcgacacacatgcgccattgcccagtcttcttccgaactaggactgggttagccagccaatcgggatgaaggacatctttgatgaagcccgctgctaatagcttggtcaattcctccttgatcgtgtccttcctgtcttgtgcaaagcggcgaagtcgttgtttgatgggtttagcgtcttccttaacatgcaaagagtgctcaatcacctctctaggattaccaggcatatcggatggtttccacgcaaagatatctttattattttgaagaaaggtgatgagcgcgctttcctatttacaatctaactcggcgcctattacagcagttttagtaggatcagaaggatctaggggaattttcttggtcttggcttcgctttctccagtcttggagatcttggtcgtagccacttctccttcgcttgccgtggttgcggccagtcggatgtcttctcgggcgaccgcgatctcgcgggtttgggccatctcgccgctttccttatcgcatgtgacggcttgtttgatgtcgctccgcagggatatgactcctcgaggaccaggcatctgcatcatcatgtaggtgtagtgcgggacagccataaatttagctaacgccgggcgtccgagtatggcgtgatacgctgtctcgaaatcagcaacttcgaagcagacgttctctgtgcggaagttctcccgagtaccaaaggtaaccggaagagtaatccggccgagtggtgtggcagataaccctaggatgactccgtggaagggcgcattactcggcttcaactcggtgcgagggatctgcatgtcgtccaaggtcttggcgaagaggatattgagtgcgctgccgccatcgatgagggatctgcgaagcttgatgttgcgaaccactgggtctagtaccagggtgtaccgtcccgggtggaccactcagtctggatgatccgagcggtcaaacttgattgttgtctccgaccatcgaagatattggggcgtatcgggctgaacagcgttgatctcccgttcagtcagcttttgctttcttttagactcgtaagccagagggccgccaaagatgtggttgagttccttgcgatgatcttgaaaacctgtcggggcatcatcatcatcatccttctttttcgatgtgctttgttctccatcagaggtctttcgtgcattcttggcatattgctctgcaaactgcttgtagacgaannnnnnnnnnnnnnnnnnnntggagttgggatgatgcggacattgggagttcatgatcttgtcaaaagtgttgacgcgcgaacgttgtcggaggagtgtgtggtagtcgcaacaagttcctcaggcttacgcttgcggtccttgtgattgttacttccaacccctcccgtagtcggcacatctttctttggcttccaagtaggacccgactgcttggatgcgataatggagtcttcggctttggcatactcgttggctttttcaaacatctgtttgaccgtcttgggaggcttgcgtccgaacttgccgactagatcttcgtgacgaatccccttggtgaaagcggcgatgatgacgtcgtcggtaatgtcagagatcttgttacgttgttcagagaagtgtcggatgtaatctcgaagggattctccagacttctgaatgacgttgtagagatcaaactgtgtgccggggcgaaggtgccctggaagttggcgatgaagtggtcgcgaagttccgcccatgatccgatcgtgccacgtggtaacccatgaagccaggaccgggcagaatccgctagggccacaggtaagtaggttgccacggccttgctgtctcctcctgctgcgcggattgcaagaccgtagatgataagccaagactccggattagtggtgccgtcatacttctcgattccagtcggcttgaagttggctggccaatccactcgacgcatgtcgttagtaaaggcagctactccatccacgtcgtcgtcgtagcgttctggtgaatggcggtgggcatggcctcgtgctgcacggcgctggttgatcgtatcacgaagatcgacggggcaccgacgaggtggggagaaaagccattcaactcggcgctacttgtgtcgctcaggaggcgagtgaacagatcgctcgtcgtggcccctgctcctgcgattggatcctgcgccggcgatgctgaggcttggctggtgataatcatgagatcggagatggggaacccggctgccagtcgacatgcggacgcttccggagttaaccgggaccgaagtggcaatcatggtcttggtctggttcaagatgttgacgacttgatcagcttgattgagtgcgtcttccttgaggagggtgtcgaggagggtgattttctgcgacaacgttctgttgaggggtacggaagaccgctgtcccctcaacgtcttgctgcccgatgagatctcgcgctcatcgccctgcgtccaaggctcgttgtcgtcggtcctcggcctcctttgcagcccattcgcgttcttgttgctcacgctgcagccgttcttgctcttgtgcttggcgctcctcttccagtcggcgtcgctcagcctcctgttgtacgcgtcgtgcttccgtttctcgggcttggcgttgttcttccgtctcgttgtcggccatgaaaacgctgaaatagagaggggtgtaattatcttcaaagctttcgtcaaagtcgtcgaggtcgcggttgtcgtatcgatagctgaattcgtcgtactccacgatctctgttggtcgtgagtcgacgcaaggggaactgaagtagccttccaattgatccgtcgaaaccgtgccgagtggctggagtatgacgccgacttccctggagctaggcaggatcggtgttgaagctgagttccgcctaggcctacggggaggagacgcccttgtagtgaagacggcagccaaatcgtcggggagtttcatcaggattggcgggtaggccccatcatctcgatctggtgttgttggagtagatgggatctcgtccgagtggtttgaagccgactcgatcaagataagcttggggtagatcttggccgagttcggaataccgaacggggctgagacctggtctctccctgactggttcgaatctgagtcaaggagagagatcttgccgaagacgttggtgatgaagtcgaggttgccgaaccgaaacgcctgcccgggagggaagacgaagtcgtcgatgccggagacggaacccattgcactgatcggcgaaaaacttgacgcaacccctacctggcgcgccaactgtcgaaacaagatttcggcaatactaaaagggtgtggctatcaagctaaaaaagtggatgggtttgaagacaaggaattttatacaggttcaagccttcttagttaagaagtaatactctactcctgtctggggatgattccgccgagtgtattattgatcgtatgatctgggagaaagtcgtgtccctagagggacccggacccctccttatataggggaaggagtccgtattataaaatactgttcatatccctaacggaatatgtgattatagataaattacaatcgtaaccgactagaatctcaggtatctccttgacatacaagtttagaaactaacccgagtcctcataaagatattctatctatatctggtaccccgtacccaaccagactatacatgccgtgtagatatggggtatccataatctccacagtgtcaattctgtcatcttggtaggaatcatatatataatgggtgtaacatgaacatcaccggctgcaacaatatacgctctccatatttataatgggactttcggaagaatgggagtggtcgatctggacaaatttgcgagagcactgagagtgtgatggctatggttcagttgggtgtgcccaaacaagccttgggcagtgacacacccccaccttgtgatgagctcaatagaaaactatttggatcagcaactaaggtggagactgatgcaaagcaattatttgggaatcgaactggattggggaacaaccactcaaggaatctgctccgactttatacaagcatgccaaaatcaaagtaaggtcagtccaggaaagataagctaatgaccaatgggtagacgatatctggcgcaacctcacaaatcagctagtcaaggcgtactttgaggtattcaaccaagtatggagcaacggcatcaccctcacggaaggtgtcgacgataccataactcggagatggacgagcaatggaaaatacagtgcgaggtccgcctatatagcgcagttcaatggaaggataataccggctgcagcaaaactaatctggaaacaatgggaaccctccaaatgcaaacacttcctggctcttgctacaaaataggatttggacagaggatcggctacagatcagacaatggccaaataattgtttttatcaactatgttataggaacctagaaacaactcaacatctctttaaagattgcccttttgtgcgacagatttgggagagggttctaagtaggctgaactgtagtgaaattgacctgacagatgatgaaaatgaactattgctagactggtggatcaggaaaacatctcaaggtgggaaagacaaagccaaagcaataaaatcagtccacatgctagtagcattggaaatatgatgtgagcagaacagacgagtgttttggaatcaagaaaaaaccatgccgcaactgcgggccaagatacaggatgaaatcaagctatggagcatatgtggagcaaaacacatcgcgagattatcaacctaatactcattgattgattagtggtattttctacttgtcttttcatccctcttccctttttcccttttcttctttcatcgctggtgatcatgtaaataattttttccctgcttaatataacaccaggttagcctggagtgttgggtggctgctgcattactaggtgtgtgaatagggtggtggtttaggattaggagtacattgacaattcttctatcaatctatattatatactaatatcccactgcacatcctacaaatacacttaagtcatcacgtgccacttctataaatgctagaaaatctgaggaataagaaaaataatatagctattgaacgtttttaaattggggcatttgcaaatttgccaccggttttttcaattttgcaaggatgccactcgagtgacagttctagtggcatttttgcaattttctagtggcagtcttgcaataacgattcaaagtagtggtaaatttgcaattgtcccttttaaattagtggacccattattttaaaccattttgatttatctgaatgcaggcacacctcctagccctttttaatcttatggttgttcagttttaatccatactttgttatagattaagatatcgactggtcaaattaattccttgacttctctcacgggaggtgaaatcggctgtagagattctcctcgatggcaagagcttcggttggggtatggaatagatgagagatgataaagatagatgtgctagtagtaaactcacaaatacattggaggaagctgggaaaggatcatagtaagcatgattttgcatgcttaccatcgacgttatgttcttctgcgtaccaacgaactaagttagtttggttggaattggcaaacattatcttgatgtgttcggtgatcgggaggttcaccacaacctctacgggccactccttttgacttcttactttcatcagcactagcatctattgtatctagaactcgtgcatacaggacaagcatctaagtcgacgtactcttattaagacaagagctatgctgcaccgatatatagcacaacacagttctcatactctgcttatgagctcaacatgtctaggtacgtattagcaataaatcgaggatcaaaattatatcgatttatctgcgaatggaatgcatcaagaaagaagtgctccgtagacctgcatgtacattctaggattgcaatgctgctatgacatgtcaccctagatcaaccgcgtggttggggttagtatcggtctccttagatcatgtcctctactatttgtcaccaattctaaagcgctgattggggttagcatcggcctcctaagatcatgtcctctactatttgtcaccaattctatgtcctaatatcatctactcgagttttgttgtgctttactgttcaagaccgggaaggtttacaagtgagcgcatacaagtttgagatctctacaaactaaacagggcacacaacatagcagaatagaggaaacacgtagaaaacgagagcgtgaactgctcatgtttcctgagttttctcttttctatttttgtagaaatcaactagtatactcgaaaacgtacatgggcagtgcaacatgggcacgaactgagaaaattctggacaggcacagccaatcaacggagtcatgcaccgccacaaaggagacgactgattttggagaacaaatcagaattctaagtcgagaattccaactgttttaatcaacaccttaattactctatacattatcatgaaaaaaccaacttgctgcatgcaaacgaagataaatgattctccctccgtttcacattataagtcatttgacattcttcctagtcaaatgtctttaaggttgaataagttcatagaaaaatatagtagtattttcaacacaaaacaaacatattattagaatatattcaatgataaatttaataatactagtttggtattttagatgttgctaaatttttctataaacttgatcaaacttaatagagtttgactagaaaaaaaatccaaataacttaaaatatgaaacggaggaagtagatatctcagagccattgcaacatccaaaccacctatgcaggggtggcaatatcattccaaagcagatgttttgtgtggcaatatccaggcagtagaggaaggcactgggcaaggctggggtggaggttgagttcccaacaggggaaaccaccggctacaactataatctccacttgcccgagctcatcgccatcgttcagccatcactagggtggagctcacaccggtgtccctgcctattttgccttctccgcgtccatctccggccggtgagcaggagtgagaggagatgccctcggcgaggctggccttgagaggctcattgctctcctgcctcgctgacccagccttaagtgccggccttccatttcaccccactgtggagtcgctaaagccatgaccatcaacgaagaggcatttctggaggccacgatcctcgtgctagggcatatgggctctcactcatcttacatcacatgtatgaccgcaggcaacgatgtcttttcgccaatggttcacagtagatccaggggttatttttttttaaaaaagtcacatgtaggagaaaaagtggggaaaatggcacacgaaagagaattagtgaggacctgatgacaaacatgaacgaaatagtaaaacccggagctaattcttattatttcttcctaccacaccacacagtacactctttttatatacttatcagaacaacaataagattctgagcattatatagtctgatttcttgattacaccgcatatctttaatcccgaaatcagggccagagatctggcttttcattgggccatgtggctccctacaaatttggttacacccttcaaagatttgccacgtgtcaaagtgatggtattcacgggtgtggatcccctggagttgtctccaaatccacacggtggatttacttaatccaagccgtccctttaatttgatggattagattaaatccaatcccttttcccctggttacaactagcccgttttatttaaaagaaatactacaatgtagagtctataaaaaaatattatctagtatagtagagaacatgttaccttcaaactttctggcaacaattagataagaacaaacaaaacaaaaatattgcaccgatagaagtttcttgttctgtcgattattaggatgaatgagttcgatacaggtctcaataccgttaatttcataacaactcagttaaaaaagtttaaagataattattttttactccatgatctataatgctcttccgagagtattgatctgaatggacggacaacacaaaaaaataaaagtaaataggattatatctgttgtaaatgtgtaattagaaagaggtgacatggctacatctagcccatagaaacaaagtaaggggtcagattggtccaaattcaccggttggagttggaagccaactccaggggatctgcaccctggtattcacttcgcgagatagccgaaaaacattcgcctggatgcacttgctgggtgggcctggccctggcatcttgcaaggccatg

SEQ ID NO: 2885 - DNA, 1068 bp, Oryza sativa
gtcattgttggattcatgccaattgttgtgtgcctctaccttgcatcaatgtttaatccaatgggacggcgatgatgatgaaattgttcaagcggatacatcggccgaggttgcaatggccgatgctacttttgagtggcgtcatgggaatatccaatgcttatcggggagggatctttctagctatgattttattagtatatccgatggcaaatttgtacctatttctataaagccggctagtgtagcatggctaagccatatatatttgtataatgagtaaagaggctaatttagagtggttacaaaaagggtgcaagagtatcggtctacaaagaacgatattggtgaaaccgttgaagattttgatgaagtggacaagcttggacaagggtttacatcggccgatccattggaagaagttgacataggtgatggaactaaaccaaggccgacttttgtaaataaaaacatgagagccgattataaggttaagataatcgagctacttaaagagtatgttgattgctttgcatgggagtaccatgagatgccgggacttagccatgagctcgttgagcatcggcttccaattaaaccgggttttaggccttataagcaaccacctcgtcattttaatcctttgctatatgaccgagtcaaggaggagattgatcggttgttgaaagcggggtttattaggccatgtcgttatgcggagtgggtttctagcatagtcccggtggagaagaaggggagtggtaagattagagtttgcatagattttagagatttaaataaagccactcccaaagatgagtatcctatgcctatagccgacatgatgattaatgatgcctcgggtcataaggtgattagctttctagatggtaatgccggctacaatcaaatctttatggcggaagaggatatgtacaagacggcttttaggtgcccagggtttgttggtttatttgagtgggttgtcatgacctttgggttgaagaatgccggtgcaacatatcaaagggcaatgaatttgatcttccatgatttgctaggtattat

SEQ ID NO: 2886 - DNA, 3196 bp, Oryza sativa
ggattctgaaatttttatactcgggaaaaccacagtactcccattcttgaaattcaacttaactcatttaaatatctagagaatctagatagagaattacttatatggatgcggtcctccggacaatacatctcatcatgaaaacgaaatacattcaaatttgaacaaatatatactcgatgtatattatattatcctttactatcataatttccaataacgttaaaaatcatattagatggctgtggcaattcagatctagcaactaaattcttctctaaacagttcaattgacaaagattttcaaattgaatatagccccatgtatttgaagaagataacgatttaagctcttcattctctctaaaaatgtgaataacatgtttaaactcaatatatggtggttcaagcatagaattaacatgttcatttactagttgtggcatggatataagtgaagcatcacacatctcttcttcgtcgttacctaaaacaacaagcaaatttttttgtgataaagatattttagtaattgttttcactattggatactctaatatagcgtaagtagtggacatatttagcgcatcataactatgcataccttgagtaaatgtagcatcactatcattaccattatcattatcgattgtaacatgatatgctctatcgttaaccataaacctatttaaaataaattgtggcaatgcttttgctctgctttctcgatttgaaaatttagcactttttgcaccaaaattcttacattaacttcaattgtagaaggtgacataccaactgtggtttgtctcccatccaacattatctcgtgtcgatgagtgatataacctgccgttgttagtagaaaacagtaaacaatacataagaacaagggtgatggaactcgcaaatagaagtgtcttaccgtgctctaacaatgttcttaccagcaaaggtagggatggtacaaccgatgcctgataatgataccttgaggatgtgatctaacaattgcaaggttaaaactgggatgacaaaaaatatgtatgtgtagcttgggggcataatatatagtagcaaggaaaagcatttgtgctaatcagtaaatacaaagttgaataatagttgaaaatactatattgagctctagctcaagtaagcacccgacaacactaaatcctagaaacaactcaaagaacaactttgcactccccaaacatattaaaaagagaaatgttttcttttctttttcttttttattcttttcccttttttgccttttattggtgcggcttgttagcaccattttaccttttctctttttgatctttttttcaattattacttatcaatgaacttcgactagggactcaaaagtaaatatgaatattacagagactcaaatgtaaaagacaaaagttatatagtgactcaactacaatgtaccgtttatgtaaaccaaaatttggtcactgtaaaacataaagactatcatcataacctacgtcggatcgacactaaattgggccaaccaagtggagcaaggtaagccttgacgcgatggaggataacttctctaatctaatctaggtgcacaaacaagcacgataagacagacaaactctaacaatgtaactccaaaactaaccgacataaatttatgcaaactataaaaacaaaaaaccgacaacaacatgttcaattttccatggtcccgacaaaaacagattcttacaaaattggacctaaactcactaacatgaaatactaccgtcaaagtacagactaagcggcaaactcaaacctaaaaatacctgactcaaaacaaaaaattaaatctaaaactaaaccaacactcgacacgatgatgcaacctaaaattcaacaaaacaaaatctaaaagagcaataatttatgttcacaaatataacgcgtaaatctcaaatggaaaatatacaccttcgtttgatgaatacataaggtatccatgattatatttgagctagtgatgtcattatttacttttctagcattttaaaatgggtggaaacagtgagcgcaacttgaagagacaactgtaggctgttgagcgaaagaacagctaacattggcatttgagatacttcgcacagacctccaagctaaaatcattgctcatcaataggttatccctgcgctgagagatattcttgatctagtgctacttttcttaccgatgcctctcattcctatagcaatttcttcctaaactttctaatagcatggattcattgttgtacggttgatgcattgataatttgagatggtgagtgcatcagtgcttgagaggctcgaagctaagtacagcctgcggggttcctgggcacccggctaaaaaagaaaaattagtgcttaacacccttacttaccgtatgggcaccccccttctcccagcttagtgtaccccctacatcagaaaccagaccacaggagacacacgagcggcccataaacacagcatgagttatgttgcagtctgcagttatttatgagtacagctgtatgcacgcatgtctttgtcctttctttttgtccatgagttacattgcagtttgcagtctcctctatcttttcttctccttttctaattctttacaagttaatttgattcattggaagaactccggtgaaagataagttttgaattgtgtgataatagttgtcgttggagagaaaaaaatatatacatgctgtgatgcaatgtaaccatggtaggatagtatgtatagttactgtcttttattttatctaaatattgttgcatgactaaaaatgagatgtgcatttatggagaatttctttaaaaaaaactctggttaatactagaaatgcaaaaaaaagtaagcatattaggcatgataaagctcaaggatgattataattttccagacaaatcgaccatttattttattttttagttaagtatttcagaaattttatggtcaaaacatacaattttgactgaatgtattatcctagacactaaatattcatgactaaaataaaaggaagtattctactcgatattattaacctaactccattgttacttatgttgaaccattgatggtgataatacatgaaaacattataatttactataatatagcttgagaaaaaaatttgctactacagtgctgcaccaaccccccccccc

SEQ ID NO: 2887 - DNA, 10133 bp, Oryza sativa
cagcgaagttatctccctttgacctgcatttattcgcccgcactgccatcaagtcccaagtcctagccgacttcgtggtcgaatggacgccagcattcgcccctgaacccgagcctgtcgaacaaccttgggtgatgtactttgacagttcgtggtcgcacaagggggcgggcgccgcggcagtactcactttgccaggggctgcgccgattcggtacactgcaaggctacagttcgatacgaccaacaacacggcagaatacgaagttgtactgttgggcctaagaaaagcgaaagcattgggggttcggcacttgctgatccgaacagactccaagctggtggcaagtcatgttgacaaatcttttgaggcaaaagaagaaggaatgaagaggtatctggaggctgttcgatctatggaaaagtgtttcgccggcataacggtcgaacacttatctagatgccagaacgaggaagcagacgccctggtgaaatctgctgcttgtggaggctcacattcaccaggcatcttttttgaggtcttgtacgcaccaagtgtgcccacagagagcctgcacatcatggcaattgaccaggcagaactgggcgaagacccagaggactggcgaacaccgttcgtgaagtacctcaagaacggttggctcctggaggatgaagtagaagcgaagcgcctacagctcagagccgcaagatacaagctgatctcagggcagttgtatcgctccggggtgctccaatccttgcttcgctgcatctcctttgccgaaggcgaggaagtggcgaaagaaatacaccaggagctgtgcggtgcgcatcaagccgcaagaacggttgcctccaaagtgtttcgccagggggtatattggtccaccatgctaaaagtttgtgttgagcaagccaagaagtgcgaaacctgtcagcggcatggccgaagccaagcagcaccccagtatgagctgcaacctatcgcaccggtctggcctttcgccagatgggggttaaacatcattggccctttcccagtagcgtgaaatgggtacaagtttgcaattgtagcaatcgaatacttctcccgttggatcgaagccgaaccacttggtgcgatcacttcggcagcagtacagaaatttgtatggaagaacattgtttgccgtttcggagtgccgaaggaattcatcactgacaatggcaagcaattcgcctctgaagagttcagagagatgtgcgaggggctaaatctagaaatcaggttcgcttcggtcgtgcacccacagtcgaatggggcggccgagcgtacaaatggcaagatcctggaggcactcaagaaaaggcttgagggggcggcgaagggtaaatggccagacaaaatgctatctgttctttgggcccttcggacgatccgtacaaggccaaccaagttcagcccgttgatgcttctctatggtgacgaagcaatgaccccaacagagctaggggctactaatttgccaagggtgatgttctctagaggcgaagatgggcacgaggtgtcgctcgaactcctcgaaggggtaagagtcgaagcactagaacacatgcgcaagtacactacaagcacctcggcaacttacaataaaaaaagttcgaccgacggagctattgcctggccatctcatcctaaggaagaaggcgaacccagtggcggtcgggaaacttgaatcgaagtgggaggggccatacctcatcaagcacaggtccaggacgggctctttttgcttggtgacgctggaaggcaaagcgtttctatgtctagaagggtagcaccccattcgccaacttgtaaaaatgtacacactattgtataggcctttcggcacctctcgttaggtaagcccttcggcacaaaaatacaaaaaaagaggaaaataagaaaagaaaaaaaaattggatgtagggctattatccatcctggaggcctgaaccagtaaaaaattcttgtgtctttcgccttttctttacttgtgtgaatgataatttgtcgaaaaaccccaaggcaaacgccttatcagcgaaaacgccagggggcgaaacgaatcagccgaagcatcgctcgccgaacgttgaaaccacgacagcttgtttcggaaaataaataacagaacaccgttatactcgatttatgtgaaaacacaaatgcttctttcagcgcagaacaccacagatcaaaagcggaactcgaaagctgaaaagtcagcagacctatttcgctaatatacgcaagggggccgacatgtttcgacctaacgaacgcacgaaagttgactatgcgaacaatagcgaaaaggaaataaaacacatctttattaacttcaaaagatatcgaagaatacatgccatacaacatggtacaggtcaaagaaagtaacgggctttacagcctagcttacaaaaaaattacatcttcacccccaaaacaacctccactccctaaggtgtgatttggcgaacttggttcatcatcactactaatattatacactatcctaagaggagaagggagcgaaacacaaactaggccatagcggcgctgggcgatcgcttcttggcgatcagtccttcggtgatttcgccaaaagcgggccatgtcctcccgacgttccacatggacacggtcgtagtcatccaaggttcgcccggggtgcgcccgcatccagccgacaactttcaaaaccttgtaactattgccgtttattatcatctcacgacaagaatacttaatcttcagcaggcctttaatcgcgacgaatttctcattcttgttctgccaatcgccaaaaagaggccgaacacacacctttcggcgaaaaccctgctaatacaacataaaaaaggcaaatggcaaagtgcatggttaagagggggcgaagcacataaagtgggcgaaaaacgtcgcctctttttggtgtgcaaaaataatggaagcataaatatcaaagccgaagaaacaggataattggcgaaacttgattcatctattccatataccaaaaaggccgtttccggctacagtacaaaagggggaacactagccaaattcacaacgttcgccctccgtggccaacgcacagagtctaaaaatctaaaaagactgggcggagagcctcacacctctgggtgatcttggccgacatccgccccagcgcccgcatccgcaccaccttcttcggccgctggctcctcacgctactctgctgcctctgcctttgccaagtgttcgagcaggcgcgccttggcagtgaatcggccctccttttgccagaactgtttgcgccaggcacgaagtgcgggaaaaatgtccagagagctgacctcccaatcacccttcacaaacttggggaactcggcaacgtgctcggaccaattttgttgcagcaggcccatggtgacggccactgacagatgcgcgcagcaatcgctgtacgtagtggcgaaatcggagaccgcaccaccggcctgttcggtccactccaagaagtcgaaggcagaagtatcttcactagggattcctcgcaccttcgcccccatgtcagtaagagcgaggcaaagcgtgcgacacgcggtcttcgtggactcagtggctttcgccatctcccgcgtcaacctttgtgcgtctttttcagcagctgctttcgctttacgggcctcctggcgaagagcctccatcttcggctcggtgaggttgtagtattcagtcaaggcggcggaatgattttgttcttttttaagctcggcattcagacgcttgatctcggccttcgcctcgctccccttctctagctcaactcggagccgcttgttgttagcctttgtctccttgagggtgtcggcgaggctctccatttctaggctcttgcggcccagttcgtcgtctttagcttaaagacggtttttgaagccatcaagacaagcccgtacggtccgctcagtcgaacaatgagttgcaacaatctagttcaagaaaaaaaagagaaagggggagaagatgatgatcgtcaacattagttgtggaaaaacgatagttaaaaagaaagaaaaacaagtgacatacccggacagctaagctcttgatggcggaacagccttcgtcgaactcgttcaactcagtgaacaggctcaggctgccagtcggagaaacgagattacttaccccctcgacgaaggggataagatccgcccgagtctcgaaatcaccaggggcaaagtggggtgccgcaagagaatactccgaagccgacgtttcagcagccgttttcttccccttctggatggcgagcggcgacaccaccagtttgctcagagggcttccgaagagcctggctgcggccctcacaacccggtcagcaaaagctgaagttccagtggcaacgctacctcctgctccgcccgcatcgaccgtagcaccgggagcggtcaaaagacccaggctcgtagcaggcgaagttggagtctcgtccgaagactcgtcgtcgctaaaaacgcatgcgacattgacgggccctttctttttggaggtcttcttaactgaaccccccttcgccagcttggccgcttcaatcgaaaccagcgccttccctccctccaattcctttcggccgaggggggagctgttcgactccaccccagtttcgacatcgtaagggcttggagttggggtgtagccgcgcgtctcagtgcggttgtcggcgggctcgtcagcggccatttcggccgcgagctccgtctcccccttatcctccccttcctcttcgccatcatggtcgtcgacagtgtcttcatcgtcggcgtcagagtcggtggaggtaggggcctttctcttccgaggagccaatttgacttgtccgcgtgtccgcttcctggaggtcccttcatcgccatcggccttgaagggcttcgcacggggaggaagatcgccatcgtacacccgattcgcccggccggccgcctgccgcgtaagcagctggctgaattcaacgatcgacacatagccgatcatcttctgggcttcggtgtcagcctgagcaagagttaacactgcaaaaatgaaatgtgtcatcatattacgcgtcgagcaggacaaaagagcgaaatacacatacatataggaaagcagaggcttactgtttgccccctctggcatgacgagctttggcaagccattgacctcctcgtcttggttcacctcgacttgccacgactgggagagagggaagatccggagcatgcaaaactcttccaccaggttgcggcagctaaggcgggagcagagcttgcgaagcagggtgaactacgcttccatagcgccttcgacgacgactttgggcttcctgttcggcatgatcaccctgcgctgccattagagggctttcaccgactcggacccggcctcgaaggggatggagtggtagaaccacttcgacatccaatggcgatcccacttgaacatagcggcattgaccggccaaagatcggagcgctcagggcgaacattgaagttcacgctcccgaacgctgtcttcttcgtccccactggagtaaccaccgtcttctaatttacggtggcataaaaaacggtgccgaaaaactcggcgctcggttcgaacccagcggcccagcacgcccagtcgaagatggcgttctggacgagagccgatgggcttagttgggggagctccacctgaaaaaggcgaaggatctctggcaacaacacgttgcacggaaacagaaggcccacctcgaagaacatggcaaagaccaccgtccggttgtcaccgggcttcggcaccacagcctttcctgggggaaaggcctgcttctctgccaacacaccggaggtgaccagcttcgccaactcatcctcattcacaagcgaaccccccagataggcggtggtgtcatcatcgatcctgctgggatcagggcccgtcacggagggtaggttcagcttgcgaggggccatggcgaaaagtgtgggcggtggcggaaagaggaacgatcgaaaagtctagagactcaagagcgtcgtgaagtcagagggtggagaaagagagagctcgccatgaaactgacaggggtgcggcggtgaaaaaagggggggaatatattacccacccaggcgtcgattcgccttcccacccaatcgtaagccgccatgtgtcacaagtgtaggtgaaacggtaaattcccattcattgagccgcatagtgctaagcccacgaagggaagccgtcactgttcattgcggccaacaggaaaaaataaggacggtttcaccatttgcaaaaggcgaaagctaggaaaaattactaaccgtaaaaatacatatgcacaaagtgtatacatttcctgtaggactccagtataggtttcggcaggagtgtcggtcgaaagggggcgcctcatatcataccacatggtttgcacggtctcggccaaagctcccaactcacccttgcccgtgaggggcttgttggcggtatgtcatgagacccttcgattagacctaccaaaaccatgcaaccagcgaggatgcaggcttaagacgctaaggtcatctaggtgaagctacatggcgaagactatgaagtaaagatggcgaaggctgaagagtcgcgttggtatcccgcaagaccaaattcgtcttgggcgaagagtacatggcgaagggtgtataccgaaggaaggagacttcgccataacaagcccaacttcatggaggcccaaggggccatcccagccgctcaggcctgttcgccaattggcccattagaggcccatgtatccaaattacactatgtacccacatagacgttcctttcataagggcagccatgtaaattccctagtaaaacctaaaccctagtaggggaacctgtaataggattataaatagcctcctagggacatgtaaagtgaggatcccaagaaaaattctaaccaattagtacatttactgtttccaacactgttgagtaaccacgtccttcgacgtgcgcagttgttacttcgacaatagctaatttatacaatagttacctataaacatatactacactattaatacatggtcccacctatcatacacatattgcattttggagtccgtgctgcagctggctatatatctgtagcccgctgctcttatatatctctcctcctttatctcattgatatgtgtttatagttggattatagtctgctattgtacccgctcttatctacacattgaacgtgccagcagcgtcgtcgcttcgttatcccgtgcatcgccccgtgcaatgttgtcgcttcgttagcccacgcatggcctcgtgtcaccgtcgcttcgagtcgcgccatcgctcgtggcctcacgaatcacgtcgtgacgtcctggggacctgataacactgcatgatcatccgagccgtgatccaatctgcagaatccatcccgcccatggtcgatctgcgtcatgtcgctgttgacccatctctgtgatcgatctgcaagccatgacggacccgctgttgccctggcaatcatgtatactccctgttgtcttctcttccaagcaatacctatttcctgcacatgtcatcacctcttttgttcatagctacagtccatggcaacactggatttcgaccaaaacaatcccattgattgcgacctaaacaatcccgttgattgcgagatgatgaaggtgcaactcgattgcaaagaatctggttgtgttcggtcaattaattggaatgccactaatgtgttttctctttttctttttggtcctagatggagaaggacaagaagaatgtccttgagaagatgagtttaacaatgcacattcacctctcgctcctcaccatagtgaccgcgatccccacgacatcgcctcccactccgcctatgccgactgagaagccatctcttgctctggccatgtcgtcatccatgatccatcgcctccatgtctttcagtaggtgtgagaagaaacatcgcccgtgctgggttttggcataggaagctccgacgggaacaaaacgaagcgtgtgcgatacgaggctccatgcaagattttcggtgcctcccctcgtaatacacaaaatggatttttttttggtttttttttttttgctatacgacgattatttaggaacggaggaagtaaaagccttattccaaaagattattaaagtctagtagtattccatctattaaaggcgcaatgaatttttgaatgttgatttttttttcttttttgcagatggtaggcaaatatttcctactcccactcgcatatatcactactaaaaaaatgttttttttatgagaccccttgatttttgcaaacggaacataactagtgacgtctgcaagaatcgatggtcatttttgcatgcggccggtatgaaaaaatcgattttcccatacgggtctcttaagagaattgcatgcaaaaatgagctcatttttacatgcggctcacttaagcgcccttatgggaaaatcgatttttccatacaggctacttaaggagccgtatacgaaaataaaatttaaaaaatttgaaactggtttatctcactcatatgaacttccaattagatgattttttctaaatgtttctaaaatcatgctctatcatgttattgtgtttttattactattattttggacattttttcttgtgaatttgttatatcaattaaaattttgaatttcaaaacttcaaataatattttaaagcagtaaatgattttagctaaaaaagtcatctacaacaaagttgtataactcatcaagaactataacaaagtcgtataacaacaaaattgtataactcatcaagttataggacgtcccaaattatatgtattcagtagtaggcatcttttagagtagggatttacttagattatttttgaaattgcagttttgccgcttgttctgtttgtggaatcccaactttgttttttgaaagggatggaacctcatctttgagatattaatcattcatcggcaaattgagatgcaatctaccttgttcttacttatgttctttgattcacacgtagggattagccttcttagaaaggtcaacagggtttcagcacagttgataaccaaagaaaacgtggtgttgcgattgcagggttcggatcgtgttgatcggaagctgaatcatgtgtgccaagttttcgacaaatcgatagttacgcgacctagttccacatcattttattttggagctataggacattaggagaaaacaaaaggaaaaggaaggagcattaacaaaatgacattttatttttcacaaagctggatggacatatatcaaaatgatctccattattatgtaattaataacgcggaagcaagtttgtatgtcccaaacatactagtccttgcattaaaaatgaaattagacatgtggccgaactctaggatgcagtttacaagccacatctttttcttgacacccctgatcgaatccttgacgtggttctgtatgtgtcgtttttcttcctatatcctcccattcatatagcgatgcctaccactttagaagagaacttggggattgaaacatattgactaatcgcgtagggcaatatactgtgtacaacagatagaaaatgacgaaaatacacctgcacactattacatttaatatcttagcacttgaagcttgctgcgagttcattgtagtagcatactagcatggatgcgtcgagaatttgagatgcggtatatatagagtagttctgtacggaagaaaatcaaatcagatgatggcgttttaattctccacgcaacttttcagtgtgttcacaagaattaacagagaaaaatgataatcggtattgaagatcatatgattgagggaccagaaaatcctgtgtatttttgttgtgaagagcaaggcattgaagacaaccatatttttcatatattagatgtgcgttaattttcgaagataaccaacccaacaacacaaattaaggactattcatgcaaaatttatcttttttggtatattgatgtaaaattaccataaaattctgcttcagccctcgcatgggctgcagga

SEQ ID NO: 2888 - DNA, 5126 bp, Oryza sativa
  unsure (1)..(5126): unsure at all n locations
atccgttcggccggccagaatagaagaagatagaggtgggttttgtttggggatttttagtgaagttgtagattatttatatttttgttgcactttgttccattaagttgtttcgttctgttttgattcattgttgcattcatcgatttttggtgttgcaatccgaatgttcaactattgattttggttgaaataattttgcttaagaactgaaacattttttctctcctagtgaaactttttgactctgaatacatcgattttttgtgttgcaataagtatgttctactattgatttgggtaaaacaattttggtcaagcactgaaacattttttctttggtagtgaaacatttttggaacattttttattgaaaattttttttaacagaagatgaaacatataaaacatctctcaataacacggtgcaacaccgtccaacaatcttcacaggatcggacgtaagatcagtagcagcctccgtaaaatgctccattgaatcgctataacgcaaaagtagaaaataaatgactttgcaaacaatccgtgtaaacaagcagactcggttgacagtaacctacactagaattgagaagcgatttaatcgatatacgattaattaggtgatgcaaccattgcagtgacttgtttagtaatgaaaaccatggaaatcgtgttagcaaaaaaaattcctaaataacaaattcgggaaagaggttaaaaaaatatgtagaaaattagtttcgtacttcttgacaaccatagctgaggactgtggtggcctacaggtaggggagacagggttatctcaagggccccgttacgatgctctctacctatagttgaaaaaaatatgaattattgatcttatttatttagagggttcagatatatttatactatcgcattaagagcaaggtcaatagtgcagcccactactagcttcaaatcatctataatcaatataatagccaattcatacaagttgcttactatactattaatatatggacccgcctgtcatacacatattacatcttggagtccgtgctgcagctggctacagatctgtagcccgctgtatttctctctcttcttttatctctttaaaatatgtttataactagcttatagcctgccatatgtacatggtacctgcaaagcatgtatagccattacacgtgatgaaagaactgattatatatgtatagaagcccacaagccttttaaaattagtagctaggagatacccaaaaatactgtcagtacttgcgccacaatcagaaagcatcagcacctttgaaaccgcgtgatttctctcgaaggcctatgctgtcctaagcaattggtgtctctaggatgctattaattaattaatcaagttattttatgttatgaaaatagatgcacaacggagacacgaattttacgtggaaaacccttacgggaaaaaaaacacgggcgccaatcggcaatgatcactatagaggagttgattattaacgtaggggaatcacaatgggaacgtcaccccttcccgtacggcttacaagagtatatatagggaataaaagaaagatacctaataggatagatatgaagtcctactaggaaactaatccaaatatattgtggccccaaaattcagatcacatatttaacaatctccaccttgagacgaatttcctcttgtaacatgaaaaacttcaaacaccaaaaatacctcatgtaggtaaaatcaccgcgcgccaaatggtctctaggactatactgtaacaccaaccaagcttgagcaaagctcaaacttagtagcagtaactggctttgtcatcatatcagctgggttatcatacgtacttctcttgcataccttgacatcaccttcagcaatcacacctcgaataaagtgatatctcacatcaatatgctttgttctctcatgaaacatctgatcctttgtaaggcatattgcactttgactattacaaaatatatcaacacaagacgtaactccacaaagctcagtgtacaaacctctaagccaaatagcttctttacaagcttcagaaatagccatatactctgcttcagtagtagataaggcaacagtggcttgcaaacttgccttccaactaacggcacatcctccaatagtgaaaatataacctgtaagcgatcttctcctatccaaatctccagcaaaatctgaatccacataaccaacaagtccatctgtagatatcccaaactgcaaacaagcactagatgtaccacgtaggtatctgaaaatccattgaacaactttccaatgctctttgccaggattagccatgtatctactgacaacactcaatgcatgtgataattcaggacgagaatataccatggcatacataagtgaaccaactgcacttgaatatggaactctagacatgtactcaatatcataatctgactgtggacataaatctgaaaataatctgaaatgtgcagctaaaggagtactcactggttttgcatcatgcatattgaaatgatgaagaacttttttcaatataacctttctaactaagatataacttgccagaatgtctttctctagtaatttccataccgagaattttcttcgctgcacccaaatccttcatctcaaattcactactcaattgtgccttcaactttgctatctctgatttgtcttttgcagcaatcaacatatcatcgacataacgaagcaaatatatagctgaaccatcaacaactttgagataaacacagctattataattggatcttctaaacttctgagaaagcatgaaagagtcaaatctcttataccattgtctaggtgactgctttaacctataaagagatttcttcaacctacagactaggttctcttttctaggaacaacaaaaccttcaggttgctccataaaaatgtcctcttctaactccctatgtaaaaatgcagttttaacatccatttactctagttcataatcatgcattgcaacaatactgagtaaagtgcgaattgaactatgcttcacaacaggggaaaagacatcattaaaatcaatacctggaatctggctataacctttagcaactaaccttgctttgtaccttgcctcatcacttggagatataccttcctttcttttgaagatccacttgcaacggataggtttcttctcctttggtaacttcatcaattcccaagtatgattcatttcaagtgactccatctcatcatgcatagtagttatccatctattgcaatcatcagaaacaatagcctcagaatatgtagaaggttcggtattaccttcaatttcttccgccacactcaaagcataagcaactatattcgcttcttcaatatatctttgaggaggtttagtatttcttttgggctaatcttttgcaatagaacgttttgaagactactgaacagtagaagaatctgaatcttcaaaaacaggtgcatcttggttaatagcaccatcttctttttctggtgcatgccctgaactaatcaagtgctccacctgcacacntgctttctcctgactctcaacaggaacattagtagaaggtttgtcatgtaacataactgattcatggaagacaacatttcttctaatcacaacctttttagtttcaagacaccataacttatagcctttcacaccagatggataaccaagaaaaatgcacttaatagctctaggctccaatttaccattattaacatgagcataagcagtacaaccaaatactcttaggtctgaataatttgcgggggaaccagaccatacctcaattggagtcttcttatcaatggcataactgggtgatcgattgataagataacaagcagtggaaacggcttccgcccaaaactgtttaggcaaacctgcattagacaacatacaacgggcctttgatataattatcctgttcatacggttcagctacgctggttttgtagagtgtgtgaggaacggtgtagtgacgcacaatgccttcagacttgcaatatgatttaaatatcttagaacataactccatcccattgtcagtacgaaggattttcaccttcctttcagtttgtcttccaaccattgttttccactctttaaacacatcaaaagcttgatatttgtgcttcaagaaataaggccaaacttttcgctaataatcatcaacgagatagtcatcatgtaacgagcacctccgaaagatgtcttacgagcatgcccccataaattagaatgcacataatcaagaataccttcagcagtatgtgtagatgtgttgaacttcacccttttatgcttgccaaagatgcaaagctcacaaaatttgagcttcccgatgctttgtccatctagcaatcctcgcttgctcaattctgccaaaccattttcgctcatatgcccaaaacgcatatgccaaagattagtagcatcggaattagataatgaatcagaaactgctgcaacattacctaatatagttgtaccccgcagatagtacaggttggcagatttaatatcagctttcatcacaacaagagagcctttagttaccttcaaaattccgtctccaccggaatatttgtaccctttgcgatcaagagtacataaagatatgagacttctcttcaaatttggaatatgccgcacatctgacaatgttctgatacagccatcaaacatcttgatctgaactgttccaatacctgctaccttgcatggtgtattatcacccatcaaaacagtaccaccttggatagcttcataggtggcaaaccaatccctattcgggcacatgtgataggtgcatgtagtatcaagaatccactggtcactagtttgtgcacaaccagcataagcaacaagcaattctacatcagacttctcatcagtaacaactgcggctttaccttttggtatatactttccgggtcttttgtctttgtcctgtaacttccaacactcagagatatcatgtccatctctcttgcaggatttgcatgacttatacctggctctggactttgatctcccatggtagctacttgagcttttatctcttgattgggtctctctgttctt

SEQ ID NO: 2889 - DNA, 1668 bp, Oryza sativa
aaaggggaaatggggagctagggttttcagcctaaaaccagtcaacattttgatccaaatcaacatgactaaatcactgatttaaatatttgcgtatatagagcaggtacttttttatgatgagtttactagttaattatttcattcccattggatacaataattttctttggtatcttgcctctatcttaatcaatagtctatattgttcatctctcgctacctccacgtaccatataagcaccgtaaaatgttaaatatatgatccgaattttgggcccataatatattcggattagtttcctagtacgacttcttttctatcctattaggtgtctttcttttatctcctatatatactcttgtaagcagtacgggaaagagtgacgttcccattgtgattcccctacgtttgttgtcaactcctctatagtgatcattgctggtcggcgcccgtgtttttttcccgcaaggattttccatgtaaaattcatgtcttcgttgtgtatctattttcataacaagtggtaccagagcattggagatcaatctactaatcacgtagccaccggtgtgattttttcggatcaaagaaatcgatcttggcgacccctatcgtctcgtcgatcacgcgagaatcagcagcccgcgctcgtcgagagaaatcgcaggagcagcaggacgtacaggcgtcttctaccagcgcacgcgccgaggaaaagcagcagcgtccaatccatccatccggcagcacacgtcccgaggagaaagaaaattagtgcaagtgctatggtagatgtgactaccacatccaaatttatccatatcattcatttataaactaagaggcaactcatacaatatatcacatctagtacacaaatacaaatgtctctaatactctcacatctttcttgaaatttgtatggaggttgcctcttaatttagggttggctcatcatgtctctcctcacttctctccttcacctcatcatttaatctaatgtggcacatttatgggcagcatatggagcattatagtacttgcctgcaggcagccagcccttctgttcacgtgatttttattcatgtggaaattgctacggccaccaaagcttgtgtaccaggaagattacagatctacgctacgtgcacacagaaagtacacctaggttttgcgtttttgcttggtttaccctaatttcttactagcaaattcatgattaattcccatggcaagtttgaagtatgatctaccgcttctggaccgagacacaagattctcactttggcaagtgaagatgcgagctgttcttgcacaacaagaccttgatgatgcgctttctagatttgacaagaggacacaggattggtccgtcaatgagaagaaaagggatcgtaaggctatgtcatatattcatcttcaactatctaacaatgttttgcaggagatgcttaaggaggagacagccgttgggctgtggttgaagctggaacagatatgcatgaccaaggatctgaccagtgagatgcacctgaagcaaaagttatttttgcacaacttgcaagatgatgagtccgtgatggatcatctctccactttcaaggaaagtgttgctgaccttgagtctatggaggtaaagtatgatgaagaggatttaggcctta

SEQ ID NO: 2890 - DNA, 8793 bp, Oryza sativa
ctgttggacatcccacggagagcaagtggttgaaatggaagaagatgaagtgaaagacgacaatattttggattttgctcagtacgctggatttgaaggaaatcaaacggatgaggaggaaagggatgctgatggtaacgacgttgcagatgatcttggtcagatgttgcaggacgccaaggaggactgtgaaagtgaaaagggggcccataaattggacaagatgttagaggaccacagaacgtcgttgtacccaggttgcgagcaggggcacaaaaaattggataccactctggagttcttgcaatggaagacaaaaaatggtgttagtgacaaggcatttggcgatttattgaaactcgtcaagaacattcttccggagggaaacaaattgcccgagacaacgtatgaggctaagaagatagtctgccctctaggactggaagttcagaagattcacgcatgtccgaatgattgtatcctatatcgcggtgaggagtacgaaaacctagaagcatgccttgtttgttaagcactaagatacaagatttgacgagatgatccagaagaagttgacgggcagctaacgaagaagagaattcctgctaaggtgatgtggtatttccctataatactacggctaaggcgtttgttcagtaacaaagggaatgctagaatgatgcgttagcacgctgaagagcgtcaataggatgggatgctgagacaccccgccgatggttcgcagtggcgaaacatcgacagaaaatttaaagactttggaaagaacgcacgaaacatacggtttggtttaagtacggatggcatgaatccttttggagagatgagcagcggccatagcacttggcccgttacgatgtgtatctacaacctccccccttggctatgcatgaagaggaagtacataatgatgccgattattactcaaggccccaagcaacctggtaacgacatcgatgtgtacctaagaccactagtcgaagatcttaaactgctgtggaagaaggaaggagtccctgtgtgggacgaggacaaacaggaggagtttaacccacgagcgctgttgttcgtaaccatcaacgattagcctgcacttaccaatctttccgggcagtccaacaaggggtacaaggcttgcactcactgtatggatgaaacagaaagtacgtatcttaagcactgtaggaaggttgtgtacatgcgtcatcatcgattccttgctgcaaaccacctggtacggaagaaaggcaagcactttgaacataaggcggaccaccgtacgaagcctaaacatcgcagcgggaaaacagtgtttgctatggtgaaagatcttaaagtagtgtttggaaaggggcctggaagccagcctatagagagcgaagatggtcacgcagcgatgtggaaaaagaactctatattttggaacttaccctattgggaattcttggacgtcagccatgccatcgacatgatgcaccttactaagaacctttgcgtaaaccttcttggcttcctaggtgtatatggaaagtcgaaagatacactggaagcacgtaatgatctgaagcatatggaacaacgcggcgaccttcacccggaaccaaaggagaaaggaagccattacttgagtccagccagctacactcttagcaaggcagagaaggaaagtatgtttgaatgcttggagagcatgaatgtaccgtttggatactccatgaatataaagcgaataataagcacaaaggagataaagttcacaaacctaaagtctcatgactgtcatgtgttgatgacacagctgctaccagttataataaggggtatccttcaagacaatgtccgagcaacaataacaaagctatgtgctttcatgaacgcaatttcgtagaaggtcatcgatctggatagattagaagcccttcagaatgatgtggtgcaatgtcttgttagccttgagttgataattccacattcatttttcaatataatgacgtgtctgctttgcaccttgtcaaagagatcggtattctcagccctgtgtacctacacaacatgtttcctttcgagaggtacatgggtgttctgaagaaatatgttcataaccgtgctcgtccagaggcaagcatcgccaaggggtatgaaacagaggaggtcattgaattctgcgtagaatttattgaagaccttcgcccaatcggtacccgaatcacgccatgaagagagactacggggaaaagggactctcggaaggaaagcaataatgacggtagacaacaatttatttcgtaaagcccatttcacggttctgcaacaatcttcattggtggctccttacattgaggagcacttggctctagttcgtgccagaaacatcggtaagtccgatgcatggattacacggcatcacattgatactttctccgcttggctgcgacaacatctcatgggtaacgagacgattaaccaacaaccagccttcctagcgaggggaccatctggctcgatcacgacaatccaaggatatgaaatcaatgggtacacattctacacgagagcctaagacctgaagagcacgaaccagaacagtcctgttcgtattgatgccatgggacacgatggtacaactggcacgtattatagtaccatcgaggacatatgggaacttgactatggacctctcaaggtccctctgttccggtgccaatgggttaggttgcctggtggaggcgtaacgattgatgacagtgggatgacaacggttgaccttaacaaggttggatactcggacgaaccttttgtccttgccaatgatgtaacgcaagttttttacgtcaaggacatgtctagcaaaggaaaaaggggcaaagggcctgacgagccgaagcaccacatggttctcccaagaaaaagaaaaatcgtcggagtagaggacaagactgacgaggattacgatcagtttgatgggcaaccccctttcacggtgacgattgaccctagcatcctcctatcaaatgacgacattccttactcacgtagcgatcacaagaaagaaacaatagtgaggagaaaatatgtgcggtcaaccgtcaccggcgatgtattgccgtaattgttgtgtacacgatgtaaactattttggatgtattgaatatccatacaaatcaattgttgtatggcatatgttaattatgtatgatcattacaatttttatcaaattgaaatcatctatatgctagttatatatgattattagaatttttaaaagttttaaatcatgcatgaggtatttacatatgtaattagaatttttaacaatttaatatcatgcatatgctaattatatatgattattagaatttttattaattttaaatcatgcatgtggtatttacatatgttaattagaatttttaacaatttaatatcatgcatatgctaattatatatgattattagaatttttaacaattttaaatcattcgtgtgcttattacatattatccacttagtttactacatacaacaataatttttcgaaggttttgtcattaatttttcgactttaaataattgtaatgcattatttactattttagaaacacatatgtaatgaaattcgaaattcagtgctattatctttagtcccagttcttaaccctaaccgggtttaaaaagaatttggaaatagcgggaagatatctttgctcccggatgttctcaccaaccgggactaaagatctaggggtataaatattcccggtacgtcctcgtcttctccaccaacacttagaagtttttcctccaatcgatctcggcttctccttcgccgccactgcctagggaaaccccgcaccaacgccgccatcatctctcaccgtcgtctcgcggtcctcgtcgcctccaccgccgacgcatctcttgggtgagagccgcgctgcctctctctctcgatctcgatctctctctctctcgaaaccgccgctgcctatagctcattgccgacgctgccgcacgcggccgaccccgaccccgactccgcctcccgccgattccgaccccgacttcgacgcggctgccaccgctgacgacataacgtccacgcaactgccacggcgacgatgcgacacgccctgccacgccgccttgagctcgccacgccgtcgcgccacaccgccgcgacgccacgccgccgccgcggcatgccgccgggtcgcccgacgccgccggaacgcgcgccccgacaccgccgcgacacgccgccaccgcgccgccacgccgccgctccgctgccgccactgccgcgcgccccgacattgccgaacgtgaacgaatgtgaacgaacgtgattgaaacgtgaacgaacacgaacgaacgtgaacgaaacgtgaacgaacacttaacgaacgtgaacaaaacgtgaacgaatgtgaacgaaacgtgaacgaacgcgaacgaacgtgaacgaaacgcgaacgaacgtgaatgcacttgtactaaaagtgtgagaacgaacgcgagcatatatgattattatacgattattaaacttagcatataatatgattatatatatatagttgaaaacgtgaaatacaatatatgttcctttgcatttagactaatacattttcctggtaatgttgtagagaagacgtcgtcgtcgtccctcaagctgaagttgtagctagccatcgaaggaattcgcgcaggcaagtgatgtaaagaagtgattgttagagatttaatataagattattagagttttaatataagattattagattattagcatatgtgagtgttagattattagacttagcatatgtgagtgttagagattcgtgatagacttagcatattgtattagacttagcaaatgtgagtgtcagagattattatattattagacttagcaaatgtgagggttagagattattagattattagattgttagacttagcatatatatattattattacaattttaatataagattagtagcgatttaatataagactgttagacttagcatatatgattattacaattttaatataagattagtagcgatttaatataagattgttagacttagcatatatgattattacaattttaatataagattagtagagatttaatataagattgttagacttagcatatatgattattacaattttaatataagattagtagagatttaatataaaattgttcgacttagcatacatgattattacaattttaatataagtttagtaaagatttaatataagatcgttagacttagcatatatgattattacaattttaatataagattactagcgatttaatataagattagtagagttttaatattacgcttagcaaatatgacaaatagacttagcaaatatttcttgtatgaacagatggctgatcgcgatgaggaacatatactgtacgatacaatcgcagagggaagcagccagtattggaacgaagaagaggggaacgaggatccaaaccagtacttgaacgaggagaggaacatggagagggatgcggaggggaacgaggaggggaacgaggaggaggaggctagtggaagtcatccctccgctggacagaagagggcacgcggacaacgaggtgccatgaagaagatagagggtcggcacatcataactgaggtggacgaagacggccgaccaagtgccccggcagaagcagccaagaattttgtatgccacagcggttgggttgtgagggataacgtgcctgtcagcatggtgtactggcgcagaacaagggcacgagggggtaatgacagctttgtctcggaatcagagaaagagatgctgtggaccacaatgctcgagacgttcacgctccctgcgggtacggagaacatagtgaaacagtggactcttaagaaaatggctaaacagttccagagcttcaagggagatctctacaagaaatacatcctgaagggactaataccgaacttcgacgtattcccaaagctaagagattattgggacgagtttgttgcttagaagacagggcaacaagggcaagcgatgatggttagaaacaaagaaaatgccaccaagaagaagtaccatcaccacttggggtgaggcggctatagcatcgcaatgccgaagtgggaggagatggaggcaagattgattgagaggggtatcgaaccggccaccgctaaatggccggatcgatcgaagttctggtactatactcacggtggaacgcttaacccagttgatggctcccttgtcttcagcgatcagatacgagggaaaggcgtgattccctggaagattggattcaaggaggacatccacacgtacaggagtcggatgaggagcaagagagataccgaggtgaagattgcaaatcttcagaacagggtatcgagttacgagctcagcatgcaagaggaggtggcaaggaagatggatgaatgcatggccgcacatcggtcccaggatccccagccgtacattcctcctgcaatggtcagcccattaggcaatcatagtagttgcgcctcaacggggtaggtaggatcacagagcatggacgccatgcaaacccaggacgaaaccacttgccccgttgatgagatcacgcaacggacaccatgtgagctacatattcccttcaagaacttatcaatcaaggtatgctcatagttttatgatttttgacttgtacattccgcaagttgctgcttaggttgattactaatagataacctctcatcacatgaaggtggcgtcgggaatggccatcccaacgaacatttcagggacttaccactgcaggccgattccagcaggatactcgagggtcgaagttgaactggtggaagccgcgtacaaggacctcgagttggactacctaggaggagacggtgagacgcatctatgaaacacaagccatgccattatactatggcgcaagcggtacatcatcctccttgggcgacaagcgacgtctcgtgcaccatctcctctggctccgccatctcctcctgcaccatctcctccggttcctccgccaagtcctcctgcaaaatctcctccggctcatccgccacctcctcctgcaccatctcctccggctcctccgcctcctccacctccaccgtgtcctcctgcacctcccaagacaaggtctcgccaagctccaccgtctacccgcacaagggcaacgaagaaggcgaaagttgacgccaccaaaaacaaggagccgtcgtacgattacagttaagaggagcttgatgcttatgtggcaggagaagtgaagaggcaactcaagcctcggagtcctgaaaagaagatacctattgacccgagcgtgaagaacttcttcaagggaatgcccacaacaaataaggaggcgttaaagatatcggactatgaccgaacacttcagaaagcctatcacaagaagtccaaaccagtcccttagcttggagaacaaccaaaccaagaggtcaagccgttggtgaccggcgaagattttggcataacggtgtaactgtggatcagctgattggaggcacaccaatcccgaaggcggaagtagcatacaagtttgagctcggtaaaccgcttgtcacgcctgagcagcagcagtccctaccgacacagatgtacaaattccatgaatggtacatggaaatgagcgccaagggtagagagatgttcggagcgaggattagaaactccgacttcttgcaaggaggagatgttctctggatccatttcaaggatgtcttcgatctgtaccatctagacgccctcgtcgtctctcttctgagcgcatggatttcgtaagtatctttgagttcgatttgtttcgttcaataactagctccttgcatatatgtaaacaataataatttcattttttcgttgtagaatggagattcaaagggcccgacggcggggggcttacgatactaggttcatcgaccctcgaaaaatcaacaccgaaatgatcgacaagtacgagaaagtcacagaggacaatctcgtccatctcctaacgccgcagcatttcaagacgttcatactactgccgtacaatccagagtgagtttttattgtcgttcgaacaaatttcattcccatacatatagcatgtacattttcatatatatctcatctcacgcatattccagattccactggtcctgttattctttgacttggacgcatgcagagtcactgtgtatgactcaatgaataaagaggagaagatttttgacaaggtcttccaaccgatagacaggtaatataatgccatctattccaaagtcgcggggattctattgctattatgttgatctcgggtaataattaattaatcatagcttgtagctgcatatgtagggcttgggatcgattccgtcaattggtccgcgggacttggaaagaaaaacttggacggaggtttcattttccagtgagtacatgcatgatccaaaattatattgaattgaatctctaattacagttaatataaagagtatattaaatctcccatcatttctcatgtagtgtgcaaagcaggacaagggaactaacttatgcggctactacgtatgcgagtatgccaactgcctatcaaaccaaatatgcaccagacaagagctcgatgtacgtatacataaaccattcaaaatttcattgcgtatcgatttgttaagttgtttattaatttcatatattgatatttcattatttttcgaat

SEQ ID NO: 2891 - DNA, 827 bp, Oryza sativa
taatatttttaaagtttatacggataaagtttatacacctaaaatttatatagtatgttataaactcaacccgaatttggattaaattcagataaaaaatgttccaatgtatttatttacatgtataatgtttacgcacacagatatttttatattttttttctttcaaaccttttttttttgaatttgttatcaaaaccaatcaaaatgcatacatgcgtaggaagaagagaagaaaaccgcagtgtcctggtgggtgaggccaagttgactgtgtgcggtgacgcggtcactcatgcataagagcatctccgagagaatggctaagtgactctccaagccaaattttagccatagcagagaaaaaatagcctccaacagcatctccatcccactggctaagctatatggttagccaaatactccccccaactggctaaatctagccagccacaaccacatccctaaggctggccaaatgctctccccgctacctcctctgatgcaatggcgaggagtagcagcgttgccatccgtcgcagcaccgcggtccctttgagtagcctctctctctccagcactgccctccgccgcctcgaacaggtcgtgcccggcgcccgccgcggtggacgaagtcgacagcggcggcgttgacggcgtcaccatgggcgtggacgacgccagctgctgctgctgcatcggcacgccgtgcgagtggtggaagtgctgggacggcaatgaggaggagaagtgttcatccgccccccttcggccgcctcatcgctcgccgcagccgccggcatcagctcggcgcagcgcgccgcctc

SEQ ID NO: 2892 - DNA, 2564 bp, Oryza sativa
caggactaaagataattggagcctgaccctacccaccaatttctttaaaccggcactaaaaataatctttagtcccgattgtatgagtgggtatcgtagtacttagattaggatcaccggcgactggctcgccatcccactgcccatgagttcggcatgcggatcgagctctgtattaatttagtgatgggtcttcgacgatgcatagtagatattttgcctcacctccggccacaaagggagtagatcttttctagtagtccattgaatagttgtgctatactaataaaaaaaagagagacatttaactatttgtcattcttaagatgtgatgataacagatttaccactcgatgtctaacatatgggccgcatgtgtctatgacatgtggacccagtgacaaatctgttatcactacttataaaagtggtaaatagttaattattccttaaaaaaaaagaaggcaaggaaagagtagcggaacgcggaagagaataaatgggctgaagagaacacaaccagcctgcaggtttcgatgcaaagaaagacgtaggtgattcagcccgctttacgggcctatccaccaggatttggttgggcggcctagcgtgactacagcccatgcaagggaagcacgattgccaccgccgatctccatcgcaagttacggcctgtgcaacactgagttggcgctaggattaaggccgagcgagatcggatatcacatgaaatggaccgtactttctccactaaggagaaggagagaactctatgcgggccggcgtagcaaaatgcgtggcttgcccacaacttttctggggagtaagtccactttgactaccttaattaattagtggtcgaatctgattcgtatctctaaatcagaataccggatatctcgaccccaactattaaaaccaatgtaatttaactcacatcagcgaaattgcattggttttaaatagttagggttcatgtatactaatcaaattatgtcactaaataagggagtcaaagtgaacttattcctatttactagagaaatctatggttgatctgaagagggcccagaaaaccgatgggccaacttttaggcccagtagagctgggaggaactcgtctactgcacgagaaggattttcccccttctattcccctttatctttgctggcctagacttttttctatcgtattgggctttttgaggggcttttagggcttttcatctagatcaggacaaattcaataggtgggaatgggataccaacctgggctcctaatcggcgactggtcgtgcgggggcgtgggcgtgggcgcgcgaccagcaccactcccacctacaatcctagtactacttgtcccgtagtacactagtactactcctaattgctgatgctgcctcctatactactactactcctaactactccgtactgctgatgcctcctacactattactgcctacgaggagtcggggcgtggctcgcccgcgcggcgcgcctagtagtactacagtagcactactattagtagtacctaataaaaaatatattttttatatgtatatatttttttatgtgtaaaaaatatatacaaactttatatacgatatatacaaattttgtatacaacgtgtacaaactttatatacggtatgtacaaactttgtatacgcacgtattaaaaaatcgaaaaaacccaaaaaacatcatgtatacaaactttgtatacatattaaacccgaaaaaccaaaagaaccaaagaaaaaccgaaaagaaaaaaaaacagaagaaccagcggaaaaccaaagaacaacaaaaaaaccggacacacgtaagtcctccagccgcctagcccgccgcgccccccgcgcgcgtggccgcgccgcgcgggggagtaggggcgcgactagtcgccgattaggcgtttcggataacaaccgcttggatctcagcacacacatgtgtattctatatttttttaagttgatttaaatttaatatttttaaagtttatacggataaagtttatacacctaaaatttatatagtatgttataaactcaacccgaatttggattaaattcagataaaaaatgttccaatgtatttatttacatgtataatgtttacgcacacagatatttttatattttttttctttcaaaccttttttttttgaatttgttatcaaaaccaatcaaaatgcatacatgcgtaggaagaagagaagaaaaccgcagtgtcctggtgggtgaggccaagttgactgtgtgcggtgacgcggtcactcatgcataagagcatctccgagagaatggctaagtgactctccaagccaaattttagccatagcagagaaaaaatagcctccaacagcatctccatcccactggctaagctatatggttagcccaatacttccccccactggcttaatctagccagccacaaccacattccttaggcttgccaaatgctttccccggtacctctttgatgcaaggcgaggagtaacaacgttgccttccgtcgcaaaaacgcggtccctttgagtagccttt

SEQ ID NO: 2893 - DNA, 6545 bp, Oryza sativa
ctgtgatgtatttctttaagaatttgagttgtagttttttgagaatttgtgatgtgaatgattcattgatttgaggatgatactttgattttgggatatttgggatatttggggagatttgggaaggagcaactatttggaaagaaacaatgaaaataaaaaaaagaaaaaaatggtgaccaaccgggactgtgctgctatctttagtcccggttattatttcaaccgggactaaagatagtgatctttagtcccggattcatagtcccggttgaaaatccgggactacaaaggggttgccaaccgggactacacggagcttgctgcaacttatggtaaataaaccacggttaatcagcaaatagttaaaaatgtgcctgtgtcaaccaagaatagttagtagttgagttgttcgcggtgatgttgcctaacatgaggtgcttcaatcttcattagcacactcgtttcttgtacaacgtcctattcattctgttccgtcacgctagggttcaatgacaacagttgatgatcgattaggcagcctttaattgctgtgatcaatggagatgcacgtgtcctaaaaacgaacatagatagagatgcccatgtgtgctgtgacgtcgcataaaagtacgcatggacgctagccgttaacataccctcacgtcccaagaacaaatgattctaagataaaatagaacatttcatagtaaaataaatctgaacataccaaaacaaattcgttgtaatagaaaatgttatattctatattaggttagtttattttaggacgaaatgagtatactgattgaatgcctttgatacttaacagatagcggttgtgtcaactaaagataacaattttagtgaaaagagatggaaaggtagcattaaccattgttttttattctaatgagacaacacaacatatatttttcgattgccaaattgccagaggtatttggaaggccgtatgcatagcttttggctcgaaccgcctactattgccgctaacttttttggtaattggctaaatatcaattctttgtgagaattgcggcattgtgttgagctatttagacctctagaaataattggtgttcaatggcttcaagattaagttatttttgcaggttatcttcaaaaggacctattgggcgaggcaatggtcttaatcgaagatgatagcaaccagtgaaagagggttgcaaacttttgaagttaagagtaagtttagtggtatttgtatcatgttgggctaatggttgtttggaccttgtgtaaggtgtttggagactatgcgctcgtgtattggccatgtacatcctgttaaatttagaggctgggtttatcgcgttttataagaaaaaacagatggaatgactactatttcacatcacgtaaagctccaggtgagatacatcggtgcttgcaacttactagccatgaaagacaggtgtaaaatttaaatactagttagtgtatttttagtattttagtccacttctattgcacatatgaatctctatattaagttacattgtactgacttgttcacccgaagcaaataagaataattatctcttttttttcatgtgtgtataaagatgtcagatttgttaaggagaatatcacaaagctactaagaaataagcaaatatttttttttttgcatatgtgtatccagaagtcagatttgttaaggagaaaaatataaaaactactaaagaaaataaggacctcatgagatcaagatagcctaaaaaagggaggaagttcacagggcttgagggcaagttttatagtggaggtggatgtcacatctaatttagatcatgtcatcttctcattacttaagaggcaacacataaaacatatcacatctaatacacaaaccccaatattaatctactctcacatcatcttgtacttttcttggatattgtgtagaggttgccccttgcatgaggagtggctcattctctctctcctaactcctctcctccacctcatcatctaatcttatatggtaaatttagaagcaatgtgtagagactcgtagtacttgccctcaggggttgccttctagacctttttaccttgtctgaaaaaagggcctctagggagtcagctatgaaggaaagcatgcgatgttcatagccaaattaatgctaggatgttgattttcatatgctttctccgaaaaagaaaaaaagggacagcaataggtggtactaaggttgttttcaccttggaatgaatggacatggtgatgaccagattcgattctcttttccggagatacacatacaccactagtagaagagactgtcatagcaccttgccttcctagaaattgataccagagagggaccatcttatatgtcgtgatcagtaaggatccatcaccaaacagttgggatttctcccaaagatgaatgagacgtccatcaaagtatatactacccagtactacttactactcagtagtttgttcattaaggtaataaggccttatttagttccaaacttccaacttttccatcacatccaaattttcctacatatataaacttctaatttttccatcacattgttccaatttcaaccaaacttccaatactaagacgttaagacgttaagttgtctgaactctgaattccactgaagataaagtacaggaactatagcagtggagtaaccaaaccttctgcagcttacccttcagaaataaaaatggtttctgcagccgttcttcagcccaagattctaaaatggagaaaaatcagtatgtggttatgtgcagtgtaaacaattagacaaaataaacaatagtaatggtggggcagtaggggcatgggccatttgttggtatgtggcaagtctccctcaagctctgctagctcccgtgatgatccagaagccgctgcttgtcccctgcaggatgatgtcgccgtctctgaaggtgcaagtaattccagtttggctgcttgtttacggtggacgaacggccaaaacatggccattctgaaatcattttctgggctgcgtcgctctgaacatttcaatctcttggaccatccgcacattgctgttgactaactgcattctccgaatcaaaattttgatgtctgtttgctgctgcaatcatggcttttcgaaccttagaggcatctgaatccgaataatcggttcctggaaatgcatgatgctttctgctttctcccgggctgtaggttgatccatttgtcctgtgattaatcagggccaaagcgaatggtacactgattgcacaattagtaggtccaacctacatcgaaacagtgattgtaagtagatgaaagctctgtccatcgcatgtttgcttgtcgccagaattattaatgagtataaagtacgtgtcgagcaattaggtcgcacttaactacacgctttaattaattatttgcactgttttatagacttcgacaagacagagaaaacagggtcctaaaatctttaccctacatgttgcaggctcgacaaatactgattcgtacctttcaaagcttctgaaactgatacgccatatgcccatatatattcctggtctggccccacataccatgctgtgcaagtgcacgtctacgagccacatgcacccacgtggcaaggttgggcccacctctcagtccttggttgagctgattctgataccgtgggcccttttcctactgcagctcgacacctgtacccttcttgagtggcaagttgagactgaccctgagcagttcaccatcacacctcatgtcatcaggcagaaaacaaatagttaggcgagctaagcatctcaacaagttagcttaagcagttttgacaaaatcagagggaaattcggattgataacatgatcagagtcactgatgttgtagtatctcttgatctgcaactcatttatttccccagatagtgtgtgttctccatttgttcagacaaaacaatggacagaaaaccagcacaacctggacaggtgacctctagtgcctggatccagtgttcctgagctaaggtccagtttttcagtttttctcagaaacttctgcatattggtgatgcttgggcaaacttattccctgccataggattatgaaattgacaaattgtagagaacaagtcattttcagcaacttagactaatcgactgacctaacaagacattggcgacaataggaatcaaattggggcctaatcatgttcgcgaacattagactttcttattcaaatgtttcctgtctgaatcaatcggcaaattacaattgcacaacgaaatatcttccctatttcatattccaggcactggtagtattacgtcattcagcctaaataagacaggcactaagctttcaccatggtataaattagttctcagaaatgatgtcacagttcagaaaataaacacagttgagttgttattgacttctaaaaacaagcgatgtacagataatcatgccagaaaactaaattattctgttatttaaagttgtacattatcgttgtattaagaacatttcgatagatacaacgtgatgtcatatatgaaaatgtagcatatatacttaagttctctcaaatgatgtcatagttcagaaactaaacacagttgagttgttattgacttccaaaaacaaacaatgtacatataatcatgccaggaaactatattattctactccctccgttccaaaataagtgcacttctcttcaaatttgaactagaggagtacacttattttgggatggaggaaatattatttaacgttgtacatcatcattgtactaagaacatttctatagatacaacacgatgtcatatatgaaaatgtagcatatatacttaagtgatagtatagtttataagtcaaggtaaataagaatgtgaaatttgacttggaaacaagaacaacaatacaaattataaggattaattgtaccttaacttgttcatatccagaaccaccagacaaattaaaccagtcccttcgtggtgctttcacctgaagcaagcaactaggcctagaataaacaaacataaaggatccataaatatatctgaagttatgagaagctcgggaattgataccatcatgattgatcaaaaaacaagagggaaaataaattagtcttgtaccaaaacaaccattttatactcgctcgttagatagagaatatgatggagcattacacaactctccatattgcgctactaactccataattgttgtttttcaatgctccctttgtcgcaagagctcttgtgctctcaagcagctagtaactggagcaggcttctactagtctattcggctattccatcaccgcatgttcagttcagctgcataatgcaatgcaaagacaacgagaagttgtcttgtacttcgactcagcaccaatctgccatttgatgggaaattctttcatcctaacaacttctaatcatgcactgttcaagggtgcctaacttaattgtcatagttgtattaaagtacatacaggattcttcagaacatcgagcacttggaaagccctgggactcttcttttaaacaatgtaagagtaaaaacaagtcagaaagaagtaaaacatatgttgtggacaaaattcttaaggttccatgtttcgcaatttgttgcatctgtaaccctttgtttggagtgaactacaaaataaatgatacatatactaaagttagagaggtgtgcacttgtacaatcaaaatactcacctcctatcgtgccaaaatttctaatctcaatgcaatcaaacaagcagctgtactgctattcttgttctgaacaaaagttgttctcactcaaaaattactgtcaggttaactccagcaagggattcaatcagaatatcgctgatcttaaaattagaacataatgctacggcacatgagcagttacggaaacaaggaacgattctcatcgaaggaccaaggggatagagattagtaaccttatcgaggcggaattcaaagcagaacgaaccccggaagcctcgcctgcatcgtttctactagggcatatatgctctggcgctcatagaacacagaattcagatccagatggagaggacggctcgattagatgaaaatcgcaacgtatttttttctcattttcgctactccctctaccccgccagcgatctagactggaatttctcacgaggatgcgccaatatccgcgcccctcctcgaattttctcagatttttttggtggcgtttgatcgagaaagaaatcggacgagacgatgcgtgaagtcccaccagtcggcctgcctcgtaggacgaatagctttgctggaccggagcttgtacccggcccgctattaagacctggaccctttttctttcggaataagtccacttacataccttattttccgtcgagtttaattcgcgtccctaaaacgtataataccagaaatcttgccatctactaacttgcaaaaccagattaaattagatccggacgaggtcgctggcgtgtgagcttggcctggg

SEQ ID NO: 2894 - DNA, 519 bp, Oryza sativa
  unsure (1)..(519): unsure at all n locations
tcaatactactcggatacgtacggcaagacacaaagtccaggatacaaattaaatatacctggtcaaatctgtggtcaaggaaattaatccatacacaaatcagctattacatgcacaaagtggtctccaaactaatccgtgcatgtgctaccgacgattacatgtctacacggctgcatgacatggctgcatgctacggttcatccattgacaggcctcgaatcaaagttggatcacaaaccaggtttatcgttctaaattttcttatataaattagaattaattcacagatcactaattattatttgatctattattttatacatgtaccgccggccgccttcgtcgctgccgattggtttcatcgcctccacggttggtgtgcgccgctgccgttgcnnnnnnnnnnnnnnnnnnnnnnnccggcctgcctccgtcgccgccgactggtgtcctcgcctatacggtcggttggtcacaccaccgttgatgggcatcgtcatctacaccgccggcct

SEQ ID NO: 2895 - DNA, 517 bp, Oryza sativa
cctaaaagccaacgcgaaatgcaataatttagcgcgcgacgcagccttgtaacacatcgaaatcagaagtaggtgcaggagaaggagaatgggggggttaacagttgcgggtacctgtcggcgccgctcatccgtcgtgacgtaccctgcatcacattcacagtcacagacaaaccaaatcaaacaaaattatccggcggcagttcgaaattacagaaccacagagcaatcgaacaacaagtcgatgcccagatccagcggaagcggcactgatccgagcacgagggggcactgcattcccctcccccaaaaccctccccactaaaatggttccagaaaggcgagagggttacgaaccggattgagagcggtcgaagaggaaggcgaggggaacgagcagcgagcagaggaagagcgccagcacggccacgcgtggccccctccgcctcttcgccggcggcggcggcggcggcagcagccgtcgccttcatcgccacctcgccccactactgacact

SEQ ID NO: 2896 - DNA, 4642 bp, Oryza sativa
gtaatgcagggtacgtcacgacggatgagcggcgccgacaggtacccgcaactgttaacccccccattctccttctcctgcacctacttctgatttcgatgtgttacaaggctgcgtcgcgcgctaaattattgcatttcgcgttggcttttaggaggttgttttgcctgagttccatcacgtggagaaggcggatggtgacggtactgtcaatggactgaatcaggttcgcatttgcaaatcctgttcgatgatggtgactgctttgtaaatgttgtttgcttctgaaacctcaattggtgccaatgcatcgtaaggtgctcgcattatctactcctatgatgtaataaatgagtggccaggacgactgatacttgtctaatccttgctacctgcaacttagaggtgaattttaagtctagcgtgttagctttccgaggacaacactgtatccttgttggttattgcctctcaagggaaatacttaaacatttttttcatgaattatgaaaaaatagtttgcaaaaatgtatgaaaaattagaattagtatttgtagcagttggtgaattgccaatgttgtgtggttgcatctgcaacactaacacattctttttccccccttcaggatgcaccaaagaagacgcccaaagttaacagcggagggctgcagaagcataagcaaactgatcgacacacctcccgtattagcactaaaccaaaaggtactcttcagttcattttctgcagctaaggtttttagatgtgactaaaatgttgccaatgctagcatgtcattcatgaattatagatttataggctatacgaagtaatctggtaaacttaacaggaaatctagcatttcgggttacacaaagaacagtgatagtaacatgaagattatatatttatatatggacataatttcaactgcatggtccttcatcctaaatattatatgtgaactcaagttttcttcagtcccacgctcttgcttctcaccatttcccaatactttactttacatactagatgcaaatgttgtttagaaacaatgttgtcattgtgatactaacaatatgttcactgctgctctttgtttaagaagtctatatgctgtattccagttattcctgattggtcttttattctgtatgatatttatagtattctttttcatatctatacacagttcttccctcaccaaaagttgacccatcagaggctgtgaaggagtcaactcaaggcacaagagtatgctttctagcattcgaatttgtactttattttgctacttttgtgacacgttcagtcattaaaatggaattctaaggtcctgcagtaacagtagtagtaagtattatgatgctagaagttatcaaatgctatattttcaggtcaaacacatatttgtagatagtatgcaataacgccaaaaattacctttccttttagtcgtactgatgtaataacatgccattattctaataatatgatgctgaaaaatactgtgtccctgtatgtttgaaggacaatattttaggacaatgctgaaaatatactgtgtcccagtatctttcaaggacaaaattttaggacaatgctaaatatactgcatcctagtatctctcgaggatagcttcattctcatagagcgctctatttttcttcctgagaatttttttttcaacaagaggtactaacgagcatgcattgctttcaggaggttagcaaagttagaaagagactagacaaaggcacaaacacagatgaagtggaaaatgagaaggcttgtcaacttgaatttggtagctactgtctctggtccagagaacacaaagtagtcatgaaggactccattgtgaaaaggctaaaagaccaactatttgtggcacgctcatattatccaagcattgcgaagcttgaaggacaggaggaacttactgtgctaatgaagcaaaacatacaagaccatgagagggttcttagtgtatcgactgttgatgctgatctaccgtccttgtaagaattaaaattctggtgcttactcttctggtctttcacagttcatttcattgtcatcttaaagttgcagttatatgttactgaaactggatctggatatcttgcaaattacaatgccatttaaactctttatctcttaaggggaaatagttttttttttttgagaaaaatgtgcattcatctgaaaatagtatagaatcaaccgatgaataattttcccatcatcaatatataagtctactttcataattttaatgatatttatcaattgatttcagtatcaacaagaagatggagcagatggagcaaacaatagctagagcaaaatcttgcactgtagattgtcgaaatgttgacaggaaacttcgtcagatacttgacatgactgaggatgaagctcactttcatatgaagcagagtgcattcctctacaaccttggtgctcagacgttgcctaagagtcatcactgtctatctatgaggttgacattagagtatttcacatcctcttcactgggttcaaatgattcttctgctcgcaaatttagtgctgcacatggtaggcactatgtcatactatctaagaacatccttgctgcttcggttgttatcaactcaacagtgaacagttcaaaggtatgtggatggtttttattctttacagtgtttagtttttgcattatattcgaggtgggtgttgcttatattcatgttggtcttttcgcaggacccaaaaaaaatcatttttcatatcttaactgatgctcaaaatttctatgccatgaaatactggtttgacaaaaagtcatacagagaggcagctatccatgtcgtgaactatgaggatattatcaaggagaagttaacaaagtttaatgtgcggcacctgtatctgtccgaggagttccgtgttcttgttaggagtactgagcaacctgctgggaagacaagaatggaatacctatcattatttagtcactcacatttcttcattccagaaatatttaaggatctaaataaggtggttgtgttggatgatgatgtggttgttcaacgtgatctttctttcttgtggtctcttgatatgggggacaaggtaaatggtgctatcgaattttgtggtttaagactgggtcaagtgagaaatctcttgggtagtacaacagttgataccaagtcatgtgcatggatgtctggaataaatgttataaatttggataaatggaggaagcacaaagttacagagaactacctgctgcttctgaaaaaggttggtatagttctggtctatttattttcttgcgatagcatatgataagaaaagggcacaacaaagggtgatctggaaagataatgtagtgctacttgtgtttttccagtctcagtctgaaaattatttgtcccactgttttttatgcacctcatggttactattatattgcacgtattaatctgactctgttgtgttgcagttcttgacgaaggatgagacatctctgcgagcagcagcctttcctctaagtttgttatctttccaacacctcatttatccccttgatgagaggttgattctatctggacttggatatgattatgcaattgatgaagacgttgcacggagttctgcagcattgcactacaatggcaatatgaaaccttggcttgaattaggtataccaagctacaggagatactggaagaggttcctaactcgagacgataaattcatggatgagtgcaacataattccctgacaaactgacacaattgaacctgggaatcagaccaaccgatagcagtgtgcatcaacgagtctcacccttatgtggcgtactgactggatgctatagctcccaaaagcttttattgtgcactacgactacaaatacagctgtggaacaggagaagggttgctatcgttggtcataaatgtcggcagaagagtggacaaagcatgttctattcattaattgacaggattgattaactattttttttgcgatgggattagtctcaaatatggggactacatgctttgcaggtattgatgatatgaatgagtcttcaagtaaaggtgggtgtcagcctcattgtccagatactcgttctcttggaagaaggcactgtccagattgttagatagggtattcaacgagcttcgggctcatggctgtgtttcacgccccatcgattcatgacggtttttcccttcctcttctgccaataagggtaaatatatgtaatcctgatagtcattgttttttggttcttagttgttgtacatggattatttatcgaattcttcacacggaaagtctgctattggaagctttcgacacctctgtgattaacctctactgtacatttcgacttgttcttcctcacttggtgattcattcattataattgaaatttggatatgaatattataaattgtactccgtccgtcctaaaatataagagattttagatggatgagacatatcttaatactacgaatatgaatagattttgtccagatttttagtattaggatattttacatatatttaaaatctcttatattttgggacagtgagagtattatcatgggggagaaatgcagctacaatcattga

SEQ ID NO: 2897 - DNA, 1257 bp, Oryza sativa
ttacacatgagatagcctcacagatccgtcttgccattacaaagcttggatcacatgaaaagttgaagccaatcaaagatgaacttccagaaaatgtaacccttcctccatgcatgattagactactgttgttaatatctaatagatctgttgcatcaacaaacaactgcttcttatgcactgccaagttagatattagttcatccaaagcgttcccaaggcctaatttacctggcaaaatgcaacatgatacttgcaggtaacttatgagatgatccagacattcttggcaattgagggacttggattgtcggatcaagtttttggtactgttcctactgatgggatccagtccaagacatcagaggcaccaaagaccacctccaatggaggtgaagttggcgcagatgtttgtgatgcaagccctttgacaaggagaggccaaactgatgggtcattgatttgtggtgatgagccagcaagtaaactacaaaagatagacgggcaaggtgtaaattctactgccgcaatcggtgccacagaggatgcaatactagaactggttgaaggacgcaatggggtaagacatcttttttttctgaattttcttcgattggaattcatgttgttcctcgttgatgatcttagttgttgcaggtttcgttggaggatgttgtcaagcacttcaatgggtcgaaaagagaatgtgtcgtcgagatgttggacaatctggaaggcaattttctggtgtacaagaagaatggctgctacatgattatgtgaaattaaagatctgaaggaatgttaccagttggttgtcaatgctagtaaccccatatctaggaacatatacggtctcaaatgatgtatatataaaatttagtggtaatgagtgtaggcttctttccctctttatccgtatgaaaaattcacctgttcatcactaacaactgatctttagttcattcagttttttctgcttgttcagagtttagaaactagtgccgtttggccttgaaggatcatcatatccagtgaccctgattcgttgtagaagaatcagagtctgctcctagcctcaaatatgatcaagtttttttcttttttgtttctagttggttttcagtgaagactagtgtcagacacagcctggctgcgatggagcatggacttcccggtgcgatacgttcagttttgggcggaatatggatagctatcaatggcagcgatcctaatttcggcccagctaggatcgtt

SEQ ID NO: 2898 - DNA, 611 bp, Oryza sativa
tcctgcacccccctaagcgaactgttgagagtacgtttcgatttctgactgtgttagcctggaagtgcttgtcccaaccttgtttctgagcatgaacgcccgcaagccaacatgttagttgaagcatcagggcgattagcagcatgatatcaaaacgctctgagctgctcgttcggctatggcgtaggcctagtccgtaggcaggacttttcaagtctcggaaggtttcttcaatctgcattcgcttcgaatagatattaacaagttgtttgggtgttcgaatttcaacaggtaagttagttgctagaacccatggctcctttgccgacgctgagtagattttaggtgacgggtggtgacaatgagtccgtgtcgagcgctgattttttcggcctttagagcgagatttatacaatagaatttggcatgagattggattgcttttagtcagcctcttatagcctaaagtctttgagtgactagatgacatatcatgtaagttgctgataggtttccagttttccgctcctaggtctgcatattgtacttttcctcttactcgacttaaccagtaccaacccagcttctcaacggatttataccatggcact

SEQ ID NO: 2899 - DNA, 19632 bp, Oryza sativa
ttggaaaagaagtaaattgcatcaatatgtaataattacagatttcccattccaaacatgtgtagcttgcatctttcagtggtaagatttacatgaggcccggttttactatctctctagggggaaccagaaaccaggcatttagattagagtactaagcaagtcatggttctcaatgactctgtgccaatgtcaagaacatgaacatgaaattgacacatggtaaaaaattccaccctcaaaggatggcgcccattaaagtctgaagacaagaaaacatgccctaaaaaattgtgggcagaaagtaatggggaagaaggaaaaagaataggaaaatgatacggtcagcacacaaaagccaaaagcataaccaaagcagggagaaaagatgagggcaagaacaaagctgaacccatcataagttcataaccccacaaagatgagcatatcacatcatgtatttactgtttgctacttgcttagatgaaatactagtaaactagcctagatgagcctagcatcaggcatagaatgcttacactggcaacgcagtagtactggccgaaccgaactaatttatcatgcaacagctttctgcattcttaggagcaaaatggagcaactttctgggcgccaaatgcggcatttgagcaacttgattagagaagccactaggcaaatttgaaacgaaaagaggaagcaataaaggcaaaaccgaagctaatggaagattgaatatgggaaggtggcaacgactgatagatttctagtaggagttatgtgggaaactgctgcacatggcaatgtgggtgcagatttactacattgtttactgactacaagatctggagcagtacatgatttcttcatctgcacttaaagagaacccaatttattaatcacggacgacaaatgaataatgtgcagtgctccaaagtccaaagcccaagctcagaggtcagcatccagttgtttgcaaggatccacacatttctaacttgtactagcatccaaccccaaatgaaaactcagcattcagaccggaattccaggaagccaggcgcccagacttatgtataccgtatagatcaagtaactcaattctgaactcttttttttttttttgcggggaaactcaattctgaactagagcaggaacatcgtaaagagaaattacaacattattattgcctctggttaccttgctagatccgccacgcaagcaagtatgcaacgagaacaagagctggagctcaagaaaagatccagtctctgaacatttcgagctaggaaaaacagcaagattgaaacaaaaaagagtaaatttaatggaataatattgcggataagtctcctctattatttgtccgttccgtagcacagacaaaggaaataggagttctagcttctaggacggaaaagaatgttatccatcaaattcacctgaaacggcggcgtgcagtgtaactgagcagtgagcatcaatcagctagaaataggacgaatgttgcaagaattcctagaaggaaaattaagtaaaattgggtttcgacgaagtaaatgaatgaagaaaacctggaaggacgagcaaagaatcgatctttccaccccaaaaatggtacggtcccgctcataattactcgcacgaagcgtacagctgaaactcgaaatgtaagggcataatccgaaacggtcgccgctaaaaaaaaaaaaacgtttcccccctgaaaaataccttgtcaatctgaagaagaactcgtaacaacgcgacctgaaactgaaagaactctacgggagcagggcggcaaccaaaccagaatagcaggagatgaatgcgaaggaggagcgtcggggtacctccacggcggcggcggctcgtcgccggtctgtacagcacagcacagcccacggaatcccgtgaaatgcgcgcctgcagttgcggtcgctagggcggcgctcccgcttccctcggcacggcagtagctggggtagttgatccaacccacacacacccctcccttcgcggtcgcagcagagtagtgtggtaaaaagcgagagaccgagaccgagagcgtgtgtgaagtgtgaagagagaggacttcgcttgcggccagcacaggagagagagacggaaaggaggcgcatttatggcgaggaatgaaacaaggccagcaacgcagtagtatggatccaccactgtactctcttgcttacaaatcactctcccctcttttgtagcagtagcagtagtagtactactgataaatgcaagtgtaaatgctgttttgttttgttttccccttctttttcgattctactttatggttgtgtttagttaacactgaagtttaaaagtttagttaaaattgatacaatatgataaaaatattgtgtgggtatgaaaggtttgatgtgatggaaatttgaaagtttgaaaaaaaaaacttggaactaaacagggcctatgtaatactgacaaatggaaatggaaatggaaaaaaataaatttaagggtttgttttttactccaacttcataattttctaatcattttcatgcgtatgttttccgaactattaaataatatattttaaaaaaatctataaaaaattgctttagaaattatattaatcaatttttcattttttaaactgatacttaattaattatttgttttcagtgctttgttttatgcgctgaactcaacaaggctgtcgtaagaagaactacgcttagttttgatgggttatttgacttttctggtaatattcgacagtataaatgaataaatttatttacaaagttgaaatctttgtttaataaatgtgttttataaactttatatataaattctttaaaaaaatatacgttttagtagacttggaaagagtgcccgtgattaaaatggggcctttgagtaactttgcatttcaagaatgaaaaacagcccggtacaagtacataaagtcgagaaatgattgaaattggtggtggggtttttttttctataagtgggcaaaagtattactagtataccattggcaaaaaaaaaacgcaagtatcaaataggattatgatttgtatatcgttcaatctacaccatcgatgtcatccgagatccgactgctacagctatcattggagagtagtatctgagaataaacacagatgaacaaacatctctggacttgatctattctctcccgtgtagcagattgcaacggttagagtaattgcgaaatagcaatgcatgtcgtgcaacgtacagatgcctctagtaatgagatggtccctgcaataagtaagggctccttatggacaaagtaaaaaaactaaaaatagaggattgttttattgaaatcccacgaaaaaattttctagttgtgtatttggaacaaaagaataggtatttaagattcctactaaaatcctatgtaatggctttatttatggaaatttttaggatttctggacctcgtgagaaactttcgttatatctatatttctccctgaattatatgcttttcctatgaagcatccaaacaataagttctaacaattcatgtgttttagaatatccaaagattcatctaaacatgccatttcgattcctttgtttttctgttactatgtttttcatctactagttcctttggagaatgggaggcatgctcacttatgcaattttgttcaactgtcgttgcaggatcttgctggagcggtgccttagaaaagaaacatgacaaggatctactgagttgtcactgtctcaacccgacaataatagaggtacagtgtcagtacggtagaccgaatttcagttcaacaaagcattacttgttcttaaaaaaaagaaacaaagcattactgctactacctccgtcccaaatccgcggttttgcactttttatattcaatgtttaaccatccgttttattttttaaaaatatgaatggtatttttattattattggatgataaaatatgaatagtacgttatgggtgactgttttttaaaattcgttatcatatttttttaaaataagatggacgattgaactttgacacgggaacccacaactgctcttagggtgtctttagttcacactaaaattgaaaaattggctgaaattggaaacagaaaaaagtcataaatttatgtgtatagaaaagttttgatgtgatggaaaagtttaaagtttgaaaaaaaaagcttgcactaaacacggtgttaaattgggagggaggcaggagtactagtatatatactataactcctcctgtcccattttaaacgtagctatgaattttcgtattcaactttaatcgtccgccttatttattttttaaaaaaaactaaaaaaacataagttacacataaattactatttatttcatcatctaacaacaataaaatattaaccataaaaaattaaaataaaacagaaaattaaaattggatgggaaaacttattgttgtgcttaaaatgggacggtggagtactatgttacagatgtgttggttggctccatcagtgtgttgtcatctcttcacggtttttgtcaattcgtaaaaattattctatttttattctttttcctaatattggctgtattagtatgctcttaggagagtttgcaacaggttcaaaatattcaggttatgacacaagcacccacctaaccatgttctatatctactttgactaaatgccaatgcgtttttttattccatacacatgcctttcactcgcgtgaacggtagtcaaatttgatactagcacacgggtgtgagaattttgttaagaataaatgttttaacgctactgctatctagtatttcctctcacagcgaggtcagttgggtttaaccacttttccgttcaaaaaaaagggtttaaccactttgaaaagtttctgtcaatttgaaagaaatatttttatttttttcctattattggttgtattagcatgctctggtgagggtttgtaatttgggttcaagttttttcggaaccctccaccccctacccccaaaaaagtcatttattttccattttgtgaatttcgctaaatttatttaaatttgattttttttccttcaaattttaaagaatgcattctaaaaatttgatccggtggatttgtgcgtaccgaaatagtatatcatggctatgagaaacaacataatgattgtgtgcactgagaagggaatttcggatgtcatgaaaaagtatatatattctcacgtttttagcaaacgaacctaagtactctctctatttcatattataagtcatttgactttttttagtcaaagttttttagattaattaaatttataaaaaatagcaacatgtacaatatcaaattagtttcattaaatctaacattaaatatattttaatagtatgtttattttattaaaaatattattatattttttacaaactcggtcaaaccaataaaatgtttgactatgaaaaaaattaaacgacttataatatgaaatggatggagtaattcactattttttattcaggttatgacacaagcacccactaaccatgtttgtcttctatatctactttgactaaatgccattacgttttatattccatacacatgcctttcactcgcgtgaacggcagtcaaattcgagcagcacacaggtatgagaattttgctgtgaagaaatgtttcaccagtactattatctatttcctctcacggcgtggtcaatgggtttaaccactttgacagagaaatggcttggactagcttcttggacaagatgtgcttaatcacgaatcttgttttattgcaagccatgtcgcttttgtcctgtcctggaggtgatggaaacgatttttgatccaattatcgcaaggtgacgtcgaattcaggttgccgtcattgctgtgactgaaaaataacaaaacatgtctgatgtccctgcaatcctgcatagacttttcagagaaaaagaacttgcgttaggaaacaaagaggaaattgatgtgtattgtgcttgactgttcttctggaatctgcaccgaaaaaagcagtttaacgctgtatggttggaagcagaagttgagccaacaggcaacagccagccagtgattggatcaatgcagaaatgcagcagtgggcagtataggcacatgcaattggcgtctgctgacagtgtggaatcttctgcttctgcagccagggtctactacttactaatccagagtttgttatactactattaggtttgtgtttatctcagctttgtttatcatttccatgattccatcgtcagggttcagttcattgtggggcagctacctaagctagcagtttcatcagaagatcagcagaagaaaacaagtcacaggctgctacaagccaagaacctgcaggtataaggccattggaagatgtggtcaacacaaggctaacaatattattatcccaattggccactgttttgtagctggttcagtgtcaatgcagccaaaagcatgcttgcaagaaacagcatacggcctccatcttgaaagacacttatctctcaaaaggaattattaatatgtagcatataatatctgcagctgcaagcgtagtgccgatacgtatgctgcttgcattgtcatcttgcagctgtttggcatgtaggtcgatccgtatgctcatattttgtgatatactgatatgtgctgctcatgtgatgcagtggaccactggtacatgctaggtacgtatgtacgtgtattatgtcgtctgtagtacataacatgacagttattcagttaaccatcattatttttaccaggcctaatcgcacggaatagtaccacaagagcagagccagccaccgagtgagagtggtccgacgaccagtaattaatttttggctttgttagttaggctgtgtttagtttcacgttaaaattataagtttaaaaaaattaaaataatgtgatggaaaaattaaaagtttgtgtacgtagaaaagttcgatgtgacgaaaaagctgaaagttcgaagaaaaaaatttaaaatctaaacagggccttagtttcagtagcggtggagtaggtactgcgggctgcatcactagtgttgaacgataatactgtaagtacggagtattattcaatctgcaacaggatgttgttgtgttgctggtagaatcacatcgcccattattgcactgtcagtaatgcgtttcatccacactacagtgaaaacgggaaggaggtgaggtaaaaagatgggacgtgctacgctgaggctccacttctgttacgatctcgtcgaaatgtgataaaagggcgcgtgcgggccggatctagattggacgccgttgcgctgcggcaagccggcaacgggccgtgtgcgtggcctggcctaacaagtgaaagcagtagaatcaggcctgctggtaccagatggatgggctcacatcacattaggcttgctcgcttgtatctacttcctccattcaatcatttcctacatttatattgatgttaataaatatagatatatatatatatataatgttagaatgacttacattataaaacggagggagtacattgcaagcagtagaaattgtgaaattgtgtgcgtttgctgctgtgcaggcgtgcagccgcaacgatctctccctttaaaaagaagggatttgcagaaaagaaaacaagagaatattctatcctttttttcctccaaaacctttaactttctgaccgtttgatcgcttcaataattttgcaaaggaggagacaggagtcgagctccaagtcccagccctagtaggtacaggcatatcgcagtagccaactggccacacgcttagttatgttcgatcacgtaccacttacagtatatataaattatagtgcattcgaactatattaatgtgattacactttagttaaactataattatgtttgaaatttgaaagtttttcataaaaaaattatcgaaagttgcgtagatactccctgcaagaagaagaaaaaagaggggaaaaaaaggcagcctgcgtgccattgtaaagcttggagaccaaaaactggagctgttggatcatgtctcaggccggcccctacccaactttttgtcatcaaccaacttttttccttcctcacaatcaatgaatcaaagccacctgcaatttccctgttaattactccctccattgctcctttatgctcgcccggcgagccgggggatgcttcttttgctaccttgtctgcatgctgttcctggatatcacggcagcaatatatgcacagatgttcttcttccccaacactggcatcccgtccgttcagctaattgttcctcacaaaatgtcttctctgtgtggctgccatcctctgaagattctgattaaacaagtcgttctcgtcatggcaatctctgtacacatgcctacgtctcaaggcagcaacagccaacaacctaacaacagtgctcttcctttacctcctcgatggaccagtgaccaccaacaaacaacttggatcgatccattctgcctagctagattgctagctatagctactagcttttggtccctgcactgcatctgcatgcatgatctatgtcatctgtgtttaatttgaaataacagccatgatcgatctccacgaccataatgtatcggatctaggaggcgcattatcgctgacacaaacaccatatggacatcgatcaattgattaacaaactccccgcctgtctgccggccagtatgccattgcaagtgtagcttggatagtggcttcttctgttcatggttcagttcattcttatttagttttcaagatttgctccggtccataaaaaaatatctcgaggtaccgatacctcacggtactaaattgttcccgatcattggatttagctggacaagatgtgtattgttagatccaacgaacgaaaatgacttagtaccgtgaggtactagtacctcgtggtattttttattgtaccggagcagatcttttgttttcctatttgctgctcagtggtagcacctccagtaagcaccaccgaatctcttttttttcccagtggaaaactaatgcagggtttgacctctagctagccatagctgctgcactcctgtcacaaaaaccaaagttttcccatcgatcttgggccagttgacgacgcatgcagcagggtttatcttatcgtttgggccggggttatcgccactccgcggtagcgcgataaccgtgataatcgtgcgataatcgtctaaaatcgcacaaaaatcacatccaaaaatttgaattcaaaactcgtcggtttcgcggtttcaccacgataatcgcacggtttaccgcgataaccgcgatattcgcattgttatcgcgggctgtgtagctgaaatcatgtaaatgtaaaataaataggataaaaaaaaaatcaaaaatacggttaaatatgtgtagaaaactagaaattgagaataattggaagaatatgtaggatacttaaggcccaatatcctcttattttttcaatttgtaaaccatttttggttttaccctcaaatttgaatttagcttactctatttcaaaaaaattcttcaccattggcaattacaaatcaagaactatatccatgaattttttcagtttttttttatttttttccggaattttgaatttggtcaaaattcatccaaacatatcgccggtttcccctatcgtacccctgtgataagcgcgataaccgtgataatcgcgcgattatcgtgcgataagtgaaaccctggcatgcaggatcagacacaatctcatgtctgcatcgatcgttctcattgttggatcattcatgcggattagtacatgtgtgcttacacaatttacacgcccgatacgatacatgcatcagcgacgagcagcagacaggaagacagcggcaaaaagggagaggtgacttttgctccattcctagtacgttgcacgaagcttcatccccctttgctcgatcgaactagccatctaggcgaaaaatgtcaacttgcaaatcttaacacggcgactacaaagccttctacttcctttaagctcgtattgctgctgctaggatggtccaatgggcacccactccactctagtagccattgctttaatttatcagagcaaattaatggaccctgcatacatcagctgcacacatcctccctcttctatcaagcattttcttatggacaaatatactaatcccatgctcaaatgatgtatttttgggaatgaactagttggttggtgtatgtaactgtaatcgatcttctggttaattaatttcagtttaaagtttctccagggtgaactgaagaggcgtatgtacagcatgcgcagttgctgactggggctgcatgcctcagtcgattgagtccacgtttgtcacgtacgtaatgcgaagtgcaaagcgcaaatggcgcatgcagtggcaaacacacgcatcaggacggcgtgggtgaggtggattcactcagtagctgggacctaatccaaaagaaaacgaggccgatttaatctggacgatatctttgcgctaattcgtcgctgagatcatgcacacgctttgtttaatccagcagcatcgctcgctttctgcacagggaattgtcgaccaaaaggcagcacgggattaaagcgcgcgtacgtacgtgcgcgcgcgtcgcccataaaatccatgcattgcaacctctcgatctctctccatctcgctgtctgcgagcgacgacatggccgctctcgccgtgctgctgctggtggttgcggcggtggagggcggcccggcgtggtcgttctggccgccggcggccggcgacgagccgtactgcctcagctggcgggtgatggtggaggccaacaacgccaagaactggcccaccgtgccgccgccgtgcgtcggctacgtctggagatacatggcgtgggggcagtacgcccgcgacgtggccggcgtcgccgaccagatcgccgcctacgccggccagctcgccgccggcgacgacggcctcgacgcctgggtgttcgacgtcgacgacacgtgcctgtccaacctcttctactaccaggcaaagcaattcgggtacagagattgtgagattgtcatcactgatcactgatcagactagctaacatacgtgtaatctattactccatcctgtttgagttcacaacgttttgacttttgtcagagttaaaatgtttttaactttaattaaatttgtagagaaaagtagtaacattttcaacctaaaaaattttattataaaaatatattcaattattgatttgataaaaactaatttagtattataaatattatatatttgtctataaatttaatcaaacttaaaataatttaattttgaataaagtgaaaacgtcttataagctgaaaccgagggagtaactgttaattactccaattgcttgatgatcgatcgatgtggatgcagggcgtatgatccggtggcgttcaagaagtgggcgagcaaggcgatctgcccgggggtacctggcatggcgcagctgttccagatgctcagaggcagaggattcagagtcttcatcctctccggccgagaccagcagactctcgcctccagcaccgccgccaacctcgccgcggccggcttcgccggctacgaccggctcatcatgaggtagacacaataatatactccctccgtttcaaaatgtttgtcaccgttgactttttagctcatgtttaaccattcatcttattaaaaaaaaattgtgaaatatgtaaaactatatgtgtacatgaaaatatatttaagaatgaatcaaatgatattaaaagaataaataattacttaaatttttttaataaaatgaatgaccaaacacgtgctaaaaaatcaacggtgtctaacattttgaaacggataaagtataaaaacatcatcagaaaacataattgggcctaaattaatacatacccatattgggcctaacttagtagtactggatcgaacggcccaaaagaataaaaaaattaaggcccatgttccatatttggcaaacgggggtaagcgtcagtcaccaatcagccagcctaaaaggggacagacatttccatggtgtgtgtacgtcgcactgtacgagatcgatcgtgccagtttctcgtcctcatggccacgacacatttcgtgcaagatcatgataatggaataagaaaacagggagctggataattagcatatattctcaactgcagacaactagtactagaagatatagctgattgctaatttgctttcgacggcacagtgcgtcaaaggatatttttttgtaagtacatcgaatttgtgtggactgcaatctggagtagctcgcagtttcgatgatttgcacgtacgtgtgccaatctcatcagctgtaggtagcctctcaccgtctgcatgcttaataaattttaaagttgattttaagagttaattttgttagtctattttcagtattgacttttaaaccaaatacataattttagtggtttcgtttattttgagcatgataacttgaacaatcaggatattacgttcaaaattaaatctattatatgcagaagcgcggagtaccggggaatgagcgcggtggtgttcaagtcggcgatgagaatgcagctgatggaggaggggtacaggatacgcggcaatgtgggtgaccagtggagcgatctgcagggtgacttcgtcggcgaccgtgtcttcaaagtgcccaacccaatgtactttgttccatgataatatgatactctaatcgcccatcaaacatgtgttcgcacatacgcacttcgttacacggagtatatatgtaactatttcttttttagacagaaaaaaaaggttgagtaaattacttaacaggtctagcttgtatacgtagctgctgcactatcaatctatcactacttgtgtacgcatgcaagatgcatggcaatagccagacaggaagaagcagagtcatctttcttctctgaaaccactcgcacagaaaccagtgttatctctcgcggaatcctcgatccttctcctagatcatcacacttttcaagtaaacaaacaaccacgtgttgtgttgataaccaaattttacactggagacaagttatagcaagctttaaccaaaatgaaacaatatcagaacttttcagcgaagaccagtctaaccgtcattacgtgaccgatcagatcgaacaatgcactgcgatcagaccgcatgtatccagacgatcagaccttcagcatagagtccgagtctaatttagatacttctcgtgtttccttgttttagatcgagatttcataattgattcatgagcataattggatatgggaaagaccctaaaaacaagtttcgccactcctataaatataaggggaccaagactgattgaaacaacaactaataatcgtcaaatcaatttagtatctaacccaggtatattctatatctctccccttcttgctatctatcccaagtctattattctcaaatcccccaattgtttgtcatatattgtctctacgacgttagatgacatcgtaactaggctgccgagtctagaacaaaccgacgtgtgtttaccctaacaagatccctcccaggtgttcgttcggtgacttctacacacttgctacggcggcgcatctccgggtgccgctgcgggttgcacataacgtgctcaaggtgcagcagcacaattctacgttcgacacagttcgtaaaaaacaataacatagaaacatgctttatctctaccaaggtttacgattccgacaggccctttcgtttcgggcactggcgaaattcggaatttcgcgaaattcggtagaaaaccggtaaattccaaataaatttcataaactaaaatttgaatacaaattccctgagtttgccgacaagttttagcgaaattctgatcaaaatcatcgaaatttcaatcagtaatttgtaatagaggtaatttgctgaaatttttttctttcctgatgtaaatttcagtaaatacacataatacatctttttttcaaaaaaattatatcccaataggttctatgaatatcatagtatttataagatttttttttatcaattcaaatttgaatttgaatgaaactcctcgaaatctcagacggtttctactttcgagcctcgtcgaaacatcgaaatttcgtgaaatccgaccggatttcgttagaatcgtaaaccctattctctactacttttaaaagcagagtcattatcctcctccaaaaccatcacactttctcaagtaaagcaaaataaatgtggctaaaaaacatcggtacaaatccgatgatttctttaccgcggactcgtccttttccaatcctcccgaaccatcatattttctcaaagaaaaagaaaacaacatttctttttttgcattaagaaaaaacaaccatgccttgaaaaaccacctatgcaaaaaccggtgatcgattaaaaaacgatgttcccactcgaaaattgactaaaagaattgggtagaaaaaatcaaagccataaaaccgttcgttttcgtcttaactattgtaattcatgtacatgatgctggttaaaaagtactagaataacgttttcagatgcggtccaatttgtaccaattggggggaaaatcaatatctatcttctgattagatgttctaactaacgaatcaacacacatagcttcactagaacgcaacgcgataagttatttatttttttcagtacgtaattatacttactgtcagtaaatttttcaagttaaaggccacaattatacttacccttcgacatgcggatttacaaatgaagctcccagttagctaatccgccacgtacgaacacactccctatgtaaacacgcccaaaaaaatattgatagcctagcatatatctagttatctataaccagtgatggatccagagaaaatagtggagctaactgaataaactagataaaacataaacctctatttccctagatatatgacaaataattttagaggagcctcagtgggagctcttatgttcctaacatcggtagtggggactcgagatcccttaaacctatggtagatccgctcctgtctataccaactgaagaatatcatctgtaacgattcgagcacatgttacaatgtaacagctatatacgtgacatatcatctataacggatgaagattgggatgctcatccgtaacggccgtctataccactcattacagatgagtgagtccgtaacggttctccgtaacccgttacagatgacctgacacatggttgagaatctgtgtgctagtggtacgtactttccaagtcgacccgaggtgggcccgggcgtgatatttgtctcttccccgcggcgaaacggccggcctcgccgcacgtacgtttactcccagcctcccaaagttggcatttcatcgatcgaactctagctgtacctcctgcctgccctgccctgccctgccctgcactgctcgatcgtacacacagtttcattccatctccaccagctaaaagcaagccagccagccaagctctgtcttccatcttgcatacatcaacgtcagaaaaatcatcagatcgagatatcgacatggtggtggtggtggcggcggccatggcggcggcgagcttgtgctgcggcgtggcggcgtacctctactacgtcctgtggctggcgccggagaggctccgcgcccacctgagaagacaagggatcggcggcccaaccccgtccttcccttacggcaacctcgccgacatgaggagccacgccgccgccgccgccggcggcaaggctaccggagaaggacgacaagaaggcgacatcgtgcacgactaccggcaggccgtcttccccttctacgagaattggagaaaacaatacggtacgcacgtgtatatcgatcaacgatcatatatccctgctagctgctgtttgattggttgcatgctactactgctctgcccatgctgtgtgatcttcgtcttcctgcctctacataaaacagaactcaccctgtttagaacaagaaaagaataataacagaattgctaggtttcttgcgacatttttttttttgaaagaaaacttttgattttggaccgttagaactgctataagattcatgtaggaaagttataatgtgattgtacctttgctatatttgattttttttaaaaaaaaattgcgccagatttttaagatagtttttttaggggaaaaggagatatattactcatatatggcgtcaacacgcgctaaatgcatgatgaaattacaactgtttcctagccaaacatttgacaaggattcacatctagctttatttgctaacaaatgactgatcccattttggctgccatggatcttcattagcttaatctccctgctcccagaaaggagatagttaggtcatgtgtgtgtaaggaagaagaatctgcccggtggtaaaggagtaatcaacggctgtaatcaatcgatttaattactaataatcattagtattaatcatttccaactttcggtaatgaatggatttaaatatatatagtgaagatttggttctttctacaaagtaaatagtggagtactactactatatatgaaaagtttcagagtacgtatactatacgtccgttcattaatagagcaacaaaagcatatgcatgctgataggaaagtttatctatccctcgtttttgcatgctgactgtaaatactgcatatatgtaaagtcaaatttattttttaatctatgcaagtagaatttaaacatgcatttaagtataacgatactactatatctatattattaaatattttcttatgacttactaagtgatatgcaccaaacaaggagccgtctcctttagggtagttgtcgatttcgagcattcatatcaattgaaaaagttattacaaaaattaaaaaaaaacaagtcactcataaagtgttattcatgttttatcatctaataacaacaaaaatattaatcataaaaagaattaaataaaacggacggtcaaacgttgaaaaaaaacccacaactatatttagaatgagacagaggaagtaattgataccagtagtgcaatatagggcatgtttagatcccctagcaaaattttacatcctatcacatcgaatgtttgtacaaatgcattgagtattaaatataaacgaaaaaataactaattgcacagattacgtataaattgcgagacgaatctttaaagcctaattgcgccatgatttgacaacgtggtgctacaatatacatttgctaatgacggattaattaggcttaacaaattcgtctcgcggtttacagacggattatatcatttattttgttattagactacgtttaatactttaaatgcatccatatatccgatgtgacatatcaaaactttatcccatatatctaaacacagccatagcattattgagccgtcagaatcatgggcagtctctgtggtgttttgtactgtgtctgggtttgcttcatttaattgcaccgagttccatcgacgagctagcgatagagagatttgccatggtatgtcattaccacgggaaagttgtgtccttttcaggaatcgtagcttgccagcgttgcacgcacagccagccactgtacgactgtctagatagccggccgattgcacgacgtgatcgatcgaaatatattttcctcgtcgattgatagcgaagttcatgtaactagcaaacagcagcacgatctcagctcacatgaaccagcaaattataaacatgcccccagtttggagcaaattaaacggctccaggcatacgtgcggtgtactcctgttcataaatgacctgcgcgcactgcagctagctagtgcaggtgtgtgactctttgatgtggatttgatccgtcctcccgatccgctagcgtcaatggaggagctacccagctttcatgtcagctagtgtagttttgtcatgttgtgaacattcgtccaagtagactaatggtatattactaccttcatttcatattacaaatcgctttaatttttttctagtctaatttctttttagttctttcagtaaagggaacgaagaatatagcgtgtactttcaatttccaagcacatgtttagataaaagggatagtttgaaagctttgtaaccgactggtgcatcttaattttgctcttggtgttaggcccggtattcacgtattcagtagggaacatggtgttcctgcacgtgagccggccggacatagtccgggagctgagcctgtgcgtgtcgctggacctcggcaagagctcgtacatgaaggccacgcaccagcctctcttcggcgagggcatcctcaagtccaacggcaacgcctgggctcaccagagaaagctcattgcccccgagttcttccccgacaaggtcaaggtcggtgtatcttctcaaggatagtaaaatcactggctcgttaattaatcttccaaacaacatctgcaagcttagtttgcaaatgatcgatcgatctgatgtattttcactaacaaattagtgtctcttaatatgcaaatgtgatcatgtagggtatggtcgatctgatggtggactcggcacaggtcctagtcagttcatgggaagacaggattgacagaagtggcgggaatgcactggacctgatgattgacgatgacatcagggcatactctgctgatgtgatctccaggacatgcttcggtagcagctacgtgaaaggcaagcagatcttcgacatgatcagggagctgcagaagacggtgtccaccaagaagcagaacctgctcgccgagatgaccgggctcagcttcctcttcccgaaggcgagcggccgcgcggcgtggcggctcaacgggcgtgtccgcgccctgatactcgacctcgtcggagagaacggggaggaggacggtggcaacctcctcagcgcgatgctccggagcgccagaggcggcggcggtggcggcggcgaggtcgccgccgcggccgaggacttcgttgtggacaactgcaagaacatctacttcgccgggtacgagagcacggcggtcaccgccgcgtggtgcttgatgctgctcgcgcttcaccctgagtggcaggaccgggtgcgagacgaggtgcaggcggcgtgctgcggcggcggcggacggtcgccggacttcccggcactgcagaagatgaagaacgtacgccgccgacacgcatcaaattgttggcattgaagctcgccgaagctgatatgatcgtgctgtttaatttgcagctgacgatggtgatccaggagacgctgcggctgtacccggcgggcgcggtggtgtcgcggcaggcgctgcgggagctcaccctcggcggcgtgcgcgtgccgaggggcgtcaacatctacgtcccggtctcgacgctgcacctggacgcggagctgtgggggggcggcgcctgcgcggcggaattcgacccggcgcggttcgccgacgcccggccgccgctgcacgcgtacctgccgttcggcgccggcgcgcgcacct

SEQ ID NO: 2900 - DNA, 8183 bp, Oryza sativa
ccgcctccgcttgtcgcaaccgcggcctctgccggtcgccccgccgcgggcccgccaccgcccgccccgttgctcattgaagcccgtcccgcacgcccatcgccgcagcatcagaggcaagtccatgaggaggaggaaggtttatgtatgagtggggaaaatggggtggaagaggaggaagaaggttatagagactgacatatgggtcctatttgttataaacttgtaatggagagggtagatagagaggctgttgaagcgagcaacgactttgacttgctaaatcaaatgggtagctggctatatgtatatttgaagagtctattttagagaggctgttggaaatgctctaaggcggacccagcctccgggccacggccatttggtggacggctgcatgggactgggagtcgcggctatactctccgctagggataaaaacagtcacggaaattatcgactaatagtgctacccaaacaaatcatacgtatgactcaaatcatgagacaagtcaccttgttccgattacatctatgtggactcatgtctttcatagcttagttatagtcgtacagtaggtcattatgctcgtattagttatataattaatttctattttttttagcgtgatgtttcatcgaataagttaaactagtaaatattagtctattagtagccgatggagaatagttttttaaaaaagattctaccgttttcatcccacttaccgcgtgcgtaactcgtgttcgacgtgccgcatgctaaaccatatgccaaaattttcttgctcaaatttgtttcaaagaattttctagctcaaactgatcgaagcaatttgttggccgactgcacgagcgaactcaaactgctctgctcttgggccgactcactccatccagcgtcctcatcaatgtctgcatctgtccgccgactaaggtctctctctctctcgtccgtttcctgacagcaacataaccgtacaattattgcgaggaatcagacggcgggggacgcaacgacgcaaggcagtttcgggaagaaaaaacccccgcagcccaccgaatgcaacgtaggagttcgctccagtacaaacctgtatggtttctgcatctctggaggcattccattggaaggccagccaagcttcagtgtttccatggaccacggctcatcgttccggtgtgatgtgccatcgacccttctgttgctgacagatagtctgacttcagttgcctggtaaatttaacagtaattgcaactgcctaaaagaagaggttaacagtaattacaggttcgcagggaacaccggtggttactgacagtgaaatgtacgttcctcggatgtatatttaactgacaattcatcaacggcggcgagcttgattatcgggactgacaatgttgatcaatgatcacagtatcagaatcgaacatgctggaaacgtgatattcgcatccaaatcgcgatacttctcatctatgaacgattgatgaaatgagagcagcatcgtaatctccacagtgagcattcatttgctgtccgaggtgctcgaggacaaagcattggcaagttgtgttcatcatgctttaacagttagccatgcattgtggttcagcggagagacttctcaaattattgttgtggggttaggttaggagcaggaatcctctgctcataagaaaagatcaacaaaacaaccaaatcatatggggccggtgagaagtgatgtatgaagaaaatcacaaacaaatgaagagaagatataacatacttaaatttttctcaccaacatgcaagattccggggagccctggtatagaatatacgagcaagcttaattttataataacagatgttgctatcaacttcaactacaatactttgccctttattcaagcagtaatacaaatatcacagatcaaataaaacttttactgctatgcgcttcttttcatttagatcataactagcctagacacccgcacacctgagaagaaaaactaatatcactacatgcctattttttattttcctccaaggaaaattgattccaccaattacctaaaactaaatgtaaatcataggtccttgcttgagtgactttggaggaaaaaaacaaacctagtacgttgcagatcatagcaactccaaacgaacaacttgattacttgttccgattctcctcctcttctacttaccttttccccctctcctcctcttctatttaccttttttccccatccagacgaacaacttgactacttgttcagattctcctcctcttctatttaccttttccctctaaacttgtccgggttcatcacatctactgattatatttgaatagttcatcaaggtaaacgaagtttagaactacagaaatgcatgaatctgggcctcatgtgtccgggttcatcacatctactgattatatttgaatagttcatcaaggtaaacgaagtttagaactacagaaatgcatgaatctgggcctcatgtgtccgggttcatcacatctactgattatatttgaatagttcatcaaggtaaacgaagttttgaactacagaaatgcatgaatctgggcctcatgtgtcttgttctgtagcagctgcatcctctagtatgcgtctagtactctagttcagcatcatgttaaattgtatatttgtgtagctgtatgcatagttctgcatcctctagtatgcgtctagtactctagttcagtatcctgttaattgtatatttgtgtagctgttgtatgcatagttcagcatcctggtaattgtatatttgtgtagctgtatgcatgtaccaatacataaaagtctaccacttaagcccgtttgatatatgcaaaacctgtgattttttacttcaacttgaaaaagtagagagtgaaaggagaattttgcagaggacaaaactctcaattacatctgggccacagcctatgtttgctagtgcactctctcactaaagcgtgttatgaaataaaaagcattagcttttagaaaatgagtgatgctacccacctagcaagctttctaatgatatcttctcggctacagatcaaaggtgcgatgtatttaatcatagtgcagatcaaaggaggttagctcgagatattacttggaattcaattttcagcacaaagaagtggactgagacctacaaaactgaaccctgtctgcttgcaacttagtcagctgaacaaattttgatcgattttttttttataatatgcatctttttgcgtcatgataaatgaaaaatgtcagtattacagttctccatgagcaaaaacagtaacatccagaaacaaactcaacatttttttcaaataaatcctcatttgaagatagcatcgatattaatattaacaatacatgaggaatgaaaatgaataacaagaggaacaaaagctgcagaaatacataaacgattggaagtcgactcaaattgcaaaaaacttgcccttgtcaaagttttttagcacgttggctgctgctgctgcttcggttgctcaccctgccaagcccagactatgtccttcaaagctggtctcatctcttggttcaagaccttacggtattcaagtgtatcaccatttgtcttctttagctccacaagatgaaagtttggggtaacctcgaatatctctgcatcaatgcccataacacctttccttccaggcttggagccttccatcttcaacagtccaccatctttctttgtgagcttcaaccgcaagcccttggcaatatcctcaatcttagatatgattgttgaagctgtactggtggatgtgaatttggactctttcttatcagactcctcaaacataccagagaggtcaagtccagttgacaaagaaattatatcaaaagcattcaagttggacggcttcttctccaatgttggagcgctattgaaggagtcaaaatctgtgctcatatcaacaggaattgcatcctttggttgtagattatatctgagcagctttgcatcgagacccttcctaaaccaaggattttccatgattttgtccattgagatccttgtacttgggttaggatcaagtatcctgagcaagagccttcgaacatcggtattaaaccaacttggacatttgaattctgctttcccaatcttcttatacatatccatcaagttcttatcatggaaaggtagatagccggccaatagcacaaagagtatcactccacaagaccatatgtcagccttagcaccgtcatagcctcttctgttgatcacttctggagcaacataagcaggtgtgccacaggttgtgtggagcagcccatcctgtcttttgcaatcagcaagagcacttaggccaaaatctgaaaccttcagattgctgttctcatcaagaagaagattttctggcttcaaatcacggtgataaacacccctgctgtggcaaaagtcaacagcgcaaatcagttgttggaagtacttccttgctgcatcttcctttagtcttcctctctgaactttgttgaacaactctccacctttgacgtgctccagcacaaaatatatcttagtcttggtagccatgacctcatataactgcacaatgtttggatgcctcaccaacttcatcacagaaatctcacgtttgatctgatccatgagcccgcctttcaaaaccttctctttatcaatcatcttgatagcaacactctcagaagtctcggtgttacgggcatggtaaaccttggcaaaggttccttgcccgagtaatttccccatctcatactttttcatcaacatatttcctctctgctccgccatcacgccaaagaaagcagtaatcccaaagctcaaagtgtggtaaccaggagcctagaaatgataggtgacttcaaccgtctccaccaagatggtgatctaagaagatggttgagttgccacgtcgaaccccatagtgcgagagcacatggagcaagcgctgtatatactcttgtgttccaatgtcatgaagagttgtggaaggagaaatatggcttgctaccctgccaattccctcacaaggtagctctctagcatgcaagcacatctttctgcattccctaaggtgtttccttcttattggaagtctagtaattctgccaaaagaagaagatgcaataaggtcagtcatggacaactactagttggaatcaactaacataaaactcaattgagaagttctaggtaaaaggattaatctactgcacagcacatatgcatgaaaacaagacatgccagttaagactgtttctacgcttttcaaccagaacttgttttaaaagaaagtaacaggaaacacaatacagttacacagttttctgtactacataaagctaccctgaattaaaaggttggatccgaaagcttcgctcaacaaccaggctagcagataacaagaggctaattataattcccacgctatgcatctccagtagaaaggagattatttttttctttttttacccttccaagtatgtatgacagattaagttttcgcatgaatcgcatcaaccacaacacctcgcgttgcagaacaaatacagatctagaaacgagcactcaaccagtgtactggagactcgacctgagaatctgaaacccacccctcgctaacccaagatgatgtttttcacatacagacgaatcaacaaaccatagatccatatagattatcaacaaccagagataaggagaaccgtaccagatcccgacgtctgacgacgcgaagaacacccaacgccgccgccgccgccggtagaccgaaattctcacgacaggagactcaccctcgccgcagtcgcgagaaggagtgagaagaaggaagagcggtggtagtggaattggcttcgccttggtgcgtgcggagatcgagatcgagatcgagatctgttcgagcacggcgcagcaattcgttcaggcgtcaaagacggctcctttttatagccaagcccaagtgccgtaggatattcgcttccgtttcttctttttttcttttttttttcactgcgaagcgaaacctcctggagcgcccgcctgccgttggtgcggcgggtaaaaaaggccggtttactgtccctgattagtggggcccaccaataattggtgggctgccttggctggctttgcctacgtcgcgtaggggcaatttgtttgctgttttcttctgtttgttccagcttccagggccgtccgttttgctactagtggaatgatgatgataggcggcataggccgacatggagatctgtgtgccaccaaaccaaaactaccttctccaatctcccttgctctgatttctctccatggttccaggtatatttgcccaacagatttaactggagcaaaattataagtccacttagtgattctgagcttacacaccattacagaggatgattatgtatgttactctctttgtttcgagatacttgtcactattgaatatcactatttcaatttttggtcgcttaataatttaaatggtttagactacgatgaacgaaagattactacttatatttcaggcgtaatacaccttcattttgataatatggtaagtatagattttctcttaaaaacggcggacgatcaaagttgaaatgtaaatagtgcctgctaataaatatttacgaacagagacgaaaatcaattacagtgtacatgtcaaactgaaaactttggaattgtacacagtatagtagtactctctccgtttcgaaatgtttgacaccgttgattttttagcacatgtttaaccgttcgtcttattcaaaaacttttgtgaaatatgtaaaattatatgtcttcataaaaatatatttaacaatgaatcaaatgatagaaaaagaattaataattacttaaattttttaaataagacgaatgatcaaatatatgctaaaaagtcaactgcgataaatattttaaaacagaggaagtattatataagaacagttatacagatacaacattgatattatcgcttagcttagctccttcttggctcacgtcaggatcaaccgcaaaataagcgtaaggagagaaatgtgatttggtctaccggttagtcttaggcatgtgctggttagctagatctttgccgatgccagtgaagtgtgtggaaaccaagaggaagtaaccaaaacacggcaggtttcgcccgctgtaaacactccacgtagtcaagtagaagctagcacgtcatggtcggcgacaattaaacagtagaaaatgtagtaaacgttttggtttaattttctctactaatactttgttttcttctactccctccgttttaaaatatttgacaccgttgactttttaagtatgtatttgaccattcgtcttattcaaaaaatttaagtaattatttattatttttatatatttgatttattgttaaatatattttaatgtacacatatagttttacatatttcacaaactttttaataaaacgaacggttaaacatgtgttaaaaagttaacggtgtcaaacattttaaaatggagggagtatatacgagtccagaaagtaaaatctgctactactagctagttgatcagtttgtccatctctttgtcagctgagaaactagtaactaatactggcaatttttgacaaaactgcacagtgacaatgctataaaacgtatacatatatagcacgtgcatacaacattttgtatggcaacttttatagtatcctcacccacaataataatacactttattttagtatcaataatagtaccattcttaattagccatatattataacaatattatctaatatatatgaacattgataaaatatcaaatcgcaccacctggccggccgggccagctagattaattaattaggttgcttctgatagccagtttttgatcaatttcctcttaggatgaagaaatccaattaaccagacatgtcaggtcactggtcgagaaacatctttggtcggtccaccaaattccacaatagtctcggttctattaaaaaccggttagtaacaccaaccggttaaaaaaatttgatctttagtcccggttagtaacaccaaccggttaccaaccatctttagtcccggttcaaaaagtcaccgggtcgaattcaggccctaattatctttagtcccg

SEQ ID NO: 2901 - DNA, 550 bp, Oryza sativa
ttgctaataagaattcaggttatgcattggactgttgttaagctgaggtaattgttcgttgatgatattgaagactttgaaccgtatgacaaaataccctttctgatcaatcaaccaagtgcatgtatgttacggttgcaacgagccaataattaccgagagacgattctatcagaaatgcagatgtgcataaaatttgcatctgaacaatccactcaaccataaacgaaaactttagattcagttgtagtatcgatcatgtggtctatacccctaaattttaaatcttaatatgcacaacaaaaaagacaggagaagcctacagcaatttacatggatgaagctggctctatgcacagcgcacagcctagagtggagtttcagtgatcaactgttcaaaattacatgatgttctctctgtttctcatggaaaattggcatgacgtggattagcggcaaaacagggtgttcatcaggaaatcctcaagagagaccaaccttgtagttctcagatccagcagatgattttaatcctcagaagatcagattt

SEQ ID NO: 2902 - DNA, 19172 bp, Oryza sativa
aagctacgatgttggctgccgaaattgagcagacaaaggcaagcattgcaaccgctgaggtgaggtgtcttgcagccaagaagatggaagatgcagcaagagcagcagaagctcttgcacttgctgagatcaaggccctacttagcggtgaagcttcagctggagatctccagggtactgatggagtgaacttgtccttggaaaagtattttgagcttgcttcaaaagctcaagagtgtgacgtcagctcgaggaagaagattgaagcggcaatgttgcaggtggaagaagccaaccgatcaaaatccaactcgctcaacaagctggaggaagctaaattggaatttgagaaatgcaaaattgcactgcaggatgctctgaagagggcacacgctgccaatcgggggaagctcgcagtggaagagtctgttcgtagatggctatctgagagtggctacaagaggcactcatttcatgattcttccaagttaaaaaatgcagcagatatcactgacgtttcaaagagcttcttgaagccaacactgtcaattgggcagatattgaatctgaagctaatgggacctgatgggtatgacaaaagcgtttgggatgatacaactgaagcttcaaatgtttcacttggtcagatcctgaaccggaggaatgctgttttctgtaacagtgatataacttctcagaagatattgtcaggaaaaaggaagaaatttgccttcacagggctttcagttttgttggcaaaacaagccaagaggcaagagcaagagaaatagaggatcagattagagcctatctgcccaaggtttacctaagcctgaaacagtaggtgatgaatgttgtgaccactatttccatgttcatgtatgttagttggttctggccctgcgtcctctgaatctgttattgccctctcacacatgatttctctaggatgactggttgcggattaggaacgtaaaactgacggtattgcagtcctttctataaatttgcaactatgcttaacatgagtgaggccacaagatgagctgttagtactttcccatgcttgattttaaccgttcatattgtgtgcaattattaatccctaataattactataagtctaaactttaacttatttattacccaccaaatataggtattgctaattattcttgctcatgattgttacctacaagtgtccgtagaaacgtgcgaagttacacatagttggaaccacaaagttttatcacgtactgcgtgcttttgaagtatagcgaaatgcatttcttgtggcccttaatagtacttgtgttcagaattaatagatataaagacttgaagtcgagcaaaaatcataccgtcgatatgtccgagtggttaaggagacagacttgaaatctgttgggctacgcccgcgcaggttcgaaccctgctgtcgacgcatgattttttgtccctcaactagctaatttaactcggtcttcagacgtgacaattcgatccgaaaaaacaataaaacccgtggatccgaaaaaacaataaaacctgtggaacccacatgtcagtctcacacagaaaataataaaaaaatggtgggcctcacatgttagtccaacttacccctcctcttgttgctgctcactcccccatctcccctcttttcatctctctctcctctcctctcctcagacgacggagaggcagcggcacgcggtggcagtgcggtcggacagtggggcctatgcggaggagctcggacgagcgacgacggcgccggtgcagcggggcgcggctgagcggcggctcgacgcgagcgtggccgtgcggcggcgccggccccggcgcgggtacagcgcgggtcgcggcctcaacggtgcgcaagggcaacggtgccgatgcggaggagctcggcctagcgacggcggcgccgatgcggtggggcgcggttggaaagaacaacacggaatcaatcgacaccaaatttttatcgtatttcttttatgctgtttttccttctctacgttttgctcctcccgatctactgcaggcagctgtcatcgtcatcgtcgtctctccggccggctggtggtgacgctgcctcgaagcagctgctggctgctgcgtagatgcacacgcagcagcgttgctgcatgagttagacgcagcagcaggtgaatttttgtgttgctttcctgggataaattttggtggcaacattttcttcttctttcctcggttctcttcttcttcctatggcgccggtcgccgtggagtggcgctcgcggctgctcgggcggcgcggctcctccggccatgcgccccaccgcatcggcgctgtcgtcgctcggccgagctcctccgcatcggcaccactgcccttccgcacccccgagggcgcgacccgcgctgtgcccgcgccggggccggcgccgccgcacggccacgctcgcgcggagcatccactcagtcgcgccccgccgcatcggcgccgctgtcactcggccgagctcctccgcataggcaccgttgtccggccacatcgccgctgcctctccgtcgcctgatgacagaggagaggagaggagagagagatgaagagaggggagatgggggagagaggatgaaaaagaggggtgagttggactgacatgtggggcccatgtgtgtcccaccatttttttattattttctgtgtgagactgacatgtgggtcctatgggttttattattttttctggatcgaattgccacgtaagcgccacgtcagtgccacgtcagatgaagactaagtcaaattagccacgtaggcgccacgtcagccaaaaccgccctcaaaatatcgagggacctaatctgcaccggttttaatagttgagggacccgttgtgtgtggttttccggatgagggacggaaatcggattcgttgacaagttaagggacctcagatgaacttattccttttttttatatcatttttaccgaatttactgggtcttgtgttgccaaatggaaaccttttttccttaatgggctgggccttgtgttgacatatgggccatttttctcctaaatagactgggcccagtggacatataggccctttttcctaatggactgggtcttgtgttgactaatgggcccttttcgtgatacaccgggccttgtgtggacatagggccgtttcagcaactcgttacttactatcctctatcggttctctattgcaaaaatttcttcttgcttgctgctttgttcatgcaacacccatgtccccgaattcgccctactgcagaagcttggattggagccaatttttccctgccaatattttggcactaccaaatttaatacagcactagcgtaaaatttgactagtgagagaaaaatgggtagcaaaccaaacacccatgtagctccgatccaaaaaagccataaacatgatgacgtgcccttttcatactacagtagcaagaacaaatgaacaattccacggcgtaaaccatttactgtctgtctgtccgtagggttatgattcccaaattacgtgcttgggttgggttagaccaagcatcgctgcctgcaagcagcagcttttcttcaaggctgaactgctggaatcagatcagaagttttccgagttcacgtgcaatccaatgcgtctgaaggtgaatcacgttgtttgcgtggatggaaaaaatatgttgctccgccttatcgtagacggacgtgctgtctgtccaggttcaatacacttgcctataaagtataaactccattctctcatgtgcaattcgaaataaactagtgatagtagtactgaataaacaagtcgtcgacactgcagcattatagtactgtactacatttctgaaccggaaacggctggtatactcgattgtaggaaccaaatcgaccaatacattccatgctctcaaatgggatggatatatcaaccttcgtctttctgctcgagcagttgaaccgaacgcgagccaccaccggttcttgagaaatatcaggcctgaacatcgacccaagtccccgacatgaatacatgattgatgattgagtatgggtcactttactgaagatacgcaatgcggtggctgtttacagttcagctccggccagcttatcaatgatggcagagcaaatttctattactttctccgttttatattataagattttctagtattacccacattaatatatatgttaataaatctagatatatatattaacatttatataaatagataatactaaatagtcttataatctgaaacggaataggtacattacatatatgccgtttcaagaagtatatgaaagcaaagcccgtaccatgccatattgccatacacctagacgaacagtccatcaccatggttaatcaaggagcacgcatcagcgaaaagcagcacacgtatgatatgggtggtgcgcattagcgtcaagtatgatgaggatggagcatcaatgaaagcatcggcatgatgtaacgccacggagacatatgcgacgtggacgtgtcgagagtagcacgaacgcagacgctgttcctgattggatatttctttttattagtgtactagaactactatcttgccaatacttgaaaactataataaactccaaataattgcgatgatgttgaaaaatatagtactaataaactccaaattataattgcgatgatgcactagtaacatcacttacacgtggggtcgtacgttctccattattggagctggaagaattctctgggcagctgcaaacgtaaccaaactctctttgggctggtggtggtgggatcagaactcacgtacaacactgctggcccaataagcaaagatgccacatgcacgggatttttccggtggatgcccaagcatattccgagcagaaactgccggcttgcggcaaccagaaactctccggatccagccaggaaaacgaaggaattttactacttcgtccgaaattatagacggacaaatcccatactggaaggagtacgacacgctaagctcgtagcgagaaatctgcgggcaatcgagccgtggaatcgtggttttgccgtgtgcgcggcgcgccgcaccgtacgcgcatgcgtacgtggtccaggaaccaggagagcggtcgcccacacgtacggcgctcacatggatcgagccgcgcgtacgggggaacagcgactagcctccctccctcccacccacggcgcggcggcacacggcccatccgcatccgcgttcgcgctacgttgtcgtacacgaatcatcgtgtggttgggacttgcttgggcgcggttgggtcacgtttcaggcttcaaacagttgagtttgagagatacggtacgagaagattttttttttcacttattcctttttcacgaacacacaaaaggtttacacgttaatatattagaagaaaaagagtttttattaaataatgcaatcaatcagactggcttatgccaatgaaagagagaaaaagaaaaacaaaaaccgaagccaggaaaagattactaccgcggttaaacgcaactcctaatagcgggaaggggcagagccacgctacactcccaacaaattcccaaaagcggcaacgccagctagaggccacatattaccctccgaaaggatggactacagcaccgagatcgaagagagcgcggagttgaaaaccctagagtttcattccttccatagctaccaagagaacaggagaaccagggagtcaaaattggcgtagagatgctcaggcaagcaggccctggaggaagaccaccagtcctggagctagctgccacgggagggggagagagcaattcagccaggagtgataacacatggagccagacttgccgagtgaacacacaatcgagaaggatgtggttcgccgtctcaagctcctgatcgcaaaaggggcaggccaagtggccatcgatgccacacttctggaggaggttgccgtccagtagcgctactgaaatgcaaaaaaaaaagaacatgtatttagcaggaccctttgcatgtcagaggagatcaacacatgcaaaaaagtgttggccatagaagaacgcctggtacaccgaacgcaccgagtagcgctggtcactcatccaacgccacacaagacgatccccgatgcccgacaagagctgtatgtgaagcaccacatcccaaataagaagaaactaggagatgacatggacagtgagggcgccgcggatgtcagaaacccaggaattgttcgccaaacaggccaaaagcaactgtgcgtgagcctcaaaggcgttggggcacgccgaagaggagatctcgaaccaaggaggccaccgagcggtcgtcgatccattgttcaaaccaaaaagagtattgactcgccatctcccggcatgaagaaggtggacgcctcgaacatgtcgaaaatggtctgctcggctggggccttcaggccatcccagtagggatgctctgaacgctgaagccagagccaacgaatacacaggggcacagggcaaaccctgccatcctaagatcatgaattcccaaaccactaaaagctttgggacgacagtcattcgtccagaacactcggcactgcccccatgagccgagtccatacccgtccacaagaaggcgcgacgcttcttatcaatggccttaataacctggactggaaggcaggatcaccatagacacatggactgaattggaggagagaaccgactggaccagcatagagcaaccaaccagagtggtgagtcgtcccttctatggtggaagtcgatggaagactttatccacaaacggttgcagggcccgtctttggcaacttgcgaacggacagcggaatgctgaggtaggtgcaaggaaaataaaaaatcgagcaaggaaagcaaggctgaaccagttccaggtccttagccgagcaacagatcggagtaaccaagcatttggcaaagttggtgcgtagcccggacgctgcactaaagacggaaaggatgctctggatgaactcaagattaaggcattgatgcggtacaagattaacatgtacttagtagtgatagactgatgagtaggtacttttttttaatgtaaatttaataactcttagtatctagatactatgagatactaaatttaatactaaattttggttcctcataatatcttcccaagaattgtaaaattactctagactgctagcctcacatagtagcaggctgcaagaaataggccacaccgaacgggacttcacggttgtactgcatctgtgactgtgacgatggcgaggcttaatttcgtggatctcgaaccttcttaatcttgttttctcgcatgacaaacaaacgaaaacaggtggagctactgaatcattagccttttgttaccaaaacagaaaaaaaaaactgaatcattagcctttttctatggtggcgagacacgtacggccggcccgtgcgacgtgccaagggctaaactgtggccgtgacgcggtgcacggtagaaaaaaaaattgcaccgtagtaggagtaacaattatcaccaaacaatattagcaagtacgctttgcgaatgcctttgttggtatgatcacgacgtcgcgacgttgataacatagagtaaggggccatgacgtatttcgatttgacataaacgacaatacaaaattgttttcaacttttttagtgaaacagacagctgattccaccctctaattgggtgtcattttccagcgggcggcggtcgatctgctagatttgatcaatcgtggattcatcagtgaattcgtggaaaaactggggtaatttgtgaggtcaaaagagagctaaacggtacagtaatatctcaggaaaccaccaggaaagatcgatgacgttgatgcttcatagatagggtaattaattagcagctgtatattgggaggactttggtcctttttggctgcatgcttggaagaagaagaagaaacaacgtgtacaatgcgcaaaaacagtgacagttaaattgttggtccattatttatttatttcctggacatatggacttggtacagttccttaactcggacaaaacacatggaaattccaagccgccgaaatacactggagagtttagttgatactagatcgaacatgatgtttttcttctcgatcggcggctactaattattttctcaaagaaatgttcgtagtacatacgaagtagactatagagtacgttttactagttagagtacttggaagagaaggtgcaagacgtgcacagtacgtgtagggaggatgaagcaacagtccaaaccgccagggcgacggtagcacgccatatacttgtttttttgagagaagaactatgtatatatgagtacttgtccatgttgccagcaacgtatcagttgtggaccacaattatcatttgataagcttgttcaattctcattacaacagctggaaccttacatgatcaaacaaagcagccagctactgtacgctcctctgtttgaccgaaatcaccatctgaagctggaaatctgcatttgccaatgccataagcttgcattcccaattcgtcgagcttgccggccggtttcatgcatctgccaattgctcatccacgcaattgccgaatgcatgtgacactctgcccggcttgagcaaatatcggggagagaattaaacactctagctactagattgggccaaaagacgtttttagtgtgaactattttctggttccgctttgcacaaccaaatcaccttgtcatggtcatccctgtttcgttttcagagactccgacccattgagagacgaacaagtacactccatacccttcatgatagtttcacaacacccattgtacagctagagaccgataaagatcactagctagtacaatgaatctagatagaagatactttctaatacaacgaatctgaacatatacagattaattatttttaagataaaagaagtgagtagaacttcggtagaaacaaggtactcgtgttcatataataatataaacgatcacgtttttactgtctttcgtaaaagaaaagaaaaggaaaacagaagaggcattgaaaaggaaagggtggatttgtgctgcatgctgttttcccgtggtgaaaatggaaccgtgcaacaggtgggaatcctccgcgtcgttggacgcatacgtacgtgatgctcccctttgcgtccgtctgctccacgagttgtatctctatcgatcctctctttctcgagttgtgcgatgcagatatcggacggatggatatatctgtgacggtacgcgactgtagatctatatatatctagattttcgctttgagatgtttgtgtcacttgtgtgacgtatacgggcttcgaaacgttttaaactcgactatacgaaaggacttcgatctttatggtgctggaaagtatttttgccagcaatgcaaagacgccttgcttaaatgtttgttttaaaattgcacttgttccaactggagcttaaatgttcgcttaagtgaaacaaacattgctgttctacatcaataacaccttccaaatggtactatttcgggcatcaatttattcctactcgatcagtgctacccaaccagtccactacaataatttatttaagtgtttttcttttcaaaagaacaatttaattagaggcgtttttttcctaaaaaaagaacaattcataatcgtttcttctctgcaccaaacacgcacgacagcacacatgattttaattttaatttgaaaatcagaacagtacacataatcataagacgtaactatacagctagtggtaccactccatctaagagagatactatccacttatactttaaatgcaattttctcttaaaatactcatccgatatacgatccgattgcaccgttgtgttcgtaacaattaattctttataacaagatcttacatgattatattttgatgaaaaattataaattacttttatcatatatctaaattacttcttagacatataaaaataaattcaataaagcctaaaagtaatttacatatattatagaagtaacttataataaaaagaaagtaactctaatgaatgccttttttcattggacgtgaagtcatatttttatccctacaacgaatttacttctaatgtcgtgacaaagttacttctgttttgtttttaagttacttttataatatatgtgcattacttttagactttattgaatttacttttatatgtctaagaagtaatttagttaaatctaaaagtaacttatatacatgataaaagtaacttatatatataataaaagtaatttataaatataaatatttttttatcataatataatcatgtaagatcttgttatgaaaatttaattgtaacaaacacaatggcgtaattggattgtagatcggataaataatttgagagaaaactttgtttgaagaggaaaaatacatgcatgtctattaaaaaaatgcatgcatgtagtacgagtacgatgtagtagactccacgtcttctccatatttaggcgtcgctggttaaggcaaaaacgggaggcctctctaaatagattttatgataatcatataatagcaacgcaatcacaccgtatacgaacaccactaaacataatccctccgtcccataatatagcaacgggtactaggttgctatattatgggagagagtaataaacattgataagtacgtgttgtgatgacgtgaactttctcggttgctaccattgccaatgtgccgtcgggcccacccggcagtgtcaccgagagagtcccgtctcctcccgcagcgaccaaccgcgagacggataaataccgccacgcgctcgcacccaaatcttctccaactcaaaacgagcccccaaatcccagagaggagtcgcgagcttttcatcaatcctctgattttcccccaggtttccccacccgcaaagagcctcaaaattccccctcctctgtcgcgaccgatcgcgacgacggcgccggacgagcagacaccggcgccacgatgccgccctccaccggctccgtcccacccgccgcatcaacgccggcggctggggacgaggccaccgccgccgggagggtactcctcggcaggtacgagctcggcggcctcctcggccgcggcgcctccgccaaggtgtacctcgcccgcgacctcctcaccggccgcgacgtcgccatcaagtccttccccaacccccgccacggcggcggcctccgcggcggcgaggaggatgtcctcctccgccccgcgcccatcgagcgggaggcggccattctccccaggctgcgccaccgccacgtgatgcgcctccgcgagattctggccacgcgcaagaaggtccacttcgtcctcgacctcgccgccggcggcgagctcttctccctgctcgacgcgtccggccgcatgacggaggacctcgcgcggcactacttccggcagctcatctccgccgtccggtactgccactcccgtggcgtgtaccaccgcgacatcaagccggagaacctcctcctcgacgacgcgggcgacctcaaggtggccgacttcggcctcggcgccgtcgccgacggggccctccaccacaccctttgcggcaccccggcctacgtggcgccggagatcctgtcgaggaaggggtacaacccagcgaaggtggacatctggtcctgcggcgtcgtcctcttcgtgctcgccgcggggtacctccccttcaacgacgccagcctcgtcaacatgtaccgcaagatctacgccggcaagttccggtgcccggcctggttctcgccggagctccggtgcctggtccgccgcatcctggaccccaacccggcgacccgcattgacacggaggagatcatcacccacccgtggttccgccaggacgcgagccacttcgcgatggcgcagctgatgcagcacggccacgacgaggaggccaaattcaagaccgagttcaaggaggacgacatggcccgggacatgacggcgttcgacatactcgcatgctcccctggctccgacctctccggcctcttcggcgccgagccggggaaggagcgggtgttcgtcggcgagccggcggcggcggtgctatcccgagtggaggaggccgggaagaaggaagggtacatggtaacgagagaagggaagaagggcaccgggccggtgtacgtgaaaggcgagaacggcggcattgtggccaaggtctgcgtgttcaagatcgccgacgcggtgtccgtcgtcgaggtggtgaaaggctacggcgccgaggccgcccggttctggaaggccaggctcgagccggcgatgaagcctccggcagccatctgagctgccgacgagagggtgagctggttcgttgccgcgtgcttgcaaattgcaatcgagatttgttcttgtgttgttcagtgtaaccgtgtgagtgatgtctcccgtcggcgaattgtttgggtttttttgggatgtatttgttcatggacggcgtcatggaggtggtatgtaagcacgatttggtgatgtctgggctggaaaataagaggcaaaaaattccctgctatgatgagcggacaagaatacaagatactgaagttcgtcgactcgtcggcgtcagatgacacaggatggacgaaaatcttgcctctcttgtggacgagagctgccgttcgacttttcctccctcgatcgattgcccgataaaacagtcgaccagttcttagtttacacagcttctcatggaacgatgccaattggttcgctgaaaattgttggaagccagagtcagctatgcaagtggcgttaaaaaaaaaacagagtcagctatacaagttgctgctggtgcgaacccgtcgcggatgggcagagagagaggctggcactgcgcttttgtggcggttctcgctatcatcgtgtcgtgcgtacctcgaacgcgtcatcggaacaccgttcagaggctactgtctactccctccatctataaaaaaaaaaaaagacaaaccgtggttttcgtgtctaacgtttgaccgtccgtcttatttaaaaaatttatgaaaaaaaattaaaaagacaagtcatgcataaaatattaattatgttttattatctaacaacaataaaaatacaaattataaaaaaattttatataagacggacagttgaagttggacacgaaaatctaggatttacctttttttcttggactgaggaagtactaggcgccacttgcaaaagggaacattatcccctacctaacgttgttctttctccaggcttcagcagccatccgttcgtttgggctcctttagaacgtataagaaattaagaaaaaaaaatggaaaaatagaaaaaaaaacacagtaattaaatgtcatgctatatgaaatctgacataaactcaaaataaagacatttgtcaaattagtcgtttggatacttcacaggaagaagaaaaggcattagagtagtcttagacttctcaaaaggaattcaaactatgaggtttgagatcatgtttaaaattgttcatagtaggagctgggggatgataagagggccggcgagtcgatgtgtgcattatcgggtagcttcgagatctgatctgatatgatatctccatggatgatgatactagcacggggtgacctggactgtagcgataggccacacctactgtttggccgtgctctaggcgctgatcaccagagtacatgttggtacagttgccatgtgacctggtcgttggattggccctgcgtgagagcagtataataggggctataaaaagatttataaaaagattgaatgctgaggtagatgaaagaagagagaaaagatgaaaaacgagctataaacctaacacagatttagacatagaaaaaaaatatataagacaaacaagtaaagagctaaccactatatttgcatgcaagagactgcatgcagccatgaacctgaccaccgcccggcccggtcccgttggccccatgccccggcgcaaccggacgccgacgcttttcctgcgctttattgcggtggtccgccgccaccctcgccgtcggcctcagctcccggaggcgttgccgtgcacgggttcgtgtgacggcgatcgcctggcggcatgacaagttcaaaatgtaatgtacatgccgatccaagttcagataactgtaaaaggacgccaatcggtttcaattcgcaagcgcgtaaaagttcagtgtccagtcggattgatggcgagaataataatgcgtggtgttctaatttcctctctgatggcgaagcctgtggccgagataacctcttcgaagaggtgtagttatccagcagggccttatttatggccaagtgataaattctacgtacatttctatgaatggatgtcagttcacgattgtactatcaattgaaatccgacgtctcactaatcctgaaatgtaacaaccaataatgttagtaaggaggatcacggtgataaaagaagtgctccaaatcattctcacatcaaaatggtacaaagcgatcaactggaatcgtcaaaacttgtggatgtcacaaaactactgatcaacgaaatggcacacttagctactgatgaatagtgagcgaatacaacgctagagtagatgccacgaattttcacaggctccttgtttcaagccaatactcctatagtctgtcatcaacacatctccacgttgttacctgggttgatgccgtcagagggagcttcatgatggtgcagagttggagctcggctgcttgggactgtagtaccacagagggcggaaggtggagggacgagacgaacggacgagccggcgtccccgacccttcatttcatgttatataatgtctgtagcatcaaatatattatcacatgagaaaaatctgatatggcaagagagttaacgaggggagaggtaaaaagatgaagaaaaaatttcttatgcaagaaaccatttctacacaagaattaagaatgaaaacaagaggataggtagataaaaaaaaaagataaaggagatgattagatgataatttaatttgaagacaccatccattggattcgtagtttctatgcatggtgtctatataacatggtaaatatgaaaaatactttatagtttctgggttggggatggcctaagagagaggggaggaagtaaggctagacccaaaaaaaaagcgctcgtcggtagctagcttactcagctcgtggctagtttcggacatgtttggcggagtttaaaattctgaaaaattgcttgctggtatccagattctgagaatatgaaaaaatgcttctagtttatttttagattctacaactataatttctcagaatctggcttaaaaaactgactgtttgggggatcttttgaatttggagaatctacagctaccaaagcttctcaaacaggcccttagttcaaactcgttttgatttgttaatgacttgagctaaggttctagttcgttaggtgtaatgaggtagctcctgacctgcttgcaagcaaaaagagccaaggcaagcaacaggttaacaaacacaacattctaacaaagaaattaaaacacatctctaaccctaggattccaatcctagtacatactatctccgtttcgaaatgtttaacgccgttgactttttagtacatgtttgaccgttcgtcttattcaaaaaatttaagtagttattaattcttttcctatcatttgattcattgttaaatatatttttatgtaggcatataattttacatatttcacaaaagtttttgaataagacgaacggtcaaacatgtgctaaaaagtcaacggtgtcaaatattttgaaacggagggagcatgttatcttcacctatgacatgtggctttctcgagtctcagactcatccttccgtccacttatcgtcttgcgttgctttgttcgatcatagaactgtatatttaaattgattatatggaagttttggttgattgtatagaagtatggaaataatgatacttttattaattcgtatattagtttgctacttagactgtatgcaaatatttgtatacttaagttgatgttgttctgaatgtgttggttcgtgagcttaacaagccagcctaagcaggcaaacaatccgatccgagttagtttttagctcgataggataacaagccaagctaacttgttatcttaaaatgagccaagtcaaagcaggctctatgtacagccctaaggacaagggatgagcggatggttgaccgattttagctacgacgcacatactaagtttggctagctagataaccagccggttatagtttcactttttgttatgtactgtaggtaaaatttggtatggctagtcatatagctggcctgttagagatactatgcatttggtctagataatctctactgcgagtaattattcagcaagctttcgatgtagatcataggacccttttgaatcgtatgaatgaaaaaaatagagaaatagaaaaaatatataggatttttataggaatacaagtgtaaatagagaattgcaaaatacaggaaaaaaaacatcaatgaccatttgattggaccacaggttgaacctcttgctaacttttcttcaaaatctatatagtattactcatttcatagggatttcaaatgataggatagatccaattctttgtttcaaaggctttcataagaatttctttcgtagaattaaaatccttcaaatttcctccgtttttcttacaatacaaagggcccgtaaaggtcagttcgcagttatcagcctgaaagctgacgcctcactaatcctgaattctgtcgaatcggataaagaacaatcccaataatgttcatggggatcacaaaggcaaaagtgctcggaatcactcgcacatcagaatacagtaataacgcgaccaactgcaatcaccaaaacttgtggctgcaaacaaaactagtgaccaatagatcgaactgcaaacttcgctaccgatgagtacttaacttaacgagtactacaacgctaggagctgatctatcgatgccacgaactttcacgggccccttgattcaagaaagcactcctataattgtagcaatcgtactacgatatattgtcgtataaccattagtccttatcaaatctctgccacctcacctctcataataggagcaaacgacgaaccatgaaaacgttgctcgcatgcctccaattattggtgctccacatgctctgaactggttaaaataacagcacatcggttcacggaagcgatgctgctgacgagcccggggattctctttaggtggtgttaggatctggcgatttaattttagtccatgtatttagatactaatttagagtattaaatatagactacttacaaaatatattacataaataaaagctaattcgtgagacaaatttttcaaacctaattaatacataattagagaatgtttactgtagcatcacataggctaattatggattaattaggcttaatagattcgtctcgtaaattagtccaagattatggatgggttttattaatagtctacgtttaatatttataattaatatccaaacatccgatgtgatagggacttaaaagttttagtcccatctaaacaaggtcttaatttggatagatgcacactaacactttactgatctggacagtacgtgtgcattattcagttatatactctacatattttgagggtttggagaacttgtggccatgtgacgaagtgtgtgacacggggagatgtaactcgtcagctaccatggctaatgagtggccaatatttttatccaaagagagaataaattgaagttccttgttttttcctcactagctttgctggtgtaggggtaggagtattaaccaaacttgtgggttgtctgtacatgacttgatgtatttgattagggttgattaggcacaacgatggtgatggacatttgggtgtgaaccgtcgactgcctgaaaatgcgctaagccggcataatcatagcgaaagaaatgctagactgttgacgtcgctattggcaatatgtagacaaggccttttagtccataaattaacccattttgcttgtggaattcaagctctaattcttttggttttttggctagtaaatggtggcacatactattctgaccgggtacgacgtgacaacagccaattagcctaacctttaaacgcttttgtgttccgacaatgcggtatgcaggctgtcaggtctcaaagtcgtatggtggttcgtgagtccccatctttgttcccagaagcaagataggtaatgctgcatattttcaaaataagagataggtaacagtacgtattttgaaaagttggcaaacaaatttgcagcagtagaaaattagcatgggaaaacgagatcaactgtcaagagtgacgaatacgaattcaaattgatactccctccggttttataattctcgatattttagacaatggtcttcaaaatatagggtctgttcactttgatattattttcaactatacctttttttttaagttgctaaaattttggttacgtttagtttgttaacaaattttagtaagtgcatatgaaatcttgccaaaatttgacaaccttgccaaaattttgacaatattaccaaaatttggtaatgccaaaatttggtaaggttgaaaatggtagcaaagtgaacaagcccatatatttaaccttaattttctattttaatatatacagtaaataaatgcatgtttacatttattatagtacgttgaaagataaatatatatatatatatatggtgttatagttaaacaaaataattataaaattattgatagtgaagttataaaaagtttgaccacaaccttatccaaaatgtaaagaatgtaaccggagggagtacaacttctagttttcactccatggtatactaaggcgaatacgagttctaaagagaagtcagggaagctggctactctatcgctctccattagcatatttctcaaactcctaaacgttatatcaataaactctctcagttgtatgtagactgtttttttacatatgacagattgtatgtaagatgactaga

SEQ ID NO: 2903 - DNA, 562 bp, Oryza sativa
atcttggaaggagggtatcaatggtgatggctgatgattgttctacagatgatacggttacggggctcttaaagcaaaggctggataccgaacaacttttgttaggtgggtctttgctgaacatgagatgctgcgcctatgtgctaagtagaattgccaatagttgcctgggtgtgatgggaggtgctgttgataggatccgcgccagtgttgatttctggacagcaacaactgaaagagatgtagtgtttgctgatgttgctcgtggtttgaatgttaatctcgacaagaagttgactcttgattgtaataatagatggtactctaccttatccatgttaaatgttgccataagctacaagcaagtctttgatcacttaaggcaaatagaggaacagtatatttgtgctcctgatgatgatgactggaaattagcaaaagaggtctgcagtaagttgaaactgttttctgacattgcagaactaatttcagagcataagtatgttactgctaatatgtacttccccaagatttgtggaattcgatggccatgaggagatgg

SEQ ID NO: 2904 - DNA, 515 bp, Oryza sativa
cggttgtcagccattttgtagtcatgaaactgctccatgatatacagatcattgctagcatcagtagcaccgaatttagtattcagtgcatcccacaactccttagcgtcggtcatatgcatatacacctcgaccagacgatcggccaagaacgctaagaatgcatcccacaaagagagtagtggtttcctcgaattgcttctgctgttcagcagtaagaactccttcaggtttgccagtactcacctagaagcatttcatagctgtcagccacagagtgaccctgatctgccatctcttaaaatgcacaccggtgaatttatccggcctcagtgcatcggcaaaaccagccatagtaaaatcacagtgcctatgataaggtttttggattgttgagattatagacatataatgatttaatctattccataaataaatcatgacattacagatgaaaactagcacgaacgcatcattagatctacacatgtaactacacagtagggctgcaggaa

SEQ ID NO: 2905 - DNA, 594 bp, Oryza sativa
cgtcctggtgcacctcgatccctaggtagaaggagagaggccctaggtcactcatctggaaggtggccttgatctcttccttgaacaacgccacctacgcatccttggtgccggtgatcaccacgtcgtcgacatagacacccaccagcagggcatttccaccattgccccatcggtagatggccgcctcgtgcgggctttgctcgaagcccatccccttgagcatggaatccagcttggcattccacaccctcggtgcctgccgcaagccatagagggccttgtgcaggcgtagcaccttgccctccttgctggggatcgcaaatcccagcggctggtgcacgtagacctcctccttcaaatcgccatttagaaacgccgacttgacgtccatgtgatgaacacaccggccttcctgagcagccagcgcaaggaggagtcacacggattccatccgtgccacaagggcgaaggcattgtcgaagtcgatcccctcccgctacacgaaaccgcgtgccaccaagtgagccttgtgcttgacaatggctccggcttcatccctcttcagcttgaacacccaattaagggtgatcg

SEQ ID NO: 2906 - DNA, 761 bp, Oryza sativa
ggagtcaaacttggtgaagaactcttgtaggccagtcatgtgatgggtggcgccggtgtcgaggtaccacccatcagtcttgtcgttgctagagccatctccgaggaaggcatgtgccttcggctcatcaaggtggaggagagccgctgcggccgatgccgctggaggtagctcgatgcttgcgtgtgccaagagtagagccggctcttcctcttccacctgtgcaacgtgggcctggccgcgtcggctgtcgacagtatttggcccaatggccaagcttgccacagttgcggcaggcgtcgtctcgtgccagcttgtggttgccagcggcgccgccctgggcgcctctgcaagcgccaccctcgacgcgtgttcgcgcccactgcagctggacacctccgtgcgccttgcgctgcttacggccgcctgtcgaggaagaggactcccccttcctctcgtcatcctgacaggcctcccactgctcctgagtgagatggagcttcccgccaatggtggtatgccccgagaaaggttgtggctcatcgctgtcgacgaacttgaggcgacctatcgcctcctcgatcgacatcgtggagaggtccagcaaagactcgatcgagcgagcgatctacttgtacttctctaggacgcaacggaaaatattctcgactactctctcctcgtcgtagttgtcgccgtcgtactgcaccatcttctgcagcagagtattgagcggagggaaaagtcaccgggctgcagga

SEQ ID NO: 2907 - DNA, 610 bp, Oryza sativa
tcctttgtcgcttactccttcgaggagcttcactgacatcctcctcagagacaagttcatgtgtatgttcagtttgttttggtggtgtgattgaactgggaattatttcaaagggttggttcgaaccactatgtgtatccttcattgggaaaaagctctcaaagaagatagaatcacgagactccataattgtaccaacatgcatgtctggtacctcggatttaactattaaaaatctataggcaatgctatgatgagcatatcccagaaaaacacagtccacagtcttaggtccaagtttgcgcttcttcgttattggtacattgactttcgccaagcacccccatgtgcgcaaataagaaagtgatggttttctaccaatccatatctcatatggtgttttgtccttatttctgttaggaactctgtttaacacatgatttgaggtcaacaatgcctccccccaccatgccttaggcagtcccgcggtgtccaacatggcattcaccaagtcagtcagcgtgcgattcttcctttcagcaatcccattagactcgggagaatagggaggcgtcctctcatgtatgatgccatgttcctcacaaaataa

SEQ ID NO: 2908 - DNA, 576 bp, Oryza sativa
ttttcataccacgactagcagtactaattttaattattattcatcacctgttaatactattagtcatgctactccacatatccctaatgcttacaatgatcctaatagaggatattctcatgacaccgggtatggccaatatattatattgcgccgcaacaaccacctcttaggccaccaaatacaccaccaaatctatataggcctaaaaatatggaggagttaattagtatcattattaggaacatatttgggattgaaacgaaggatcgtgctagggagtaccaaaagtcgtatcctgatttttatgacatgatcccacatcctcgtggttatagaattcctgaatttaccaagtttagtggtgaggatagtaggaccacataggagcatgtagatcaattcttagcgcaatgtggtgagactagtaatatggatacatgtaaattgtgcttgtttcctttatctttgtctggtactgcttttacatggtttacttctttaccagcaaattctatttttacctaggctcaattagaataaaaatttcatgattatttttgcactgggtaccga

SEQ ID NO: 2909 - DNA, 657 bp, Oryza sativa
ggctgttttcaattttctttctccattcttatgtatgtcttcatttctttttcctcttttacgtaccttattctctcgtactctctccggacttataacttgtcgttttacataaatgtgaggtcaaactttaaaatctttgattataaatcatttctaaaatatttgtcttttaaaatggtgactatatgaatagattagtcttaaaaagtactttaataaaatcatatatttgttaacacttttatacataatataataaaaaataatggtaaaagttgttttttaaaagaccgtacccttatgtaaaacgacaagtattatcaaaccggagggagtaattcatcatggtcataagaatcgttttttctttttcttccactcaaattttttgtttcctttttttattactcttttttaacgaaaacttttttatatgaactatttccatccaaattttctacatatagacttttgtgtaccctagactttttaatataaaaagtatatataaactttttaaaatctttctagactttatatatataaactttatacagaaattatatttgcaatttataagtttagtggatattttcctaaaaattagagtccaatccaaacaaacttgaaaacaggaaaaaaaagataaagcat

SEQ ID NO: 2910 - DNA, 582 bp, Oryza sativa
cggccactgcctcgtcgccggcctcgccaagtacccgaagaaggtgatccgcaaggactcggcgaagaagacggcgaagaagtcgagggtcaagtgcttcctcaagctcgtcaacttcacccacatcatgcccacccgctacaccctcgacgtcgacttcaaggacgtggcctccgggggacccgacgccctcgccacccgcgacaagaaggtggccgcctgcaaggccgccaaggctcgcctcgaggagaggttcaagaccggcaagaacaggtggttcttcaccaagctccgcttctaagcgcgccttcttgttcttgctatcatccggtaatctatatctgctttttttggtatctgtgtccatgaaagactggttgttagtattgagtttaaaattaagacatgatgatgctcatgtgttatgaagtcatgccaaggatagatctggttgaaagttttgtttgggaattacactgcttcagatgcgatttgtttccatgttcctccatttccagcgggattcattgcgatgtgccaacaatgttttgcggacatgatttgcaacttaataagtctact

SEQ ID NO: 2911 - DNA, 592 bp, Oryza sativa
ggctccacacaaatttctcttctttcttcaacaactgtgtcatgggtcgagcgattttggagaagttctcgatgaacctccggtagtatcctgccaaacccaaaaaactgcgaatttgagtgactgtcttgggttgcttccaatcagtgacggcggtcgctgtttcggggtccacagcaactcctttagcagatatcacgtgtcctaagaatttgacttcggacaaccaaaactcacacttgctaagtttggcatacaattgatgttcccgcaactttcccaacaccagacggagatggtgctgatggtcttcctctaattgtgagtacaccagaatgtcgtcaatgaaaaccacaacaaacttatccaagtattccatgaacactttgttcattaagttcatgaagaaggcaggagcattggttaaaccaaacgacatcactgtgaattcatacagtccgtatcgcgtggtgaatgcggtcttcgggatgtcttcttcacggatgcgcaactggtgatatccggaacgaagatcaatcttggagaataccgtggcacctttaagctgatcgaacagatcatcgatccgggg

SEQ ID NO: 2912 - DNA, 591 bp, Oryza sativa
ccgaatgaaatccctcttcttcctacttgtaacgcttcgagcttcaccaggccccccccggggaaaaggggggcccttttttccccgggggaaaccccccccaaaaaaaggggcctttggggggggggccctttaaaaaaggttcgtgttgcggcttggcacatcccagccgtccgatcgagccacccctcccttacaaaaccccacccaggccactaggtttcgcctcttctacctcttctcccacctgcgccgccgccactcactcccaaaccctaaccccggaggagagggaggagcagccatggccgtgggcaagaacaagaggatctccaagggcaggaagggcagcaagaagaagacgtaagctgcttgcgcgcgggcggtgtgggcgccacacctctcgtcctctctgagctgcttgttcttgcttggggtttttgggggattctgatttgggacttcttctctttttctctctccgtgtgggtgcagcgtcgatcccttttccaagaaggattggtacgacatcaaggcgccgaccgtgttctccgtccgcaacatcggcaagaccctcgtctccaggaccca

SEQ ID NO: 2913 - DNA, 1648 bp, Oryza sativa
accatgctcttagagcaagtttaatagtataaccaactactacctccaatttatctatagccattctaatagctcgttcatacaatagctacatactatactattaatacacggtcccacctgtcgtgtcttgaagtccgtgctacagctggctataaatctgtagcccgctgcccttctctcttctcatttatcttcttaaaatatgtttgtagctggcttatagcatgctattgtacctgctcttagctagtcactcagttagagagacaggagggggagagaaatggccctggcggcacggtggcgtgctgatgtacgaaccatatataggtgtagtagactaagcacaaggttcaaattaaatttgaattagttaccccggtaaaagcttgttaaaagtacctacagaaaatcagcgtaagtctaagggtaaatcaatggagaaaaaaaaacagcatatataaatcgtgcaggatttcgcatgaacagagtgtcaggcacgcgcatcagaaaccatatcgacaatgacgagctagccgacgacagcgattgcctggctgccaactaggatatatataatgtaacaagaaaattaattaattgggtgagatcgatacgtgaaacatgctgattaattatcttttaatttggtccacttgtagtaagtttgttgtgaaaaccaatgatttctaattatcaggggaaagtgaatatattaacattgcccgtggaactcgaatcttgcaaaatatttggcagggaaagccaatcagatgctaaattcaacccacaccaagctaccatgttgtttatgtacacttggctgcagatgatagtgatatactataggctgattgtatccagacatcttatactttttcagtaaagctgggcgtcagccttttgttctaaaattagggttgaaagtgattcgaataatttccatccgaccggaccttttttcggattcggatagtttcggtcggatatatctgaaaatttttgaattcggatttttttttcggatatgaaaacgaatatgatataggtgatatccgtcagatattatccgatattttccgtcggatatccgacttacacataaggctgccataatccataagccagcccaacccagaggagtcaaatcaaagttcttgaaaaaaatgaatttcgaattgaattttatgatactgaatgaactcatatgaaaaagttgtcaaaaacaaagttgtagaactcattaagatctaccaattttattttggtcatttctccatccgagtttcattgaactatataaaatttgaattttaaaatataagaaattcaaataattcttcgggtagtaaatgatttcaaatggaaaaattgtcaaaaacaaagttgtataacttaccaagatctataacttttattttggtcattttcctatatgactttgtttgaacagtttgaatttgaatttgaaaatatgacaacttcaaacaatattttcaaatactaaatgatttcaactgaaaaagtcatcaataacaaagttgtataaatcatcaagatctataacttttattttggtcatttcttcatccgataaagtgacagtaacattgttcacaaaatttacatatctctcatttggttt

SEQ ID NO: 2914 - DNA, 1441 bp, Oryza sativa
ttgattgactagggagaggacacacacacatatatattttatcaacgcttagaccattcgtgttattcaaaatttttgtgtaaatataaaaatatttaaatcatgcttaaataatatttgatgataaattaagtcacaataaaataaataataattacataattttgttgaataagacgaatgcaaacgtataaaaaaaatcaacggtcatacattgaaaacggagggagtagcgaaagagcttgtagcctagtggttagagcctcagtagcaccttaggtcctgggtttgactccccataggagtgaattttctaggatttaatggctttgtgctttcagtggtagatgacgtacccgtcaacagcgaagcgtctgtgttaacttcgtcaatttccataatttgccggcccagtcttcgaagatgctcataggggtgagtgtgcgtgcattgtgagtgtctgtgttgtactgtgtaatttttttttttaaaaaaacggagggagtatataccaatcacctattcaaccacgatctagctagatcaccatctaaatataacaactcataattttactcttttattacttaagcaattccacttgtgaatattttttttactcaagccgtttggcagttggcaccaatgtactcacaattttactctttttacaatatctatttacatattaacactaatgtaaatcatactcaagttgttattgtgcataaaataaaaccacatataaaaccgcacatgagttatttaaactggtttcagtacttcatgggtagaatatgcagtttcatacttggggtagcagaccaacctcaatcggtagtactacatttataaaaaaagtatatgtttcttatattatatcgcagctagcgcactgtataccttatagaatgttatgatgtgcgggaatgaaattttacgtgctatgtatttgtgtactttgtatataaatgtgagtaaaaagttttactcacaacatgtggtttagcccaagcggtttttatattatgcgactttagatgatagtttgtttgaataaatttaggcagttgaaaaagagcaaaaccttgaagttctgtaatcttgtttgataaaactgcttttagaccttgtgagatgcttttctttttcatttatgttgccactaaaccatgatattgttccatcctgaaaacataaaacaattggagaagaattgacaaccacacatatattggagaaagccgaaagacgagtctttattacaagaaacataaaaagcaaaaggctaggaacacacaccaccgttgggacgacgaccggccaggcttaaacccaccaccactcaaattaagacgcaaaatatagttaagctggtcaccattatttataactcctcaataatacaaaagattaatgatttctcgaacttaatcgaaat

SEQ ID NO: 2915 - DNA, 1629 bp, Oryza sativa
cacttgatcatctccacaccgggtcattacttgttactcttggaggttgccgcctcctagacagcttgtggaggagttgcccggtgacctctccgagaagattgtggaggaggcccggcgccggtttgtgagtggtttagcttcaccaccttcggagtgaaggaagaactaccccgagtgatcgaggcttgggtagtcctctccgtgggccggctcccgccttgcccaccccttgacgaagggggcgtgcggtggcttcgtagttgagcggtggagttgggctcgcctcaacggggagtaggaaaccggcgagtttccgaacctcggtgaaaaatctcttgtctcatttgattgtcgcatttacatttgtgcaatttacttttctagagacacacttgagatcatatcaccctaggattgcaaaacatcgacataggagcgtgatttactttcctagagatatatttgagccactatcaccctaggtttgcaaaacataacttagttgcttagttagagttctccctcaccaagcctagcaacttaggttaaatttgattaggtattatttagttttaaatcgcctattcaccccccctctagtcgacatctcgatcctacagaatggcaaaagtttagtatgcatctaaactccaactagtagttttgcaataccaaaacttttgccaccaaaacttttgccatttgccatttgccattccaaatgcatctaaacaggccctaagttttgtatgtaattattgcttgtggatgatgaggtgacatgtttgcatgttaagctttaagatttgtggattataactttatagtaagataggtagccacatcttttatttcttctacacggaacacaaagatagatacgcacataatacacttatgtatgcatgcccataatcccctttaacatatgcaatatatatagagagaggctataaaatatataaatccataaaggcgtaaatctaactaaatttctagtcaccaaagatacgcttcctcatctcgcgtctacagccatgcattatggtggtgtttggatctagggactaaactttagtccctgtcatatctgatgaatttggagtattaaacatagactacttataaaactaatcacataaatgagagctaattcgcgtgataaattttttaagcctagttaatccataattagcacatgtttactgtagcatcacatagggtaatcatggattaattaggctcaatagattcgtctcgcgaattagtccatggttatagaatgggttttattaatagtctatatttaatatttataattagtatccaaacatccaatatgatagggactaaaaactagtcacatctaaacagggtctatattatcgatcgactaccacaatttatgcatgggaaactatgcatcagtcaacatatatatatatatatatatatatatatatatatatatagtgaccatagatactggtggtgacctgagacagatggaccgcaggtgaccatatgtagtagagcctccctcttcattctatctctcatgtactgtggaggctgtggagatcacacgaaactactgtgaaaatggatagctatcaaaggtgtcta

SEQ ID NO: 2916 - DNA, 2202 bp, Oryza sativa
  unsure (1)..(2202): unsure at all n locations
ttccgggtgaaaaatgttgagggatcgaacaaactccccgaaatcaataacaccattgcgcttaagatcaaagagatcaaatatctgcttgaaatgagaagactctgtcagtctttcacacatctggaattgttctataatttaacggaaaccataaaattgtgcttaattagctcagaaaagcttttgcagtgagacagcaaaatactcagaaattcaaaaaaggcaaaccgacccgatcggcgaaaaggttcttcttgttgctgttcctgaagagtgctagctggaactcctcctgttcaagaaaatggcagttcagaattgacaaaataccagaatttcaataccaaatggtcacttttgtcaaaaagatggcctccattaaaaatgaaattcaagagagttaaccttgtgaataagcccatctttgaatatggaatggcttatcttcttgaacagctcatacagggcctccacctacctcacagaaactacaagacgtaaatacacaggagaaagcataattaatcactctccattcctgaactgaagaatggtgtaattcagtgagttcttacatgtggtctcttttgccgggatagcaggatcctcatgctctgcggctcgtttgaactgctttgatgatatgcagcccatacaaaccacacctttatcttgttgttaagaaacggctttcctgcataaagtgataacagtcacctcaaagaacaggataaagaggctgctaacaaaaaaaagtgaagtgacatgaaaaagttaagtgaaacattaaaaacacaagaaacacagccaaacaacaagacctcctttggaacagaggaattagactaaatcggatgaaaatcccataaaaattcctgcgttccaaaggagccctgaatcgacaaacacagaagaattaatctcacctagggaagaaacagaggtgcctttgaacttctggacatcaagaagaagaagttgatgagcaaaatagagggggggggggggggggggggantntnnnnnnntngtgtgnnnnaaatacntncaagcttattggagatacaatggacatagaagaagaagatggcacatatatttatatatgcacatgcatagcaagcatctgggctccacagtgtggcacagccccagctgtgccgaccgtgtgtagcaagagttgacttgaaatggttccctgttacacgatctgcaacattaaattattactactgttttatattgctcaagttcagcatctgtcattgctgaaaaataatcagcaatggcgggaatagattaatactagtagtttacagtgtgtatctagcctagatgtagcaatatatacttgttgagtaatggaccataagaacgacggttttgttcttagttaagtgatgttaactaggccgtaccaaagatacatgcatccaaaacgggcgtattgtgattgatgtttaacgaaaaatgtcaacgtcgccttgtagctatcaagcgtggttttttttatatatatggaaggagggatccaaaggtgacgcatgctcttccgcttaacaagggatggagcgcctgttcatcaaggacctaattttggcgttattttctcccgtctaccgggaggtactagtactgggaggtacaaaatcaaatctgaccatctatcgtgagagggtacaattgagaaacacagaagagaagcgaaaccatctccggtgtcgcgccaccgctttctcatctgtttaaagggttcgctcttctcatctgttcagaagaattcggtaaaattgtaaagaaattgaatggcacaatttcctgagtgccttgtagttgcagacagcagcagaatgtatagtaagcagaactaagtgttcactgttcagggcttcagacaggcgcttaggcagccatagtgtagtggtgcaagcgcgcgtttataagaaatgtgtgtatgcacgcgtatatgagtgcctacattatattatttaaataataataataaacgtctggaacagatatcgttcaccattatgttacatttagggggacatatatgtgaaaacaagctagggggacatatatgtggaaacgagttaagtgttggaaactcatgaaaatcatacctaaaagttttgtaaattcataaaaaaaactaggaataggtgtagatatgaaatacattctcattaaatctca

SEQ ID NO: 2917 - DNA, 5506 bp, Oryza sativa
tgtagtgcttgtcaagccggcaagcaagttgcatgttctcatcctactaagagtatcatgtccacatctagaccattggagctcttgcatatggatttgtttggcccaacaacctataagagcattggtcgtaatagtcattgtcttgtgattgttgatgattattctcgctatacttgggtgttctttttgcatgataagtctattgttgccgagattttcaaaaagtttgcaaaaagggcccaaaatgaatttagttgcactcttgtgaaaattagaagtgacaatggttccgaatttaagaataccaatatcgaggactattgtgatgatcttggtatcaaacacgaactttccgctacctactcacctcaacaaaatggtgtagtggaaaggaaaaatcgtacattgattgagatggtaaggactatgctagatgaatatggtgtttccgattccttttgggcggaagccataaacaccgcttgccatgcaaccaataggctttatttgcatcgtctcttgaaaaagacttcctatgagctaattgctgggaggaagccaaatgtcgcctattttcgagtttttggttgcaagtgttatatttaccgaaagggtgttagactaaccaaatttgaaagtcggtgtgatgaagggtttcttctaggttatgcctcaaatagcaaggcataccgggtctacaacaagaacaaaggtattgtggaagaaaccgccgatgttcaatttgatgagactaatggctcccaagaggggcacgagaatttggatgatgtaggtgatgaaggcttgatgagagctatgaagaacatgtctattggagatgtcaagcctattgaagtggaagacaagccatccacctccactcaagaagagccatctacttccgcctcgtcaagtcaagctcaagttgaagtggaggaggagaaggcacaagatccacctatgcctccaagaatacacaccgctctttccaaggatcacccaattgaccaagtgttgggtgacattagtaagggtgttcaaactcgatctcgtgtcgcttcgatttgtgaacattactcgtttgtttcttgtcttgaaccaaaacatgtagatgaagctctttgtgatccggattggatgaatgctatgcatgaagagctcaacaactttgcaagaaacaagttgtggactttggttgaaagacctagagaccataatgtcatagggacaaaatggatctttaggaacaaacaagatgagaatggattgatggtgagaaacaaggcaaggttggtggcgcaaggtttcacacaagttgaaggtttggactttggtgaaacttttgcccccgtggcaagacttgaggctattcgcatccttcttgcatttgcatcatgctttgatataaaactatttcaaatggatgtgaaaagtgcttttctaaatggtgaaattgccgaacttgtctttgttgaacaacctcccggttttgaagatcctaaaaatcctaaccatgtttacaaactctcaaaagctctttatggtttaaaacaagctcctagggcttggtatgaaagattgagagattttcttttgtcaaaggatttcaaaattagaaaagttgacaccactcttttcacaaaaatcattggtgatgatttctttgtgtgtcaaatttatgttgatgacatcatattcggttctactaatgaggtattttgcaaggaatttggtgatatgatgtctagggaatttgagatgtccatgattggagagttgagcttcttccttggacttcaaatcaagcaactcaaggatgggacgttcgtgagccaaaccaagtacatcaaggatctactcaagaggtttggcttggaggatgcgaagcccatcaagacacctatggcaaccaacggacatcttgaccttgatgagggaggtaaaccggtagatttaaagctttatcgttccatgattggtagcttgctttaccttaccgcatctaggccggatatcatgtttagtgtttgcatgtgtgcacggtttcaagccgctcctaaggagtgtcacttagtggccgtgaaaatgattctaagatatttaaagcattcctctactattggcttgtggtacccaaaaggtgctaaatttaagcttgttggctattccgattcggattatgccggttgcaaagtggatagaaagagcacatccggtagttgccaaatgcttggtagatcccttgtgtcatggtcattcaagaaacaaaactccgtagccatctctaccgccgaggcggaatatgtttcggcgggtagttgttgtgcccaattgctttggatgaaacaaaccttgttggactatggtatatccttcaccaaaaccccactcctatgtgacaatgatagtgccataaaaatagccaataacccggtccaacattctagaaccaagcatattgacattcgccatcacttcctaagagaccatgttaccaagtgtgacatagtcattagccacataagaaccgaggatcaactagccgatatttttaccaagcctcttgatgaaacccgcttttgcaagttgaggaatgagttaaatgtcatagacttctctaatgtggcatgagatggtgcaccatggttgcttcttttgcaattgtatatttgctcctatttgctcttatgctttggacttattgccatttggttcttcattgcgaaaatggagcatgtcacattaagggggagttttggactcttgcatgtgctctacttccttttatatgtgagcaaatcaactaaaagtgctagtagtgttttcaaaatgcccaagtcaacataagtcaaaagttttgcaaaatcaatgaaatttgaaaactatctcttggaaaatgtttcaaaagggtccctatatgttttccaagcctcacattgctagaaaaatgatttttgaatgaaaaatgctattttggctctcttttgaagaatctagattcttgtttttggccaaaatgagattaaaccccaaaatgagtttgagaaggaatctgagaaaagtttcaaaacaaagttggtagagaggaggatttgaaatgtttttggtattcaaatcatattcaaaatccaaatatttcaaaagttgtttgaaaatcaaattcgcccaaaaacccctatagaccataaatggtcacctcctagcactcaagtaagttttgttgcaaatcttcataaatttcaaatattatgaatggttggcaatatttcaactcacacatttcaaaattgctccaaaattcaaatttttgttgaattttattgtatgggggtagccgaactgtgcaagggctatgcacagtcggctggggggccaggcggtctgaccggcgctatatgcgcggtctgaccggcctggtggtggcggtctgaccggcctctaggaaccggtctgaccggctgcatcctggcggtctgaccggccacgtatagccggtctgaccggccagggatggtgggcccaggactttgtcctttcttcctcctcctccttctacccgacccctcctcatcccatctcatctcttctcttctccaactcaaaaaaactcctcctctctcctctcccaaaccctagccacctccctccaccaaatccatccggttcaactgtcaaaatcactccggttacaccataagtaaatctcctcctcttcctctctctattccatggattgatttgagttcttattgagtttgtgatccatggcatggaaccctaggtgaaggaagaggtgttcatcgatttgcaccaatagagggtagtttcttggtgtgattcaactccttcaaccggtaaatccctctccctcttgtgcattgctctcaaatcggtctatttcaatctttagggttaagggtagttttcccattgcttcaatagacctacaccttgatgttctagttccaatcttgtgcaacactgttctagcaatttttagaatcatttgtgtggattgtggaaggatttgggtgtgctcgtgtcagtggcggtctgaccggacgcggtctgaccggccgagggccggcggtctgaccggccttgaaccgttggtctgaccggccgtggctctcggtctgaccgcccctgacaggcagcactcgcccttcctcccacttcactatgtggtttctaaaattgttgctcatccatcctttgctccttgtttttcagctatgcctccccgcactcggcatggtcgtcgtgctcccacgcccgatcccgttagtgagaatgaggaatcaagcggagatgagtatgttcaaagtgatgaggacaatatggaaaatgttgagggtgatgagatggaagtaagtgatgatggtgatgacaatgagagtgcaaatggtgaagatgatgaggcaagtgatgatgggagtcctctcgattcctcgatccaatttgtgcttaatttgaggaatgctcaacaatacactatcctccgtcatcatgatcaattccggaggcctaacgattgtaatgatccaagatttcatacacggttccaaaagtccgtgtatgtacaagtgtatgccaacaaagccttcgccgaacacaaatggatctcttggaggcacattggtgagacaccggagtttgagaatttgcaagagatgttccggaccattgggattgatagaattgtcaccatgaagcaaccttttgatgaagatctcatccggcaattctatgccaccgtatgggtgtccggcgattgtgatgcaatgaagtggatgtcggggaccctccgatgctctatcaaccgccgtgaattcaaggagctcttgcacattcgcttcaacaacggggatgaccttcatgatgagcacacccacaatctctttcccattgatcacttttctcagttttatgaagaagggggaaggcacacatatggaaaggtggcgggtttaagggctctcccaagtgtgatcaaccgcatagtaagggccaccatcctcccaagatacggcaacaatgatgacatacgcggagttgcttggcatgttattgatgccattatggatggtcgtcggtttgatgttatcaaccttatgatgaaggagattgccatctcaaaggggactattggacaaggaatctattatgctccctacataatgaggttgattcaaagcaagttgggacaaattggtcaaaatttaaaagaacataaggagtacaagcctcgtctccaactctcctcccctagagctcctcgtgtgcgccaaccaacttttgatcaaggtgcaagctaaagtgcagcccccctcctcctcaagggtatgatccaagtactttattccatccacaatatgcctactttggaatgcaaccaaatgacttctttaacccggtccttggggctattaataccctcagtgaaagcattcaacgcttatccaccgggcatgaaccattgcgtgaggatgttcgtggcttg

SEQ ID NO: 2918 - DNA, 4682 bp, Oryza sativa
tctcttgtgtatcaagccttcaggctaggggtgtaagtggctaacccgcgaaacccacttataggcgaaaataagccgcgaacccgtttattttgacctataagtgggttcgcggctgacccacttacagccctacttcaggcacatgaggatcaatcatttcatagtgtgactatttgtagttatctgtatggccgtaaataatggcctctatattgttctgtattggagtatctctctactatttttttctctgaagaagagcattcttttacctatttttggttttcataatttaatgtgatgcataatttgattctgttcttttttagataaaggaggctaatttgattctgttcttgcaattgtggatgcactgcagggaatgcatgtgtcgctgagccagcaggtgcagcaggttgaggacacatatgagcagctctctctggctctcggggaggcagcaacaactgaccttttcagaaagtccgtgttctttttctcaatcgggagcaacgacttcatccactattacctgcgcaatgtgtctggcgtccagatgcgttacctcccatgggagttcaaccagcttcttgtcaatgcaatgaggcaggaaatcaaggtgtggttattgttctccagtttattctctctgtgcaacatttcttgcctccttatgattccagttttagttttttgatcagtgtgttgcatattgcccaaaggctgtagtatcgtgcttagcagtggccaatgttgtgagtatgaatttgatccgtaatttacggcccgtaaatattctgtgcttgaaaggtatctgctctcagttccaccacccagatgtgaatagttctttgtactcctggttaggaatatgtttgagaaaaggaggagtgtggacctctggggactgcagatacatgaattatggaaaactagctatgaacattaatttttatgtttcaagggctagaaaattttcaaatgtttatagagaaacctgatatagtacactttttctgtaggttaaagttttcaaatggtggatgagtttaaaaccgtgtacagttttggactgaagcttctttgagttactgaaatcctcaggctgtacagtttttctgtagttatgaattaggttaaaaggataggagggtatttcatctgtacatttgtaatatgggaaagttaactgataaatacatggaattgattaactcaatggatatttatatcgttggctgttagcagttctgtggtgttatgtactttacattctccgtctaccgtaccttaatttcagatttgaggtagtacgttgcaacgttgctcaacaaggacatacttgttttttatatgttcattttgaattcttaacattttgatcagataaggcggccccaaatctgatagggactgatgtaaagtcgatactgaatattgtcttggactgaatactgtgtttgagtcccttagttcttggtctgcgcatacttccagagtggattgtactttgtactgcctcccatttggaagtgcaagctaaatgcgtgttacttttgctcaacttgtaggacaccatgcacactaccaatatgcccatgatcttaccatgatacaaacataattctcacatcatgcataaatgcataatgcacaatttgattttctccctaatttatcccctttccttttttgaacggataattttaatttgcaaaagaattggtaaaaatggccccaaatttctattcagtaaatctttggcagagcatgcgatgcacattgattgaggctgcatgcgccatgagtttatttgtactgtccaacatttgagagcagaaatttctgttaccattgtactcatccaagttgacttgagatgttgctttcttgtttcttaaccttagtaaatcagttacaatgatgcatttttttattatttagccatatgcagttcttgtcagattagattattaagctatttatatctatatataagagttctgtacttcctgcagaatttgtacaatatcaatgttcggaaggtcgtcatgatgggcctccctcctgttggctgcgcacctcactttctctgggagtacggcagtcaagacggggaatgcatcgactacatcaataacgtcgtgattcagttcaactatgccctgagatacatgtctagtgaattcatccgccagcacccaggctctatgatcagttactgtgatacttttgaggggtctgtggacatactgaagaatcgtgaccgctacggtgagcagatgtatcattgttactactgtcagattgcctttctggccttagggaagaactcacattacgatggaatcacattgtgcaggttttctgaccaccactgatgcctgctgtgggctggggaagtatgggggcctgttcatgtgtgttcttccacagatggcgtgcagcgacgcgtcgagccatgtctggtgggacgagttccaccccacggatgctgtgaaccgaatcctggctgataatgtgtggtctggtgagcataccaagatgtgctatcctgtggatttgcagcagatggtaaaactcaagtagaactgaaccaacccttaaactccattgtagttacttgctcagcttttgtgattttctgaccaaaaaatgaaaaacttaacaaggcggcacggagaagtgtatatcttgagagctagtaaaattttttcgtagatacagatttgtgtagaaataccatgttcatatgtgggcactgcactgtaaaggatctgtatggccaaactgcatgaggtgcttggtaggtgaacataaaacattgctgagaactcacctggtgtgcttaactccccaattctcacatgttttgtttaacttctgatacggttatagatttatggtgaaatgttattatgtgttgcagttttctgcttttctggtgaatccatatgggcaacatcaaaggtatttccaagaacacaagttttatggtactctggtactagctatgttctgttatcaactgatttatcctcttatagatcaaaacactgcttccactgcctcctactgcactaatcaacaagcagtaacatcttgtcctgctttacacggtcagtttacaaaatacagccttgcccataacagagagacaaattacaacctccatatcaacatgccccttaattacaatcaactcctcagctgaccaccttgtagcttgtttagattctgatttgcaatcctatccttccaagtgctgacagctggagctctctctgttgctgcaactagagaaactctgaattccaaagctctgtatctgaagtcctgatgctttagcaagctgagctatctctcttcccatggtttggccatactcataagagaaaaatataaggaagagcatggagagtagctgagtagccatggatgctacaactcttcatcatcaactccagagttgagaacaaaactggggaatgccattgttatgtccctgaacacgaaaatcgacaaggcaatacatcagaatttcatttatagttgaaagcaatgtaaaaggtaactacggtgaagagaaacctgaaaaattgtagatggtacttacttcaggtatgggagggtcatgttcttcagcaaagcagggtttttacttgcgaacgccttccattcatccgggtcgatcttcccgtcgctgtttaagtctgcttgcttgaacgtctgtcaaaaagtagcataaattcaaacttcagttatatggggaagaaataaattgagactagtattacatcttcatgtgctttacctgatccacaatctgctcaacagcgtcatcagaaaggagcagatctgattcattcagaatggcgagcaccatttcgtacaactgcttgattcataagggaaaaaaaaagaggtttcagtaactttaggattttctctgtcaaaatgaaaatgcagtacaaatattgttccgaaacaatactttgtatctccagttttccacgctcagcctctggatgttttaggatttaaacaagtctttaacagggttcaatacatatattcttcaccatttatacaaccattatttatgcatgttttctttgatatcgccaagaaaactggtgtaccatcgccatcagtactgaaggctagctatgcatggaaattacattatgttttgttatttctacaaaatatagccaattagtcatattctttagataatggaagctttattgaacccagccaattacacatcaaggtgttcaatggaaagaattaaggatattgtttagtaactcaatatacctcttcacgttcgatgtatccagttcctctcagatcatacaatctaaatgcaactgcaagagggaatactgtcagatgccaaaccaagaagtgatatatgaataaaatgaagattgatatgacatgaacagaagacaaaatttgactgcaaacaactccaggatgttgaaaagcaaatcatgacaaaagatgaagatgatcttggcttataccagaatactctgaccaactaactgacttatttctgcttctatcttttaaaaatccttgattaccagcaagtattgttttgaggtagttttaatattagcgactaagctatttcttaagacaactgagaaaagagggctgcagga

SEQ ID NO: 2919 - DNA, 784 bp, Oryza sativa
tttatctctctctgtgtatcgcacacacatatttgttagtccttacaaaggcacaagggcgttatatatttttttgtctgtgtgtctccagagagtgagtgtgtctaaaaaaatatatatatatgtgtcaatatttgtttttagtgtatacacagtgtctgcgtctctaagtatatacatacatattacatggtattctatatccccctctttatgtatatataaaaagacgcatatatatatatatatatatatatatatatatatatatatatatatatatatatatatatatatatatatatatatatatatatatatatatgtgcaacctctttaaaccaccatgtatagagcaaaactgaaatttactaggggtcattgtacaaaagcactaacaggtgtcattgtggaacaaataataataacatgaaagaacattgcaagaggattcaccattattatgatatttccttcctcacagggaatatgggaggccatatcatcataaagggcatgattgaaaacaagatttcatccttttctgtcacctcgtaaaccttgtgaagttgcctactcttaacatccaagtagagtgcacattcatctgttttcaagaacaaaaactcagcatcgtcccctacataatccatgtaaacaacacgactatccccgcccacacaatttatgtgcaaattagcgcacatcgaccgcaaacaaatggtatcaaccagagtccatccagtgctgccatgcttaagtagccaaatacgaagctgaggct

SEQ ID NO: 2920 - DNA, 516 bp, Oryza sativa
ataagaaccaaccaaaaccttaagacatttaacagaatttagttctgtgcatgcatgtgcataaaaattaaaaacgtagattaagtgcagcatctctacatagtacatacataataattcaagaatcacaaaattttccaggaaatgtcatgtaacactgtaatcacaacaggagcacgtaccaattaacaggattcagatatgtcggacctgagataccaaagatatctctgtccacagccatctggctatgcagagtcactcttcactttattggactttatagtgatgaaaaacataacactgaaacattaagaaaaaattagcacataaaaactgatactggtgtcaacaaatgaaagtattgaaatcctcaagaaaaagctacaaaggtggtcacattcaaatgccatctactttggaccgagagtgtggtagttaaacaataaataaactaaagagcaggcaaataagtccttagggtagttcgaagtatctatgttggtctgttcagca

SEQ ID NO: 2921 - DNA, 652 bp, Oryza sativa
tgtagcggaccctttggttagccccctgttggttgcggaaattcgccaagcgacgcttgtgcgactccagttccttgtgcttggcttccaagcggatgctcttgtccaccagacgttggaaatccggatagtccccggagacaagacgcacggacagctcagggtccattcctgccaagaacttctcttgcttctcctcatcttcacgaatattcctccagggcgtaccgtacccccccgggccaggttgttaaactcatgcaaatactccatcatggagcggttgccttgcttcaactctcggaattcccttttcttaagggccatgactccggcgggcacatgggttctccggaaagcggcggtgaagcgggcccaagtaagtaggattgccctttggctgcgtagcctggaaatggtcccaacatagagatgcgggcccctgcagttggtgggcggcgaagatgactttctcctcatcactgcactgcacggggtctaactttttccccacggcatgcaaccaatccaacgcatccacggggttattggagctagagaaggtaggtggacggatgcggaagaactccgcgagtttagagtgttgtgggggtggtggtggagcattatgttgtggcggattttggatgtg

SEQ ID NO: 2922 - DNA, 518 bp, Oryza sativa
gcagcccctcaaaactctagaacactcggacgtccacttgaacttttcttctttcttaagcaactgagtcataggtctggcaatcctagagaaattttcaatgaaccgacggtaataacccgcaagtccaaggaaactccgaatctgtgacattgccttaggcggggtccacttggtaactgactccacattcgacggatcgactgccacgccctgagctgtaatgacgtgacccaagaatttgacctccgataaccaaaagtcgcatttactgaacttggcatataactggtgctccttcaacttctcgagtaccagacgaagatgttgctcatgttcttcttcagactttgaatagatgagtatgtcatcaatttataccacaacaaacttatccagaaattccatgaacaccttgttcatcaggttcatgaagaatgcaggtgcattggtaagtccaaaagacatgacagtgcactcatacaacccataccgagtggtgaaggctgtcttggaaa

SEQ ID NO: 2923 - DNA, 694 bp, Oryza sativa
  unsure (1)..(694): unsure at all n locations
tacattggaacccgaggcatgccggttgacaatttctcatgccgttctctgcaggtgcttcattgtacttttggttttcttgtattcacatttttcctgcacaacacaaacttttatttcctttctgttgtttcctgtattgctttgcctgaatatgtacataagtggataagttatggtgtgcagcaacaacaaaaacttactgttctgtttcacaatgtttgtccattaagaaaaccaagaatgtggttattacaatgttttcactcattaaatgctttgaaatgggtaaaatggttgcattttgctatgcatgtttttttctcgttaaatttttcttagattttgtacttccttggtttgagcgcatggggtgctgtggaaaaacattgttagacggagggagtatcttttagatgtttgacatgaatgcgtattttatttttgacaaactgtgcaatggaatgttgacccttctttgcttactctaaagtaataaatattgcagtgaaatgggtgcccatttttccccttggggaccaattcttgtaacatgtggtgcctgtttgctgcctcaaactgaaangccaccgttgtagccaattgcctgtgcaggatgaattcttgaggggcccgaacattaccaactcgtacccttttcctttttaccgagtatttatgaactccagttact

SEQ ID NO: 2924 - DNA, 530 bp, Oryza sativa
tatagggcgaattcgagctcggtaccccttaagccagaagtcgcacttgctgaacttggcatatagctggtgcttttttaacttttcaagtaccagccggagatgctgctcatgttcttcctcggacttggagtagataagtatgtcatcgatgaaaaccatgacaaacttgtctagaaattccataaacaccttgttcatcaaattcatgaagaaggcaggtgcattagtgagtccgaaagacataactgtgcattcgaacaacccgtaccgagtggtgaatgttgtctgtggaatatcctcttcgcggatcctcaactagtgatagcctgatcgcaggtctatcttagagaacacagtagctcctttcaactgatcaaacagatcatcaatctggcaaaggatacttgttcttgatggtgacctcattgagtgcgcggtagtcaacgcactcttgatggtgacctcattgagtgcgcggtagtcaacgcacatcctcttggttttgtctttcttctccacaaagataa

SEQ ID NO: 2925 - DNA, 554 bp, Oryza sativa
ttgtacgagaattcagcataaggcagacttttatcccatgccccaccaaatcgagcgcacacgctcgcaacatgtcttccaagatctgattgaccctctcggtttggccatctgtctgcggatggtaagctgtactgaaattcaaacgggtccccaattcttcctgcagtttttgccaaaattttgaggtgaactgattccctcgatcggatacaatcttcttgggtactccatgcaaacacatgattcttgagagatagaactctgccaaccttttgcctgtataagtagtgtgcactggtatgaaatgagcaaccttcgctgtcggagatttagatcaggttgggtgaagatatatttcaaactcttgtgatccgtatatacttcgcagcggttgccaatcagataatgcctccagattttcaaagcatgaaccaccgctaccaattccaagtcatgtgttggatagtttccttcatgtgggcgcaactgcctcgaggcataagcgaccactctgccctcttgcattagaacacatccaagcctgtgacggg

SEQ ID NO: 2926 - DNA, 592 bp, Oryza sativa
cgaattcgagctcggtacccctaaagggtttgtggctaatctggaagtcaaacccacattggaagatcaaatcaaagaagctcaaaaagatgatgctaatgtcaaagaaatcaagctcaacatgaagaaaggaaaagccataggattcactgaggatgagaatggtgttatatggttacatgagaagttggttgtaccagatcagccagaactcaagaagctcatattgtcagaggcacatgaatctcgttattctattcatccgggaactacaaagatgtaccaggatctcaggaacagactatggtggcctagtatgaggcgtgagatcgcagaatatgtggtactttgtgatgtttgccagcgagtcaaggcagagcaccaacaacttgccggacttctacaaccattgaaggtaccagaatggaagtggtatgagattggtatggatttcatcaccggtttgcccaagactcagttagggtatgattccatttgggttatagttgatcatctcaccaaggtagctcactttattccagtcaagataacttattcaggtgacaagcttgagtattctatagtgtcacct

SEQ ID NO: 2927 - DNA, 1712 bp, Oryza sativa
tcttatcctgttagaatccaaaagccttgatgtcatcctagggatggactggttagccagatataaaggtgtgatagactgtgctacagaaaagtaactcttaccagtaatgatggtcgagttgtaactgttcatgcattgtcttctgagtctttaaggtcaagactgaaccaaataacgttggaagagattcctatagtccgggagtatcctgatgtgttcccagacgatttacctggtatgccgcctaaaagggatatagagttcagaatagatttggtaccaggaacaactccaatccacaagagaccttatagaatggcaaccaatgagtttgcagaagtcaagaggcaagtagacgatttgcttcagaaaggatacatcagaccgagttcatctccatggggagctccggttatttttgtggaaaagaaagatcatacccagaggatgtgtgtggactatcgtgctctaaatgatgtgactatcaagaataagtatccgctacccagaattgatgatttgtttgatcagcttaaaggtgccaccattttctccaagatagatcttcgatcagggtatcaccagttgagaatcaaagaggaagatatacctaagacagcttttaccactagatacggattgttcgaatgtactgttatgtcttttggacttaccaatgcccccactttcttcatgaacttgatgaataaggtgtttatggaatacctagacaagttcgtggtagtctttattgatgacattcttatctactcccgaaccaaagaagagcatgaagaacatcttcgccttgcactggagaagctgcgagaacatcagctgtatgctaagtttagcaagtgtgaattttggttgtcggaagtgaagttccttggtcacgtcatctcagcaggaggagttgccgtcgatcctagtaatgtggaatccgtaaccaactggaaacaaccaaagacagtttcagagattcgcagtttcctaggcctcgcaggatattatcggaggtttatagagaatttttccaagattgctaagcccatgacacgactgcttcagaaagatgtgaagtacaagtggtcagaagaatgtgagcagagttttcaagagttgaaggatcgcttaatatcagctcctattttgattttgcctgatccaaagaagggttttcaagtgtattgtgatgcatccaagcttgggttaggttgtgttttgatgcaagatgggaaggtggttgcctatgcatctcgtcagttacgtccgcatgaggagaactaccctactcatgatcttaagttagccgcagtggttcatgcgttgaaaatttagcgtcattatcttttcggtactcgtacagaggtgtataccgatcacaagagtttaaagtatatctttactcagccggatctgaacatgagacaacggagatggttggaattaattaaggattatgatatgggaattcattatcacccgggaaaggctaatgttgtagcagacgctcttagcaggaaaggctattgcaatgctacgaaaggacgacagttgccattggaattatgcaaggaatttgaaagatttaatttgggaattgccagtagaggtttcgttgcagccttagaagcaaagcccattctaattgatcaagttagagaagcccaaattaatgatcctgatattctagaaatcaaaaagaa

SEQ ID NO: 2928 - DNA, 631 bp, Oryza sativa
taaaatttcattaaatgctttgcttaattctataattcctagatttttctgggatttatttgagctaaggaagtatttttaataaatggaattgcatttaagaaataatttaaattgaaaaaggttttaaaagtctttttggctttgggccgaaagtcggcccaaaacctcccttctctctctcctcggcccaatccggcccagtccgccgccgcgcgcgcgcgcctttgctcgctgacaggtgggtcccacctgtcggacccatcgtctacctcgcgccgccgccgcccgaaaccctagcgcgtcgccgccgccgtttccttccaaatccggccgctcctttccgtttccggccgaattgatagaggggaatcaatctccgggatctcctctaccttttctcctttggaaacaccggctaaaatcgtttggaaattcgtggattcgagtttgtttcggattcgattttcccgaactttccttctcgtcgccggccgccgtgggcctttgccggcggctccgagcccctttaaaggacccccgagctcttctttacccgccgcaccctcgcctttgcctctcgtcgtcggaaacgccctagcgccgtgtgccctagcaccgccgtcgccgc

SEQ ID NO: 2929 - DNA, 4568 bp, Oryza sativa
tgggggaagagagagagagagtacggggggggggattcaaatcgaatcccgcccatttgcgggcacgcatgctggcgggaatggcggggagggcggcgacgtggggacgcggagtggaggcgtggcgtggagcggagaaggcggcggcgcggacggtttcggcggcggttgccgtcgtggagcgggcggctagaggaaggggacgacctgacaggtgggccccacctgtcagcgtcccggagagaggggaaaggggaacggaccggcccaaaggaaggaggccaagcgcgggagggagtgggccgacggcccaatagagaaaaaagaaggaaaagaaaaagaaaaggaagaaaagatttttcctgggatttaaaattgcactttggtgatttttaattggttaaaattatttccaaggctctgaaaattccactaaaaatcttcttaatgcactggagcatggggaactcaagaaaaaattccaccacgctaattccaattattaattgcatttattaactagggattttgctctaggttaattaagataatttcttcgggcaatttatttaaccaaaaaagggggggaaacttcagggtgtgacaggaaacaacttcagtatgagtctttggttcttgcccttcttgtgaaggatcatcaatgatagcttccatctcaggctagcaatataaagataagaaatcacaaatcacattacattcacataaatatgtaagtgcaaaagataaaagaaaaatataactcacaataacattctttacaggctcactaaaacccatcttgctgttgcaatggcactccttgaaaacataaattgtagtgggtggcagtgtggcacgtccttatacttagtttgcttctaaaattacatgcaaacagtttgtaaataaagatgccatcactttctgaaagttttttcatatgcatatttagagtgctaaatataacatgccattagtgtaacgttttcttatccataatatgtcatccaatgttttaacaacctatggctgctaggtgcttatatccaccatgttagaaccacagcaacagattatgtagttaaagtgcagttggctagataaaaatatttagggtgattgtacataagtattactaactcctagaaaatgcatgtctagtttctgtggatcacacatgacacatacaaactcaaaatctgaaaaaaaaatcaacttattatacacataacacataattaagttacaaataagagtacaaaagaaccgacacattttattttgtatcttaccacatggcattgtgcaatgtagctccgagagcatgtcctttgctagtactgagcattctcatggttgttatgtttgttttacagacacttctcctatagaaagggaaacactagtaagacaagtagcttatttctatcacatatagataagacaactgtacacaatattttgatagtacgttgtattggtcaatcacatatggtttgactggtcagaagtaaaaacatatttagattcagatcagaaaataatatacgcgtgttagttgtaccacgaaaattgccagtttttacaaatatgacatgcatgtgagcttcaggtacaaacaatatgctagcttcctcttgcttttaaatgtttttcattaccatatatatgatttattcacttgtttctcttggaatgtaaacaaatatagagaaaagacatactatgattttttttactagaatatgagacttgacaagttaacagcaggttctgaatttgaagtcaacaataggtaactagttgtcattaaaccatggtcatagtttttgtaccagcaaattaacccaagatacaaaacaagtagatgcggcatcatgattcatgtagccaacactgtgtaagatttttgaaataatgccatgatttccaataacattcaagtctataccttatgctttggatctgaccacatctctactattgcttgccattgctcacggtcatactcttcagcgatgatgttgttctcacttcgttttctggtgtaccatcaaagaaaatattcttcaacttgtacctcatttgtcattgtctagacttgagcaaatcagcacatgcatctttgaccgtctgattattttcatctttggcaaattggccctaatcaagagcatggataaaagaaaattagcattaaaatagaataacatacaacatgataaacctaatgacaggtgaataaaaaaataagtaaaaatctgcataaaatagcaagcaaaatgaacgacatagacaagaataaagttatacaacaagtagcatgtgttcaacttgggagcaaataaagcaatatgaaagaaaaacaaatagcttctaagacttagttgcggatgttcaacttctccatttaaaattcagattagaattgtatagatccaacatgggcatagaaatgaggatgcaaaattaatcagagcccacacaataatttgtagaaactaggacataattcatcttatacatttgcagatactcacataaagcaacccatgaacatactgcaatacagtgaacaattaaaatttaagagtgttgctctattaggaaagaattgatctacttacaaccactttatccatatagtttttaagttgagacttgccattcttatactccttccagtgagtaaagattggtatgtgctgcctaagtacaaccccccactctgatgcttgctttgcaaactacattggtgcttctggccttctcttcccttcaacaatgcgcaccatcttaagggtgtgtttggttgctcgtatctatcaagcctggctcatctccgtcatccaggttgagttcgtcctagttaaggcgatacatatgcagtcgtttggttgtttgcattagtctggcctggctactacgagatactgtttggttgtctgcacgggggatacggttcagatgagaatttgtttggttggttgtatgaaccgtatgtatgaggatattttttcttgggtgagattaccgcttataaatttccactatattagagttcaggtaacctgaatttatttttttcattatcaatcttcttttgttagtaaaacaactcatcaattgaactaatgtagtggagtacgtaactacacagtaaatcgtatattagtgactaattacgggattagagaacggggatagtagaaaaaggaaaaagaagaaaaaagaaaaagtgctctcgcatctcctcacactcctcgctgttggtattttttaacgacattacaagaaatataattcccagcaatggcgcaaatactcctggtatattatggttacagagttcatccgcaagcgcacggatataccattgtagcatttcacccgagagtattccaagggtatcgtatttattttatctcgtgggaagatcatgtagagagaacttgactaataatttatatattacttgtgataatcatattctaagcaggggttaagataatccaagggtagagtaacacacaagcactaactactcattcttatgatatattatctaagctaagtggaaagaaaagaggaagaaaatctattcctatacttctaatatacatagtatacatacattctagttaaccgacatactagctaataccctctatccgatgccctcctggtacttcgagaagccaccccagactgccgagttccgtacgacagcccgttatgaccatataatcggggctaaatacggaggaataccctccccaggaaattaacttaggattatatacagacgcggaggaatacccgtactgagctgtcaccatcagcggcccacctctcatccgcagcatataaccccaaataatgatatcccgtaatctagacaacacgtctaaacgaccagatcctactctaatatcatcgtcatgacatagagtaattgcataagcaaacattatacccacaccaaagcatctcccagataagctagccgtatatccagtataacaagaacataatgtaaagtagatattcatatacttggaaagtatttcaataccataaatgtatatagaagagtattctaacaaaagtacaaagcttacaaaagaggaaaggaaagctattagagccatacccgaactcttccgaaggcttccggactcctgatttctactctattcctattccaccagctagatactactaactaaacttgagagaaatgagcgagctcttgcttgaggtgtgtgagtgaagtgagaaggtgaagtccttatatagaggtagttatgacggttgtggaaggggaattgtctgaagtgctctccaaccgtcattgggatgcaatcttggatgtccacgccgaaccctgcatccaacggcgccaggatgggtaccaggttcggctgaagcatcagctgggccatccctgcccttcttcggctggcggcctcctctattgcttcactttgtagacttgtgaatttttgtcaattctgagttcttggcccattcatacatcagtctgaatctcgacatcgtctgat

SEQ ID NO: 2930 - DNA, 4004 bp, Oryza sativa
acagtttggactgaggaggtggaggaccaaactgcaggttctgctgctgctgctgtgcttgctgctgcacctgctgcaacacctgatggtactgttgctgcatctgttacatcatcattgtcatcatctgagtctgattgtccaacacctgggcggtggggacggactgttgtcagatgcactgttggcacgtgctccattgatcggctcttcgctgccactggcgttgttggagtcgcgtgaaccattccttgtctccatctgaaggggataggtagaaatatgagaaaaggaagaaaaacagggggctcagaaactaatctttcttataaatttaagtgtaattatcttaatcttgattaaaacactgaaaaagaggcacgtaactcctaattgaggcagtcataccactgacatatgatatcgaccgccgactaatccacaagcaacaaacctaaacacgaaaactggcaagcaaacagactaagaaggtcggggcggcgactctgaagctcggggcggcgcttgcaaacgagggataggactgacatctaaagtagacaagggataggaaccaattcatgctcaaatccaaattaaacaaagcaaaagaagactcaaataaataaccgagcatgatgatttttatgcatagaacaacatttttcacgaaccgagacaaaagacactaatgcaactgactaaacaataacttaatgcatgaaatagatgcatagtcatactgatacgcataaacttaccccaccgaacatagacacgacctaatgcatatcacccgacaattcccgaccgactgccgaataaattccgaataaacttttactaaatccctagactgtccctagtcgagaaatccaattaaataagcgaccaagatttttcccacaaatcaaaagaacaaaccccaaaattttcccgaaacaaaatccaagtgcaaaagggcatatgcatatgaaaaaaaagggttcagaggctcttaggtttctagttggcttgtcctacggtcaaggtcggctctgataccaacttgtcacactcagaaaattctcgaaccagaatttctaagctgaatgtgcattaaattcctgtctaggaccagccagggtacacaaacgacaattgttgacatacagacccacgtcttacaaaaatataaaagattacaaatgcagcgggaaagattaaagcgagctaaaccgggaagcttgacttcagcagcgggcgactccactccacaggcaaaccttgacggcagcaacgaagccaacctctctgagacggctccactgagaagaacttcaactctggtgtgggggaaaagagagcaagactgagtactacccactgtactcaacaagtcataccggaagaggaagtatgatgcaagatataaccaaaggaagctaggggttcttttgtataaagcaggcatttcaaagcagtagttgaaagcagtaaaacagctgtagtaattaatcaatattaaccaatcactgtccaacgttacaccaagttgcaacaggcccaaccaaccacctgaactacaccagttcattaagctaaactaggggtgagactaatcacggtgaatctggttgatcgcccataaccgcgggcacggctattcgaatagttttactctggccagaggtgtacaactgtacccacaagacacgattccacacatgtcgccatgccccgaagtatcaccatgatactgcaaagggggaaatcgtgacaagaccctccacataacactcccctaaccatccacaccacgctaaggtttcacccccacccctcaaaatgcagtgggcggtcccctcttgcgccgcggtgaatccggcagctggacaaccgaacacctcggccgacccaactccatcacgcccaccctcgccaccggtgcctaggaaagggtcgagctatactttagatcaagcagttacccactcccgcttgtggtaagcacagtaagtctcccagggtttcccgtgaaccggtccttaactgccatgggtgcgtccagcaaaaccatgcactcacagcccgccattcagaattttttaatttactgacacccttgcggtggcaccaatctaaagctatgccaatagtcagagtatatgaaataatgtgacccccatttgtgtactagttgaactaagcatggctaagcatttcctaagccaacatctagtcattttgatacccaagttatcaatggcataaggtaaccaatatgtggctaaggaacaggacccatcccacattacattgtaaaagaatacaacatttaatagaaaaatgcgggatattggtaaattgggtacaatatgatcaaacgtattgcatgacttgccttgctctcgaactgatgagacctcagtaacgtcttcgagaaaccgcggatcgacgaaacggccgaaacctacacgacaaacaaagcacacaggcaaaacatgctataagactactgaaacaggaaacaaaaccatttttaatggattctttgcatttttcttgatttactgagacttgaatggacttaaacggacctcggatgaattacttatgaattttagaagataaactgtgtttttactaataaagaaaaagtccttaataaattattgcgcaataatacccagggctgacgtcatccaaggggggaggggcggcgccgacaggcggggcccatgggtcagcggctcaaaggggagaggaagggggcgccggcatgtgggccccacgggcagtggctcaaggtggccggtctaccgtggaccgggaccacgcgggtggtccaccgccggtccacaggaccgacggtccggatcggctgggaggccgatcggacggcacggcggcggctaggcacggctcggcttggcttcaaaaccggccgaccggccatggcaaccggcggtgacgcgcacggtcgccggcgacggcaatcggcggcgcgggaaacgacggcggacggggtacaggacggcggcgtcgaccaaaggcaacggcgagcgcgtggagagaggcggcgcaaacgagagagaggggaagagggagaaggggggatcctcaccggcgagtatggcggccggagcggaggatgaaggtggcggcgacgacctggcgatgaggaggggcggacgggcggcggcggcacctacggagggagttgagaaggattaggagtagagagagtgaccacggcggccaccattgttggccgggagacgaaggagaatggatagctcaccggtgtgcgaggagaaccgggctccggtggggtttagcggaaaccgagcggcggccgaggtggctcacgcggcggcaatgctaatggcggcggcggcttggcgcggcggcggctctagcggcccggcgcgcgaccggaggtggcggcaagcggcggcgctatggcgagcggcgcggcggcggtaggtggcacgggagagcgcggcgaaaagaggaaaagggagagggagatgcggggaagctttataggggctcgagaggggtggacatggccgggaaaccccccgatttggccggcgacgtgggggaagagagagagagtgggggggattcaaatcgaatcccgcccatttgcgggcgcgcgtgcgggcgggaatggcggggagggcggcgacgtggggacgcggagtaggggcgcggcgcggagcggagaaggcggcggcgcggacggtttcggcggcggttgccgtcgtggagcgggcggctggaggaaggggacgacttgacaggtgggccccacttgtcagcgtcccggagagaggggaaaggggaacgggccggcccaaaggaaggaggccgagcgcgggagggagtgggccgacggtccaatagggaaaaatgaaggaaaagaaaaagaaaaagaagaaaggatttttcctgggatttaaaattgcactttggtgatttttagttggttaaaattatttccaaggctctgaaaa

SEQ ID NO: 2931 - DNA, 1215 bp, Oryza sativa
tcaaaggctctgaaaattccactaaaaatcttgttaatgcactggagcatggggaactcaagaaaaaattccaccacgctaattccgattattaattgcatttattaactagggatttagctctaggttaattaagataatttcttcgggcaatttatttaaccaatttttaaagcaagaaaagggggggggggaaacttcagggtgtgacaaacctaccccccttaaacggaatctcgacctcgagattcggaatggctggcgaagaggtgcgggtgggtggccttcaactcatcttctctttcccaagtggccacttcttctgagtgatgactccactgaaccttgcagaatctgattactttgtttctggtccttctctcgctggtttcgaggatacgagtcggcttctccacatacgtcagatcttcctgaatttcgatgtgatctggacttgcctgttcctcaggaactctcaaacatttcttcaacttagagacgtggaacacgttgtggatgccaagcatgttggagggaagctcaagctggtaagcagcttcacctctacgttccaagatcctgtatggtcccacaaagcgtggtgccaactttcctttggtttggaagtgatgtactcccctgagcggagtgacacggagatacacataatcccctgtttcgaaagcgagctcccttcggcggttgtctgcatagcttttctgccgagattgcgcgattctcaatctttccctgacagctctgactttctcttctgcctcatttaaaacttctgtaccaaacaactggcgttcccctgtctgatcccagaagagcggagtacgacaccttcgtctatacagtgcttcaaacggtgccatctgcagactagcttagtaactgttgttgtaagagaactcagcatacggcaagcttttgtcccatgctccaccaaagtcaagcgcacaggctctcaacatatcctctagtatttgattgactcgctcggtctggccatctgtttgtggatggtaagcagtgctgaaattcaaccgggttcccaattcttcttgtaatttctgccagaactttgaagtgaattggcttcctcaatcagacacgatcttcttaggtacatcatgtaaacacataattcttgccatatagagttctgctaatttcttccctgagtaggtagtgtgcaccggaatgaagtga

SEQ ID NO: 2932 - DNA, 2772 bp, Oryza sativa
tgaaatccattccgatttcttcccacttccattctggaatctgaagtggctgtagcaaacctgctggcctttggtgttctgcccttactcgttgacagacgtcacagagtgctacgaattcagctatctcccttctcatgttgacccaccagaacttttctttgaggtcttggtacatcttagtactaccgggatgaatggaatactgagtttgatgagcctcggttagtatcaagtcttttaattccttgttttcgggtacatacaatctttctcccatccagattgttccttattcatcctcaacaaaacctcgggcttttccaactctcatgttctttttgagctctgctatttcaggatcacttgcttgagctatgcgaacctgctccaccagtgtgggctgtgcctctagggcaaccacgaatccgtgctcaactataccaaggttcagatgttccaaatcgcgttgaacctcacaacatagttgctctacccatacaacattgcagtagctcttcctgctcaaggcatctgcaaccacattagccttgccgggatgataatgtattcccatatcataatccttgatcagctccaaccatcttcgctatctgagattcaaatcaggttgagtgaagatgtactttagacttttgtgatctgtatatacctcacaacggttaccgatcagatagtgccgccaaatctttaaagcatgaacaactgcggccaattccagatcatgcgtcgggtagttgccttcatgaggacgcaactgccgtgaagcataagaaaccactttgccatcctgcatcaacacacatcctagcccctggcgagatgcatcacaatagactggaaatctttcgtctgatcaggcaggattaagactggtgcagacaccaaccgtcgtttgagttcttcaaaactcctattgcattcagcagaccagataaacttttcttccttcttcaatagttgtgtcattggcttagcaattttagagaagttctcaatgaaccggcggtaatagccctcaagtcctaagaaactccaaacctgagtgactgtccttggtggggtccatttggtaactgactccacatttgctggatccacagctactccttgagcattcacgatgtgaccgagaaactgaacttccttaagccagaagtcgcacttgctgaacttggcatatagctggtgcttttttaacttttcaagtaccagccggagatgctgctcatgttcttcctcggacttggagtagataagtatgtcatcgatgaaaaccatgacaaacttgtctagaaattccataaacaccttgttcatcaaattcatgaagaaggcaggtgcattagtgagtccgaaagacataactgtgcattcgaacaacccgtaccgagtggtgaatgttgtctgtggaatatcctcttcgcggatcctcaactagtgatagcctgatcgcaggtctatcttagagaacacagtagctcctttcaactgatcaaacagatcatcaatccttggcaaaggatacttgttcttgatggtgacctcattgagtgcgcggtagtcaacgcacatcctcttggttttgtctttcttctccacaaagataaccggagcaccccaaggcgacgtgctcgggcggatgtatcccttctgtaactgttcatcgacttgcttcttgacttccgccaactcgttggctcccattctgtaaggcctcttgtggattggagcagttccaggtaccaagtcaatccggaactcgatatccctttttggtggcattgttgtcagatcgtccggaaaaacctctggatactctctgactatgggaatatcctccagcttcttagtggttttctccactgctacctcttgttcttcaccagcagcctggtttaaactaatccctggcttctgcggcactggagactggaaggttaccacctcttcttttgcattggtcaacttgatggtgcggctggcgcaatcaatcactcctctgtgccttgtcaaccaatccattccaagtatgacatctaggtccttggattcgagaagaatgaggttggctggaaaaatcaacccttgaatttcaactgtcacagatgggcagtagtgagttgtggtcatgccacctccaggagtatgaactcgcattggtatcttaagcttcactaaagataacccatgtgcaccagcaaaacgcttggaaatgaaggaatgggttgcaccagaatcaaacaatattactgccggtgtcgagttgacggggaatgtgcccaatataacctctgttgctgactgcgcctcctctgcagatgcatgattgacacgggcctgaacgaacttgggtccagcacgtcttggcttcgggcactttccaaccgtgtgtccgggtttgttacaattgaagcagagttcgggtttttctcccaacctcttgggctgttctggcagagctggctgaactgattgagctggaatctttagtgaactcggagtagggttgaggctgtgctgctcactgttgttgtgactgccactatggtggttcttgttgaagcttcccgggtggtagggacggtgctgccggataatcatggtggaaggtccaccgtgacgtcccatcgtgaaacgaggcttctgactcttcccctggggagtcctgaactgagctgccttcctcttacggtttattttgttacagtgctcctcctgacggatagccttatccaccagcttctcaaa

SEQ ID NO: 2933 - DNA, 941 bp, Oryza sativa
gggcgtagcgtgcgagcggttgaactcatgcaaatactctataactgttctggtccttgttgcagggaacggaactctctcttcttttgtgccacaattccctcgggaacctgtgctttattgaaactatgacaaaactctgtccaagtaacctctgccccagttggacgggtcaccatgtagttgtcccaccaaacagaagcaggaccttgcagctggtgtgtagcaaaagcaaccttctcttgctcgttgcattgcaaaagattcagcttcttctcaatggcatgaagctagtcgtgggcctcgatttggttggtggtgcttcagaaagtgggcggcttgacacaaagaaattctaacagtttggactgaggaggtggaggaccaaactgcaggttctgctgctgctgctgtgcttgctgctgcacctgctgcaacacctgatggtactgttgctgcatctgttacatcatcattgtcatcatctgagtctgattgtccaacacctgggcggtggggacggactgttgtcagatgcactgttggcacgtgctccattgatcggctcttcgctgccactggcgttgttggagtcgcgtgaaccattccttgtctccatctgaaggggataggtagaaatatgagaaaaggaagaaaaacagggggctcagaaactaatctttcttataaatttaagtgtaattatcttaatcttgattaaaacactgaaaaagaggcacgtaactcctaattgaggcagtcataccactgacatatgatatcgaccgccgactaatccacaagcaacaaacctaaacacgaaaactggcaagcaaacagactaagaaggtcggggcggcgactctgaagctcggggcggcgcttgcaaacgagggataggactgacatctaaagtagacaaggcataggaaccaattcat

SEQ ID NO: 2934 - DNA, 806 bp, Oryza sativa
aaagttacatctccagtgacacttttggcagcagccatctcacattatgaattggtaaggcaacatgaagaaataggcaaaccttactaggggggtgggaggggagagggccaaaagatggggtattcagaccaatcaaacaacggagaagggaatcggtctcctctgatgacttcttcaaactttcaatctcttgcaacttcagctcccttgcttcttctgaatcagctacctttttctttaaggaatccaactcctcctgctgaccatcaagcgtacctctaagatttgatgcgtcttacatctctacctcaagttcagcttcaagctcttgaacccgtgcaacgacaacacctttgccgcttctctttggtgcggttgactcaaggtcaacattctgaagaaactttgattttggcattacttgggaaatgtcacactcagaaaattctcgaaccagaatttctaagctgaatgtgcattaaatccctgtccagaaccagccagggtagacaaatgacaattgttgacatacagacccacgtcttacaaaaatataaaagattacaaatgcagcaggaaagattaaagcgagctaaaccgggaagcttgacttcagcagcgggcgagtccactccacaggcaaaccttgacggcagcaacgaaaccaatctctctgagacggctccactgagaagaacttcaactctggtgtgggggaaaagagagcaagactgagtactacccactgtactcagcaagtcataccggaagaggaagtatgatgcaagatataaccaaaggaa

SEQ ID NO: 2935 - DNA, 957 bp, Oryza sativa
tgttgtatgggtagagcaactatgttgtgaggttcaacgcgatttggaacatctgaaccttggtatagttgagcacggattcgtggttgccctagaggcacagcccacactggtggagcaggttcgcatagctcaagcaagtgatcctgaaatagcagagctcaaaaagaacatgagagttggaaaagcccgaggttttgttgaggatgaataaggaacaatctggatgggagaaagattgtatgtacccgaaaacaaggaattaaaagacttgatactaaccgaggctcatcaaactcagtattccattcatcccggtagtactaagatgtaccaagacctcaaagaaaagttctggtgggtcaacatgagaagggagatagctgaattcgtagcactctgtgacgtctgtcaacgagtaagggcagaacaccaaaggccagcaggtttgctacagccacttcagattccagaatggaagtgggaagaaatcggaatggatttcatcaccggtttgcccaggacgtcatcagggcatgattctatttgggtagtcgttgaccgactcaccaaagtggctcacttcattccggtgcacactacctactcagggaagaaattagcagaactctatatggcaagaattatgtgtttacatgatgtacctaagaagatcgtgtctgattgaggaagccaattcacttcaaagttctggcagaaattacaagaagaattgggaacccggttgaatttcagcactgcttaccatccacaaacagatggccagaccgagcgagtcaatcaaatactagaggatatgttgagagcctgtgcgcttgactttggtggagcatgggacaaaagcttgccgtatgctgagttctcttacaacaacagttactaagctagtctgcagatggcaccgtttgaagcactgtatagacgaaggtgtcgtac

SEQ ID NO: 2936 - DNA, 632 bp, Oryza sativa
tacggtttagttgtctgaccaaaatattttcaagtatatggacaatatataaaaatatagtattaaatatagactaataataaaataaattacaaattccgtctgtaaattgtgagacaaatttattaagtctaattattccatcattaacaaatgtttactgtagcatcatattgttaaatcatagcgtaatttagcttaaaagatttgtctcataattagttattttgggtgtgtttagttccaaagtttttttttctagacttccaactttccattccatcaaacctttcatacacacaacttttcagtcacatcgtctccaatttcaaccaaattttaaactttggatcaatctaaatacaacatttatctatatttaatgttccataaaatttttagaagtttgaaaggacaataacagaacaggagagctcctcggaatccgaccacctctctgcactagtactgcatgcgtcaccgcgccggccaccgttaagaacaggtacaattgcgtaagctataagcctggcttataaacatatttaagtagataataaggagagagaagagtagcgggctacagatttgtagccagctatagcatggactccaagatggggctgcaggaa

SEQ ID NO: 2937 - DNA, 1175 bp, Oryza sativa
aggaccagccagggtatacaaacgataattgttgacatacagatccacgtcttacaaaaatataaaagattacaaatgcagcggaaaagataaaacgagctaaacttggaagcttgacttctgcaacgggcgactccactccacaggcaacccttgacggcagcgacgaaaccaaccctaacaagacagctccaactaggaagatcttcagctctggtgtgggagaaaagagagcaagactgagtactacccactgtactcagcaagtcataccggaagaggaggtatgatgcaggatataaccaaaggaggctaagggttcatttgcataaagcaggcatttaaaatcagtagttgaaagcagtaaaaacaattgtagtaattaatcagtattaaccaatcactgtccaacactataccacgttgcaacaggcccaaccaacaatctgaactacaccagttcattaagctaaactaggggtgagactaatcacggtgaatctgattgatcgcccataaccgcgggcacggctattcgaatagttttactctggccagaggtgtacaactgtacccacaagacacgtcgccatgccccgaagtatcaccatgatactacaaagggggaaatcgtgaaaagacccttcgcataaccctccctaaccatccacactacgctaaggtttcacccccacccctcaaaaggcagtggtgaatccggagttgggcagtcccctcgtgcgccgcggtgaatccggcagctggacaaccggataccccgtccaacccaactccatcacgcccaccctcaccaccggtgcctaggaaagggtcgagctatacttcagatcaagcagttacccactcccgcttgtggtaagcacggtaagtctcccagggtttccagcaaaccggtccttaattgccatgggtgcgactagcaaaaccatgcacccacagcccaccattcagtgtattttaattaactaacaccattgcggtggcaccaatacaaagctatgctaatagtcaaagtctatgtaataatgtgattcccatttgtgtactacttgagctaagcatgactaagcatttcctaaaccaacatctagtcattttgacacccaaattatcaatggcataaggtaaacaatatatggctgagtaataggact

SEQ ID NO: 2938 - DNA, 660 bp, Oryza sativa
ttgatgaaacaggttattttgaatggactgtgtgaagagcaccatatggaaaaaccgaggacggttttcagtgaagaaggggagaatgatgtgaacatggctactatggatacaaccattgctcacatcatggatcaacaagaagacatcaagatcaagtcctccataagctggaattcgattcggccacctgctacattgctgacttcaaacggccgccaaattttcatacgagctccgttttgggtctatgagtacttgatggaaagctctccaagtcctcttttcaacggatccagtcttgttcccagattccatctcagtcgacggcaatcgcagaaacaaggtgctgcgtcacctgtaatgggcctataggcttgtaacttcgcctgggaccccggcccaagtggggcccatgtggggtgcgccccaacctggtggagaacgaccctacggcaccattggtcatcctcccacatccttaaatagctaggtaccccttcagggtttctcgggttttgatgatagagatagctacttgctaccggctcgcagcgcgcgtgttggctaaaccgcccgtctgcctgtaatcggaaccccaccatattgtgttttgatagtgaaactttcatctttatctagcaatttcagtgcttgttc

SEQ ID NO: 2939 - DNA, 615 bp, Oryza sativa
  unsure (1)..(615): unsure at all n locations
agcttgtcgagctcttatcgtatggcctgtttccaatctggtgcaaatccccgaagttttagcacatactggcttggctttggccgcaccatgattttgcgctcaatcacttccctggggacccccggcatgttggacggttgtcaaaaaaatacgtccgcattgtcgcgaagnaaggtgatgagcgcgagttcctatttctcgttcagtgatgcnccgatcttacttgtcttgtcggggttggcactgaagagtggaacaattttgattgcgccatctggtttcggcgtcttagttgttttgctcactttcttgggtggctcggctgtggccggtgggctgggcgtgtgctcgaccatgtcaaggttccgcttgtcgcattggaccgccagctttgtgttcccttgaatagtgattgttcccttcggcccgggcatcttgagtacctgatacgcgtagtgagatgcggccatgaacttcgcgagtgcggttcttccgatgatggcattgtatgctgtgtcaaactcagcaacatcaaatgttatctgctctgttcggaagttgctcgcttggctgaaagtcacaggaagcgtgatcttgcccaatggtttggac

SEQ ID NO: 2940 - DNA, 1206 bp, Oryza sativa
  unsure (1)..(1206): unsure at all n locations
gccgttgtcttcctcccgtgccctgcctcccgcaactccagctccagctcccgacgacgacggcgcttggtcctggcgagccgccgccgtcgcgctgtccctgcgtcttgtcgctccagctcccagcggtggcggcgcttgcaagtctccggcagcagctgctccgaccacgcccggtcctcggccagccacgcaaccgccacattcgagcccgccctcannnnnnnnnnnnnnnnnnnnnnnnntttgccaccggtggggagaccggaggcacacggtggcgaagacgggctgaggctgggggagactggaggccgccatcaccgtcgtgtcccgttgtcacgccctgaagtttcccccttttttcttgctttaaaaattggttaaataaatcgtccgaaaaaattgttttaattaacctagagctaaatccctaattaataaatgcattcaataattggaaagggcattatgggatttttttttcttgggttccacatgtcacaattgattaacaggatttttagtggaattttcatagccctataaataattttaaccaattaaaattcattaaccgcgatattttaaatcccaggaattcatttccctttttcctctttctccttttccttctttttctttcttgggccgtcggcccggtccatcttgcccggccacgctcaccctccttctttttgggccggcccgtgcccctcccttcctccctagggttgccgacaggtggggcccacctgtcggtcgtcctaacctccagccgcccgcgcctaggccagcaaccgccgccgcctgctccagccgcccacgtcgcccgcttcctccaccccactccgcgcctccccacgtcgccgcccacctcctacacctctcccgtacgcgtgcaagctcgcatagaggcgcgattcatttttgaatcccctctctctctcttcctccccactcccccacatcgccggcgaaatagggaggtttcccggccacgtccgccccctcccgcacctataaatcgctcccccgagccccctcaacctttttccgctctcgccacgctcgcccgtgcactccgccgctcttcccacgccacacccgagcttcgccgtcaccgcccatctccggccgcgcgccaccgccttttagagccgccgtagcgctcaccgagtccgcccgcaccttggccaccacttg

SEQ ID NO: 2941 - DNA, 1345 bp, Oryza sativa
aatgcaaggcaagggtgatagtgcaactcgataagggagaatggagttcacagcagtttgccatgagccctatcatccgttatgcccaagccctttgcttgcaagattcatagtagaccacaaacaaatgtcaactggagagaagtcatttttaagagttttgcaacaaaatagggtacctcctaagaaaattatgaagattttcaggaaactaagagtttgtttcggagacataccatttgaaaataaagatgagcacaacatagcacagacagaacatagaaaagcaaactcagatgttgaaagcgcattgaagcacttcacagaattgcagattcaaaacccagaatttctgtacgtaatgcaaaaagatgaggacaacacagttacaagcatcttctggactgatgcaagattgaggatcgagtatgatattttcggagatctcattatgtttgatgctgcctatagcactgatatgtataacatgccttttgtgcctattattggaataaatagccacgcgacacccttcctgttaggatgtgctttgttaaaagatgagaaagtagaaaccttcgaatggatgttgcgtacatttttgcaagtgatgggaggaaaaatgccaagagcggtcataacaaaccaggacacatcaatggagaaggcatttgcagaactcatgccgcatgtaaggcttaggttttgcaagcggcatgttatgagcaaagctcaggaaaagcttggagacttcatgacagcaagaggtaacataaatacagatctacataacttagtaggcaactcgctggtagaaacagaatttgaagaaggatgggttgagcttattgagagatacaatgcaagtgaaaaccaacacctgcaactcatgtggcaaacaagaaaaagttgggcacctgtctattttagagaagatctctacccatttattgactcagttggttccaacgagggaataaactcattatttaaaggtaatatgcttccaaaggacacaatagataagttcattgggcaatttaaggagatacaagagaatatagcaaaagttcatgaagaagatagatttcagtcaggagctgaccttaaatacatctcaatgcaaccaatagaacaacatgcagcacatatttacacaagggaaatatttctgaaagtacaggaagaactactacattctactgcattcaacgtgcaggagatacaaatagggacagtgtacagacttgaaaaggtcttcaactatgagaacccagagttcgatagaaattatttttgaagtgcttgctgaacctggcatcaatgcattcaagtgccaatgtgc

SEQ ID NO: 2942 - DNA, 642 bp, Oryza sativa
tgacagcattcacttttttttgagacagcattcactttgtggcactttaatttgactccaatttgacagcattcacttcatgccactttaaagcacaatagagcaaaatctgcattctgtgaactacaatcatgatttgatactttctaagcatccagcaatggcagatcatttcaattgtcaaaataaaataatatttagtctaacaacttggaatgaccacatagttgcaatttagacatcgattttttttatcatttgaattcaaagcattatatcaacatctagcttacgcatttttcaactctctttttcaagcaggccatgctagactgctagacagtagagatacaatggagtttatccatacctctttaccgacaaaaggtgaagtgttgatggaaaaagacattctgactgtcggttcctctattttgatggtgggcaagggtgttccagaaactttatctgctatggattccccaatctgcagagttcaaagaataacagattttataattatccccctcttaagataaatgtaaaccacgaaagcttgaataaattgtaaaaacaccaaccatgatatcattgattccacatactgcacaaatgtcaccagcactacattatcaactggaa

SEQ ID NO: 2943 - DNA, 679 bp, Oryza sativa
  unsure (1)..(679): unsure at all n locations
agagttgcaatcctctttcataatatactattttgatgacttcaacataccgctgtagaaataccctcccaaaactatattttctttcttaacatggaaaacatacaacacctaatgcataattttctggtgaactgtttttttcctctaaagtgctttgtatgtngaatgtaggtaagaggtatgcgacacnagttgcctttttgttttagaaagggncctaacttgcancttttacccagaggaaattgaggggaccggtatcgtcggaaagaaccctggcaatggcnnaagtcaactttgattcaagcaccctattccgcatcgtcgaacccatgtannttgggcaagtgttgatagaaatggccttgacnatttgcaccattnggactacatgnatctacggacaagattgagcatcattcctcaagatcctgtgatgtttgaggggaccctacgaaataacattgaccctttggaggagtacagcgatgagcaaatctgggaggtaattcttattttaaatttactagtacctccatccctaaataacatatggaagacaaattactatagaaaatacatgacattcataccccaaattaaatgagggatggattgaagagaaagggtagttagctttagaagcatacttattttggggacaaaacttgagtgt

SEQ ID NO: 2944 - DNA, 921 bp, Oryza sativa
ctttttttctcagctccaaacttcaacttcctcacttttcgttcgtacgtttttcaaaccgttaaacggtacttacgtttttacgtttttagtaaaaagtttttatgtagaagtacttataaaaattaaataattttttttaattttataatagttaatatttaattaattatgtagtaatgagttttctcattttacgtgtgttaaaattattcctcgaactcccaaaaatgaaaaaagaaaatattcctccaactggtgccaccgaatggagacttagtgttctggaaccagtcaaccagattggtgataacaagagctgacttctttgatttttactgatcatcgtttgagcgtcacagcatacgcacacatggcaatcagaattcagagaggaagcagtcagtctaatctccctaataatgtatatgcacaagaaaacaggtacaagtgcagattgaaacaggtacaagttcagattgacgtttttttttaaggggaaggacggcaggacatctgccggaatttaacaatagagaaggtatgtcctgtttgataaagtaagctacttcggtttctgaacaagaagagtttgggaagattcttctatttctttctaaccaaatattcaaccaggtagttaacaacgagcctctaatcgcatgcgcttgctctttggaacctgcaggggtcagattttggaattggcaaactaggctccaaacttgtctgacaaagacacattcactgaacagatgatgtatcttcaaaagcggtacagagacaacatatccaattgcatgattagtgtctccggagcaaattctgggcaataagggtttttttttataaagaattaacaatccaaagaatttcatttttggttcaaccagggccctccatagagatacaaaatcattc

SEQ ID NO: 2945 - DNA, 2097 bp, Oryza sativa
caaactttcaatttttttcatgacatcaaaactttcctacacacaaactttcaactttttcatcacatcgttctaatttcaatcaaactttcaattttgacgtgaactaaacacaccctaagacatgtgtcatcgactactaaatttatatggttgtttgagttagcaacttagcatacgggcaatatactaatacctcagacccacaaatacttgtactggtagaaatgaagttttttgaatggagggtaattaattaccgacggagaaaaaaagagaatggcttggctcgactatgatcacacttttcaaaccagaaaagtatatgaattcccgcaaaaaaaagaaaagtatatgaattcttgtccaagtatatgaatttgactatccaaaccagaaatttcatccaaatatagcttgccaatcaagtcaaacaaagaaaaatcgccctcttcaggcaaactgctgagttcaagtgcagactaatctcatacgatttgggggggccttagctccataaatacacttcgtctccttcggtccttcctcctcaacaccaaccagacagaacagaggacaccgctcacaagcaaatacagagtcgagagtgagacttgaggcagaggccatggccggaggaggagacgagctgaagctgctgggcatgtgggcgagcccgtacgttctgcgagtgaagttcgcgctcagtctcaagggcctcagctacgagtacgtcgaggaggatctcatgaacaagagcgacctcctcctcagctccaacccggtgaacaagaaggtgcccgtgctcatccacaacggcaagcccgtctgcgagtcgcagatcatcctccagtacctcgacgaggcgttccccgacgccggcgccaccctgctccccgccgacccccacgaacgcgccgtcgctcgcttctgggccgccttcaacgacgacacggtacgttggtaccatgtcacctcacatcgcgatcatccgcatcgtctccgactcttccgtttttgattcaatttgatttgttcgcagctggtggaggcgtcgccgcggcgtcgtgggggaagacggaggaggagagggcggagggggagaagaaggtggtggaggcgctggagaagatggaggtcgggctgagggagtgctccaaggggaagcccttcttcggcggcgacaccgtcgggtacctcgacgtcacgctcggcgccctggtcagctgggtgcacgccggcgaggccctgtacgggatgaggctcttcgatgccaccaggagcccgctccggacgcgtgggtggaccgcttcgccgcactggatgcggccatggcggtcttgccggacgccggcacattagccgagtacgccaagaagaggcaggcggagcgggcagccgccgcggctgcgaacaactgaactggcatgcaggggccgtggttcgcgacgtggttgggcctcgacgatgaatttggtgtcatggtgtgccacttgtagtcccgtcacatgtggcgatgtgggctttgtttgccacgtgaatttgttgtctgtctgcgttcttacggttggatattgttcgtgtggttttggttagcccgtttcttccaataaatggaattattaatttttagaggaacaagagtgaacattttttttttcaaagatgacgaaaattattacatcctgggcttttacataaggaaaagtgtagttggactaaatcctagttacccttaagtaataaaaacaactgaaagccaaaaaaatcacacaaattttaaggatttagcaaatatatgttagctacctgagccaattattaaacattttggtttattattaaaattggtagtgaatatgtctcttgcatattgcgaaacccatatttctctcgctaaaatttattgaaatggctagaaatcaagtaattttaaagtggccagacgagacagtcgtgcccgctacaggacatgggtgcctctgtgatggcacgacagagcctgagctggagccacggatatgatgtggcgagctaatgggcactcgccatgtgcccccactgtaaatggccttattgcaccatttcttatgtttc

SEQ ID NO: 2946 - DNA, 1295 bp, Oryza sativa
aatagtgttaattagagaaaagaaactagtacaagtggcgtctgggtgagaaaggtctttacaacttaataacatggcccaatgaaaataattacagatttggctgtgaaaaaaaaagagagaagactatactgtgcgggacaatgaaaaggtacaccaataatatattagcggtcataatctaataacaatgcctattcgtaaataaattttaccggcattaaaaagaaggtaccgagagataataaatttgatacgtgggatactgagaggcatcaaattttaccagaaaggctatttctctttggtacctttttaagagagtatcgaacattttaagataagtttatgcatatgtatgcatttaaaataaaattgtaacaattattggggaatgctatacagcacgagattgtgctatttcactagatataggcgtaaaaaaaatacatcccctagaggcaaaaaagagctgtacaaaattacataagcgttgtggttaagttgggaggaattctccaagtcaccttgtgcctgccattattcaggttcttgactcttcctttatttttgccataaggttgggggctaccgtttccttgtgctcgaagatcctttagttcctttctttctagatttcttaggctatgagtaggattaaggatcgcagccctttcttgggcactttctttttgttggctagcatttcccaccattcatgtacgctttggcatggctcccaattgctcaggtccaattactgataagccacccagccgaccatcagtctccagatccttctggtgtatctaaaggaagctaataggtggcatgtcgtctcgttcgtcgtacggcatagggggcacactccgctatttggccatcctcttgtagctagtcgatcggaagtccagactctattttgaattacaagccacgcatagaatttgcattttgcaggagcccaagatttccaaattaggggattaaagtttgtgccgactattcctagacactgagccttgtatgccgaagaggccgagcattctccatgattcgagagcttccagacgatgtggtctgactcattttggtttagtatgatgtcctgggttgcgctccatagggacacaagttggctgatcaggtccactgtaaaagtagtgttcctatttagctccaggtcatcgatccaggtgtcattttcaatgccttcatgtagtgatttacttcttttcaatatgctttcgtttaattttttagaccaggttagcggatcacatgtttcaatacat

SEQ ID NO: 2947 - DNA, 1881 bp, Oryza sativa
cagcggaaccaacgggctaacacccaacaccacagacgacggctgggaaccaggacgaaaccctaatcttcacttcagttcatcttcacttcaaggcagaggaactatatactcaatttcaacaatggtgcccgggcaccatggagcaccaaacaaatgtactatatatatatatatatatatatatagagcaagggtgagtaatttcgtactcagcaagtcacgggaatttaggtgtttaatgcaagcttggaagagaggcaaggttgttttgcaaatcctttgtttgaaatcatttttgaagtcactaagtgatttatttctttttgagtttggatcgaaaagagacttacgtctcgatttgacttaagagatgcttttcaacaactcaaatggtaatgtaccgacctcccgggtcagatcattacttatcggctcccagagccatttcacttgattaatcggctcccagagcctttttcattttctcggactcccagagtccagctgcccagcagcacaacaatccgcttccactcaggaagcctagtctatgatgcccgcagacatcccgaatcacacagattcgtttccgaccactcaggtcatccatttgccacataggctgattctggtaacgattcccacaccacaacaacttttcacaaagcacaggcaataaaatctacgcaacgggaaccacctcacatctgcccatgaccgtgggcacggctgttcgaatagttagttaacctctgcagaggggtacactttacccacaagacacgaacttagtccagacactggccggtatcagaggttcgcgacaaagcctttctcaagccgacccagggttacctcatgccacatagaaggatcaaatcctcacataaatacaggccattctaggcattcacaaatcaactccaaccaccttgatcggtaagtgagcaagcttctcgtccttgccttaccaggaacccggtttgtccgaccccgccccggcgttcccaactattggcatgcgaggtttccctgaaccgactagttacttagctagggtgtcccattccaccttgtggttgcactttgatcatgttcgatgagtttcccacaggaatcggtccttatatgcgaatacgggacagtgccacataggcacaacccccgtatcgcgagttttcacaattcattttattttcaaacacatcgacaccacatgtctagttttgaagacttcacaaacccatttcccaagttttcgacaaacaacggtgtatgtgggatatttggtatacgcgctcagagagcacgaataccgaggtaccacaagggtggagcgacaaggaatcagggtagtacgacctacggaaattagtgcgactactgggtaggtccgtcggtttggcacgcaaaccgaggccaagcaagttaagtgtgtgattctaataatgcaagttgtaaacaaaataataatgacttttcaattataggggcaattgatcaaagggtaacttgccttgctcaaggtcttcacgaagcttcacgaatcttcgagaaaacccgcgatcgacgaaaatccgataaccacaactatacgcaaataatcgaaaacctaaacaaaagaccaaaagaaagatcctatttagactaattagtagtgccattaaatagatctcaatttacggaattattggaagtggaacggagtcaatcggagttgcgaattgggtgatatgaattttgaaagtttaattggagtttctggaataggagagatgatttatggaatttatagaaataatattctcaagaatattattgacagtcattgaatccaggaccaaggaaaatgattcatggaattttggaataaggaat

SEQ ID NO: 2948 - DNA, 1355 bp, Oryza sativa
tgatccaagagggtggttgaacactattacatcgattggttggcgcgcaaaagggcggctacgtattcatagggattattgtctaataataatataatataaataacaaattagtgtaaactctatctaatgcatccattattcacattcacatttgttattttttaggccgggcccgcttacatctgatagcttataggtcatagactgccctcacagaccaacacatgcagccgggaagaatttcccggtcggtcacccatcccaaattgctcgggaagaatttcccggtcgatcacccatcccaaattgctctaggccaagcacgcttaaccctccaggccaagcacgcttaaccctggagtttttttggagatcggcttccggaaaagaagcttaaccctccaggccaagcacgcttaaccctggagtttttttggagatcggcttccggaaaagaagcttaaccctccaggccaagcacgcttaaccctagagtttttttggagatcggcttccggaaaagaagttgtaacttgttaatatgagtattctattaatcctattaagccctaggccgggatgttacaccctcacccccttaagagagatcgacgcccccgtcgatcaaccccgccctggagttctttggagatcggcttccggaaaagaagttgtaacttgttaatatgagtagaaaagaagttgtaacttgttaatatgagtattctgttaatcctattaagccctaggccgggatgttacaccctcaccccctgattcccggtcggtcacccatcccaaattgctctaggccaagcacgcttaaccctggagttctttggagatcggcttccggacaccctcaccctattaagccctaggccgagatgttacaccctcaccccctgattcccggtcggtcacccatcccaaattgctctaggccaagcacgcttaaccctgctctaggccaagcacgcttaaccctggagttctttggagatcggcttccggaaaagaagttgcaacctgttgatatgagtattctattaattctattaagccctaggccgggatgttataattttaaatgtattaatattgcatatttccaaagtgacgcagacccacctagtttgtaaagtaatattactaatttgaattgtattcttgctaatattgtagttatagaaatttgactatgggggtgttaagatccggggtgtaaagttttggcgtgtcacatcgggtattatatagggtgtcgcatatggtgtttgagcattaataaaaaactaattacagaatacgtcaataaaccgcgagacaaatttattaagtctaattaatcc

SEQ ID NO: 2949 - DNA, 1982 bp, Oryza sativa
  unsure (1)..(1982): unsure at all n locations
tagttggttcaagtctctaaatttttctaaaattgagatctacatgttaaaaatatccacatgtactgttcatgcttgtttatgtgctgttttggtgattttgctcttttcttcttagattccgtcgttaccggagagtccgtttttgcagaagaagaatttgaagagttccaaggccagcaaggcaagtcacacagatcccaaacaaccctttgagcatgttgatcctatttaaagctattgtttctattcaattattgcatttattttcgaatgtcattgggtggaattaacctattctttgttatagcccttttgttcttgattactttattccttgataccttggggtaatataacttgactagttgaactttatatatattggttcagctagatattagatatgattgcttagccatgcttagaaatattagcacactattgggataacttatgactcactattacttaacgatggcttaatgatagttcacgatgttctatcatgattggttaattaattaatgtgccaactaaaacctgataatggtgggttgtgagcacatggttttgatggtcgtgctcatgacaattaaggactggttcacgagtttcggttgtgaaacattaaccgtgccaaccacaagccagcatgggcaacggctttatcttttgtatagcatggttcattgcggggcaccagactgagaagtggcggagataagcccacgggggtcgctggggagtctatgccttgntataagggggtgattatctccaggaaaggtgcgctgcagtggattgtgttgtacgagaggtattgtcacaactcctttccgaggtaccggggtggtattgaggcacatggtgacatgatgtggggttgtgtcttgtgggtacagtggtacacctctgatcagagtaaaactattcgaatagccgtgcccgcggttatgggcgggtctaacaatatctttcgtgattagtctcacccttctcaccataataaaaggtgctttaattggtaataatttgattagctcctggtttggagatagaactgtgcagccgggatggttgttcagaatggttgggcctatacaacagggtatgttgtatagcgttggattaatattgtttaatacttaactgttttattaaattctgaaatgtttgctaaatgctgcttttgcaaatgaaaccctactatgccatcctttggtatccttgtgcacttgcatatttgctgcgtgacttgctgagtatgtcatatactcaccttgcaatcattcatcagaggaagagttctacagtgatgctgatggtgtggaggattaggtgtagccttggtcaagctgcctgtggagtggagccgtctgcgccgtttatctttttccgctgcttagatctttattgattgagaggaactatctacctctgtaatgacattttattcgcttattaattagagtaataattgtactctattatcaatttgttattgtgtgcctcggctgattcctggacgagggttcacacacatgtaagcgtttggaattttggatagaaattccgggcgtgacatgccgcccgctctcggagaccgcctctcgtcgccggacctccacggcgcctccccatcccatccgacgccacaaacgggatccctaagtcctagagatgctcccacccctttgaatcgaactcccgttgccccggtgagatttccccttctctccgccggcgatggccgccgccgcaatccaccaccgtcggctcctttcgctccgattcctctcgctgccacgctcccggggatccccttgacctccccctggctgccccaaggccgccggccttctcctttgtctccgcgtcgtgtcgccgtttccgccgccgcataacaacgccgcgcgtgcatcgccggtgaccatcgggtcccgcgtcaccgcgtgcgcatcacggtcgcgtaccgtttc

SEQ ID NO: 2950 - DNA, 2315 bp, Oryza sativa
accagcgataaaggagggtggggttggagagagatccaaacttgcgaatcctagctcagagcagatctcgccggcggcggagcttttcctatcaccggggccaggtgcgctttcctcttctctccgcctcccgcgaaacagttacgctaggtgttttggttgaggagagagggcgctcatatttgagttccgcctcggttggcacccaaagtaggtccttagtatgggtactctgttggaccctgtttttttccgctacagtagcctggagcacgcattttgggtttggttgtcgctatgcctaggctgttggagatagtctaacgactgcgtttatgcaaagcaagggcagtgaaagttgcaatctggatggattgtcagcatctcaaaacttacagggtgatggagaatagtattgcatagtagtggtgggcaagaaaaatggaaaactcaattcatgctttaaggggatatcccctcatttttacatgttacttaaaatgtcataaaaaattgaaaaaatttagtaggatagatcaatatgtgatatgtcactttacaaacatgcatattaaaattcaacttatacaagtagaaacaaaaataataaatttgactacgaatagaacgtgtaattcacagtcaaatttgttatttttgtttcgaattatataattcgaattttagctcgcatgtttgcgaaaagatatatcatatatttatctatattgataaaattttcaaatttttttataactttctgaatgctatgcataaaacgagtggatatcctcttgagggacaaaaatccacttccaagaaaaatcaatgaagtatattcaaaacaaattggtcactggctgaatagtttctacatcagttaaccctgcaggcagaggcaaatctctctctctctatatatatatacaccacctatcatagcttcgtacctccaaaagacaaggagcccaacaaaacaaaagccaaaagctccaatccttgggacgtactactgcttaggcctcagagcgttggatagccatggccggaggaggagatgacctgaagatgctcggcgtctacgtgagcccattcccactgcgagtgaagctcgcgctcagcttcaagggcctgagcttcgagtacgtcgaggaggacttcaagaacaagagcgatgtcctcctcagctccaacccggtacacaagaaggtccccgtgctcatccacaaaggcaagcccatctgcgagtcgcaggtcatcgtgcagtacatcgacgaggtgttccccgacgccggcgtcaccctcctccccgccgatccccacgatcgcgccgtcgctcgcttctgggctgcctacattgacgaaaaggttcgtcagatcaccatgcacttttattgattacttgatttctctcttatgtttgtgaattaagctgattgatcgatctgcgtgtgttctgtgcgttgcagctgttcagtgcgtggattctggtgttcagaagcaagacggaggaggagaaggcggaggcggtgaagcagacgtttgcggtggtggagaaactggagggagcactgagcgagtgctccaaggggaagcccttcttcggcggcgacaccgtcggctacgtcgacgtcgtgctcggaggcttcgtcgcgtgggtgcacgcgatcgaagaggtgttcggcctgaaccgtttcgacgccgccaagacgccgctcctggcggcgtggttggagcgcttcgacgagctcgacgccgtcaaggaggtcatgccggacattggcaggctggtcgagctcgccaagatgaggcaggcacaggcagcgggggcggccgcagccgccgcgggtgaggccagttgaagtttgctgaatcctggaggggagtttgaagtttgaaacacaaccatatagattgtcgtgtgcttccacattttcgcagttcctatggctgtacctcgtcttgtttctgcaactatgttcatcagttcgtattgccgcaccgtgtatcttcgccatgtaccgtcgcagttgccaagtgggaagtggctattctaccaagatgatgtatgatgtgctacgtctatattaattcatacgttgatttgtttcaataatatttgttcaaataaacttcttcatacaaatgtattttttcctactcccattttcatttctttttcgaaaggccgtcacccaagacattatcattcaagaggtttgctctggtctaacattgacacccctaggtactggtattggcaggtaaaaaacaaatccaaccgtttaatcacgaggggtacaatcgagaacgaa

SEQ ID NO: 2951 - DNA, 756 bp, Oryza sativa
attccgccggagctgggaaaggcagggaaactgatagtgttgttcatgtttggaaatagattatcaggcagcatacccgcagcattagggagtttgacaagcttggaggatcttgatttgtcagataatgatctgacaggaggtattccacctgagttgggtcatctcagccatttgacattcctgaagctgagccataactccatttcaggaccgattccgggaaatatgggaaacaatttcaagatgcagggagttgatcattcgtcagggaattcctctaacagcagatctggttcggatttctgtcaactgctctccctaaagatcctgtacctgtcaaacaacaagctcactggtaagctgcccgactgctggtggaacctgcaaaatctgcagttcatcgacttgtccaacaatgcattctcaggtgaaatccctacagtccagacgaactacaactgttctcttgaatcggttcatcttgccgacaacggcttcaccggtgtttttccatcatcgttagagatgtgtaaggcgctgatcaccctagatattgggaacaacagattctttggaggtattcctccttggattgggaaaggccttctgtcgttgaagtttcttagcctgaaatcaaacaacttcacaggtgaaatcccttcagagttgtcgaatctctctcaacttcaactgttagacataagcaacaacggtttgacaggattgattcccaaatcttttggcaacctaact

SEQ ID NO: 2952 - DNA, 1774 bp, Oryza sativa
atctgtgtgattcgggatgtctacgggcatcatagactaggcttcctgagtggaagcggattgttgtgctgctgggcagctggactctgggagtccgagaaaatgaaaaaggctctgggagccgattaatcaagtggaatggctctgggagccgagaagtaatgatctgacctgggaggtcggtacattaccaattgagctgttgaaaaacatctctcttaaagtcgaatcgagacgcaagtctcttttcggcccaaacttagaaagaaataaatcacttagtgatttcaaaatgatttcaaaacaaaagatttgcaaaaacaaccttgcctctcttccaagcttgcattaaacacctaaattcccgtgacttgctgagtaggaaagtactcacccttgctctatataaatatatatagttcctccgcccggaagttgaagatgaagtaaagtgaacattagggtttcgtcctggttcccagccgtcgcctgtggtgttgggtgttagtccgttggttccgctgctgccgctgttgttggtgtttcctcgttcgtgtcgtcggttgcaatttcgggctgttctgagctgcaacctaagttaaggtaaataagtcctctatttattttaaggattgcaatgattcatatttgtcaccgtgggtaccagcgctatgtcctaggactggtactgagatcgtggtttcgtaggaagcagttcgcgccgtttttcccacgacacgctcctgtcaggtgccgttgtacggcggtgccagattggggtgtgacagttgactacttaagaaattttatatatattaatgtgtagaaaatacaaatgaatttacatcataatataaaattatattgatgctagccgcacaattacatcataaatttatatagatgctagccacttgattgcgcaaaagcatattctggcacacaaacttcccgtgtactgtccgtgcacaccaactaacaattatcatggaaagttcttgaaaaaaattggatttgtgctcctaataatattacacatctttgcaacgtctgatattcaaatttattatattttaaccataaaaaagaaaaatctaatatttttaagaataaaaatctatcagaattttctcttttgttatggctaaaatataatttatttaaagataaggtttcacatataagtgtaatacaatttaaagtatgtgtccattttcttctagaattttttatgatatttgctagttggtgtgaatggaaagcttgtatgcataggatatggtccatgattgacctaacctactactttactttaataacaaataaattaacactctctatttcatattataaatcatttttattctttacttagtgaaacttctttaaatttaattaagtttataaacaaatatagtaacattttcaacaccacacaaacatactatcaaaatatataatcaatgttacattcgataaaactaatttggtgttataaagttactaaatttaatctgagtcaaacgtaagtttgatttagaaaaaaatatataatatgccgtcccaaattatagggcgccctcttttttaaagaaaaatcaaactcgataacttttggactcataatcatactaaacatatatatgctaagtattatgctttcatgtgttgctaagttcatattcgttaggaatatgatatggaataattttttcttgaactagggctttggaaagccccaaatatgtctctgaaaaccgtgtaaaataatata

SEQ ID NO: 2953 - DNA, 683 bp, Oryza sativa
cgcggcgggggcgaacctggaggcggcgttcaatgagtgctccaaggggaagcccttcttcgcggcgacgccgtcggtacgtggacgtcacgctcggcgccgtgatcgggtttgtgcgcgtcggtgaagccgtgcacgggatgaggctgttcatgcgagccggagcccgctccttgacgcgtggctggaccgcttcgccgcgctggacgctgccaaggcggtgttgccggacaccggtaggctggccgagtacgccaagatgaagcaggcagagtgggcagcagctgccaccaactgagccagcatggccacgtctggtactctcgtggggagatgaagttggtgttggtgtgccacccgtaccgtacgtagctagtcctgtcacacgatgtgacgactgtgtgaactttgctactatacgcaataaaattgtgaagtcgttaagttttcgtaagtacacaccggcgacgtgtaatggaattatatgtactggtcgtcatccttaattagtccttcactcctaccactacttaaaaaatgcatttttcaaatgaggggttttttttttcacaggcgaacattaaccattgaaaccaaatggccgcatacaaaaatataaaccgggctgaagcttattgtcttgcaggcggaccattccgcctgcaaataccctttattttcac

SEQ ID NO: 2954 - DNA, 4352 bp, Oryza sativa
atcggcctaaatgagcaccttttattaacaatatactttttacatacatacgtatgtaatagttagtggcacatctacattgcaaaagctataggaaaataatcaatgtcaatgtcaagttgcaatgtgaaggttttctgtcttatgtctcagcttatggcttttaacagggataaagttgctgcttgtgctaagcactttgttggtgatggtggaactcataatggaatcaatgagaacaacacgatcactgatgaacatgggcttctaggcattcacatgcccccatattatgactctattataaagggtgttgctactgttatggtttcctattcaagcttgaatggtgtcaaaatgcatgccaatcatgatctggttactggctacctgaaatccaaattgcattttagagttagtattaataataagcaacttatttaaaattcctcttatgtgataaaaaactgactcttcatgctctctgatcgcagggatttgtgatatcagattggctaggaatagacaggataacgtcaccacctgatgcaaattatacttactctgtgcaagctggaataaatgctggtattgatatggtatgtgaatttctttcaagaagattagttcatattttcatactagctacaataagcatggtttagtttaattttagtcaacattcatatcatgatactggaagtggaactggtcttactactttttttttgtggggggaagtcttaatacttattataccaatattaagctggaagtttatttcgttctttttattcagaaaaaaagaatacatcatttcatctccataacaggtcatggtgccattcaattacacccaatacattgatgatgtgacatctcttgttaagaagggtattatcaatatgagcagaattgatgatgctgtcaggcgtatccttcgagtcaaatttataatgggcctattcgagaaccctttagctgatcttagcttcgcagatcagcttggaaagaaggttgataactacaacatgctgtatactccacagagtaaatttcacaaaactacaaatactttggttaaattatcacaaaaccatagatttaaagtgatgtaacacagaactacatatttaacaataaatttatcacacaactataagtttaaggctaagtatcgcaaaactacagatttaataataaaattattatcacaaaactacaaattttggggtttaaatccttagcactaatgttatgttggacttataattgttttaaattttgtgattaaattatcattaaacctgtagttttgtgataactttgttactaaatctgtagttttgtgatattctaccttaaatttgtagttttgtgataaatttagtgttaaatctgtagttttgtgatgtatcaagttaaatctgtagttttctgataatttgatcaaagtatctgtagtttcgtgaaaattactctacacaattgacaagtttggaaatcatccaagtaaatgagtaactaatttaacaggagcacagagatttggctagagaagccgtcaggaaatcacttgttctattaaaaaacggcaactctcccaatcaacaattcctgcctctaccaaagaaagctagaagtatccttgtagctggaagccatgctagcaatttgggctaccaatgtggcgggtggtcaattgaatggatcggaggtagtggagatattactgtaggtatgtgttttttctatatatcatatattcttttcttttaaaacgaataaatctactatttcaggttcttatttgctaaattcaactatacttaagaaaagctattttgattttttttccttactgtaataattaaatgcatttattctgttcaggtacaacaattcttgaggccataaagtccactgtcgctgattcaacacatgttgtctactctgagaaccctgatgaaagcttcatgaaaaacaatgacttctcattcgctattgttgttgttggtgagcgaacatatgctgaaacaacaggtgatgacccagaactcaccatcctagaccctggtacagacacaatccgaacagtgtgttccacagctaagtgtgcagtggttatcatctctggtcggcctgttgtcattgaaccatatcttccaatgatggaagcgctcgtcgcagcttggcttcctggaacagaaggtcagggtgttgcggatgtactgtttggggactatggcttcaccgggaagctcccacgcacttggttcaagtctgttgaccagctgcccatgaatgttggtgacctacactatgatccactcttcccttttggttttggtttgacaataaattcatcgcagccagggtaagtaatttcatcaatcatccacactaatgcagctcaaaatctaatcctaaaaatctgaaaggcacactagttcgaatcaatgctttgtggtttgaccttcatattgtttcatgttttcaggttctctggtgctgacagactgagagataggaatggggggatgatatacgttgtgttgagtttggtactgtcagtaatactgatgcatgcttcgggcataggtatattttaactcgagttgccctttcctagtcgtagtatggttccacatcaagtgctccatgcctccatcgttatacgttgtatgtactagctctatggagattttttgattgcaaagatgcatttatccctaaagctaggtgggtcagtgggtgataagcagatttgttctttcacggttttaccaaattatgtgtggttataatagagcatttttatctagggaggacaaagtagatggattatgctctgcaaatactgatgggcctacagcacttctttactctccgtaccatgtgacactccacagaaagtaaaggaatattaaaatgtgggtaagaaattgatgggtttgaatcatactccctccgtttcctaatgtaagtcattctagcatttttcacatttatattgttattaatgaatctagacatatatatctatctagattcattaacatcaatatgaatgtagaaaaatgctagaatgacttacattgtgaatatatatctatctagaatagtttgttgcattatgatattcacattgcaaatgcccttaaacaccgtaataataagttaacaaccacaactaagacatggcctaggctcaccacccttggccatataggcgaaggggcaaaggaagggcccctctggctggccatgcagcacggccgtgcaccacaacgtcacaggcagccggccgcagcaatcctccatcctcacctccacctccagcgacacgcgctcgcgccgccgccgctggctctccatgcgctcgtacagctcgccgggtatccccaccccgtcgctggtcgccacgatcggcacggagccgaccgcctgccccggcacgcagaacccgcccgggaggtcggcgtgcgcgagctgcacgccagcgtacgacaccgccgcgctggcccggccggcgcagaacgcgcggcgcgtggcctcgttgtcgacgcggagggtgagttgaagacgggcgccgctgccgccgcgccggccctctcgagcccctcgatgccgggcaccttcacccagaagtcgggcttccggtagccgtacatgctgttccactgcccgtacgctatgagcgataagagagtcgcgatgaaggtcgctagtagaaagtatcgtagacatgggcgcctgtccaggcaattgccgtggtcgtcgtcatcttccgccatgtcggcgcccatgactctaaccgctaaaacgatgcggcgagaaattaacagtatcaggaccggacctggataggcacgtacacctgtacgttacttataaaagactggtcgtaactcgtaacggaaaaggtaagactggtcgtacccagacttcgggcctccggtagccgtactcccgcgcagcgtcgtcgtggccggcctcgtggatagcagcagggcagcacagttggccccagcaaacccagtgtccacaggaggcaagctcgcgaggagcgacgactaccacaggcgcttcttgttcgcgcggatcggcgccctcgacagcatggtacgtcgctgccgccgctgcttcgactggtcttgatcgccatgagcccatgagctgccatgcatgcatgctttaatactagctagttacgttcgacaagatctccaatggatcaaatataatagggtcgttgaatccaatcacaaaacggcaacactaccgaacgtgatcaccatgtcccacagagtcttataagtaacgtaccaaatccaggacaggtcctgact

SEQ ID NO: 2955 - DNA, 5784 bp, Oryza sativa
cagcgcggcggtgtcgtacgcaggcgtgcagctcggccacgtcgacctccccggcgggttctgcgtgccggggcaggtggtcagctccgtgccaatcgtggcgaccagcgacggactggggatacccagcgagctctacgagcgtatggagagccagcggcggcggcacgagcgggtgtcgttggaggtgcaggtgagattggatgattgctgcggtcaactacctgtgatgctgtggcgcacggctgtggtacatggccagccacaggggccattcctttgcaaggtctcccctatgttgaaggatggcgaacctcgtccaccaagattatattactaggttggtatagatgtaattgttactattatattgcagctgtatatatatgttccaaaagaaattgtcattaagtaccttgtctattatcagtctatatgctctaaaaaatttacgacacttttttttgcaattctcaaaaggactatctaaaaattattcgatagattttccctggaaaatcgctcatattttcaagccaccaaatagctattatacgtctcaggttaaaatgtatcaaattaaagtacatcacgggtgttaatcgcatgaaactatatatgacgcggaaaaataagtaactttcttcgttgtcaagtctgaccaagcggcaccctacgagctgggatcatgtataaatcctcgtagcatgtctccaacaatcggatcatcctttttatttgggtgaatatgcagtttagtatttcaacttttgcttagaggtcgaattagttcttgatgttttataatgtccaaatatgtccttaaaaattatgacacggaaaaataagtaattttcttcattgtcaagtctgaccaagcggcgccctacgagctgatcatgtataaatcctcgtagcatgtctccaacaatctgatcatcctttttatttgggtgaatatgcagtttagtccttcaacttttgcttagatgtcgaattagtccttgatgtttcataatgtccaaacatgtccttaaaaattatcacatgacttaacatagtccttggacccacttaaaacgccacgtgaaaatgccgcgtcattcatgcatgtaaagttaaacatttaaatgtcaattttaaccttacattttcttgaaaaaaaaagaaaataaaaacaaagggaaaaatacgaagatgcaatcataaaacaatgtggttaccaatgctatatctttttggcaatggtcaaaacccttttgttttctcaatagtttttctttatttcctgtgaaaacgtaagggtataatggacatttaaaaatttaatttgcatgcatagatgatgcggcatgtacacatgtcatttttagagggtccaaggactatagtaaatcacacaatgaattttagggatttgtttggacaatacgaaatgtcagggactaaatccttaatcgaaagttgaaggaccatgttggttattcaccctttttatttcgatggttaggattttaggccagaaattttctccatcaatttgatatgatggtgcattagtggactgtaactatagtgtagttatagtgtaactacaatgcaattacactatagttacattgtacctacagcatagctgcactgtaactacattgtaatatctatataagttagatataaagttgcatattatcattgttatggataccacatacctaatagtagttgactaagctcggcagggtccaccatgtactaagtcttatacggaatcatacctcgtatatagaaggagttccggataaggaagaacaaatagttctatatggaaatgacaaggactatccggattgtatcaatattggtctccctagtactacttggataatggggcatctatgggtataaatacaagaccccctagtgggagagagggcacgcaacagcaactgatcaacatagatcaatacaagccaacacacgccaagacaagccgccggatatcgacatcagagataagcctagacaaacctaatatggtgtctggggaggccaacaagagggatctagcgctatctctgatctggccgagtgtggattcgaggaggaagactaccctgtcgttgactacgagttggttatccatgccgcatgggttatcccaattattgtacttgtgtgattcagatgaataaatgagcaacactagcttcggccaacaggagtaggttaatacctgtcagattcacgaacttgtataaaaatccttgtctccatctcttttacttcaatctcgcacataccctggtaccaacgatctgcatactatgcaaaataccgtagtcgtgatatcaaacgtcgacacatatattattctaatacttatatacatgttatattatagttacaatggaattataatacaattatactatagttatatttaattttttttcctaaaaaacttgcagcagtttttagatagtccctttggaaatacataagaagttatataatgaacctttttaaaaaattcacatgctaacttaggatgagagtcggactcctaattacttcagaattctcgccaagccataagaaagcaacatacaagatgctggcatcatcccaataaaggttccgaattagataccaatactattaaattaaaaatttcatatactttttaggaaaaaaattctaacaataatacgattaaaataactttcatccgttgtgtcggtgacatgggaccgggagtatcatggctagaggcttgaggcagacacaatcgcccacgtggcctggcaccctcgggggggtcgggcccgagggtgatacggccgcccttctctttgtctccccgaggggtcggaccgctcccgtctcggccccgagggccgaggcgccccgaccccttgtgggttttgcgccgcgtatatggggtaggtgagcatagcggggctcacctaaccacatttattgcggtttggacgagcgcgtcacgccgcatgtaacgcagtgcagcgcgctcgtttatccggtcagtgaccagtcacagaccggtcagatcgtgggttaggtggcgacaggcggtctgacgcacgccttgccccatcccgtcaggacgagagcctccaagcactcgtccctagccggagccggcgtgttagctcctggagatggcacgttggttccggtcagatatatgccaggcttcatcctaaccattacaggcaagatattgtatgaagaagggcgaacatgcagattgttaaactgacacgtggtggacaagaatgaccgatttgtgaccggtctaacaatggtcatgtcgtcagcagacagccatgttcccacgtcgcgcctgcttccggcggaagtggaggtaggtatgggccgtcccatcagaaggtcattcggacggcagccatacaaatctccgtccattaatgaagagaagtcaagttggagggaagagaggatgagtccccacacaaaagaaagagagggagagatggtgcatgtggtatccccttgagatataaaaggaggaccttgcccacttagagaggaaaaaagaagaaaaagaacgatcctagaacaatcgggggctggctcgcactttgtagcttcttcatacacagatccaccaaaacacaggagtagggtattacgcttctcagcggcccgaacctgtatacatcgccggcgtcttgtgtgcttcctgtctcgcgaaccttccacagattgggagcttagagtctcacccagggtccccggccgaaccggcaaaggggggccagcgcggtctcccggtgaggagccccacgctccgtcacgttgcaatacacgacctgaataaaattatgaacgatattaacaactttccgtgaagtttattattaaaccatctgcacatataaatgatactccctccgtcccataatatagcaacctagtatcggatgtgacactttacagtacaatgaatctggtaggaaacatgtctaaattcgttgcactataaagtgtcatatccggtagtaggttgctatattatagaacgaagggagtatcatgtatcaataatttgtaacgaaattagtactccctctgtcccaaaacataagcaattctagcatagtgtcaagtcaaacatttttaactttgactattataatagaaaaaataaaaaacatcaatcatgtaaaatagatgttactagatttgtcattaaacaaactaacataatatacagctctttttatttaaaatattttatttttatatatattgttggttatagtaacattttgaaaactgtgtcaaaatctaaaaatactcgtagtatttttgaacggtgggagtaatgtttttctcggttgcaaacaactttcctagtaacctacgactcccaggttccaacaccacccatccaaaagaccgaaacctccccgcgtcccagtcacacgcgctttataaagcagggttagcacgcgccccttccggtttctttccccctctccgcatcctccacccgcgcttctccctaaatctccctaaaccctagaggagatcccctccccccgcgcggcgatcgccgcgatccggttctacccccgttcgccgggccgccgccgtggtagatgaccatggtgaccccgcgcgcacccgaggtaaagcctggcatctccccgcgactcgcacaccattgccctgctccgcgtttggtcagagtgctttgcggttcggtaggcgtagatggttgtgcgcttcgagatggtttctattagggtttgggtgtttttttttactgagatgcggtggagatttacaaaggtttgggttttggttgcatgtcctgttgtttgcagctcctgcagcaggaccaggatgaggagatgctggtgccagaccaggatgttgttgttgagggacctcagccgatggaaggtgagatttctctgtgtttttatatttttcctctgaatttaatctgatctgtttgtcaagctttgttattaattgggttatatttttttagggtgttaactcaggccattttttcatagtatgtttcatgggatgcgactagtctctagaaccactgcccaaaacattaattatgaatcgtgcattcacgctgtacttgcaaacttctggtatttagttttttcggtactcgcaaacaataggttttgtaagaattactgaactctactgggaggtcgccagggtcagtaggagtcctcgggcttgttctcccaaaaaataagtctagttaactattgaagaatgtgcggtttgtaagttaactattgaagaatgtgcggtttgtttccagatggttttagctctttgattataaggtgataaacatgtcctgtagtcctgtactattggttgatgctaaggaaaaaaaacaatgcagaattccagatgctggctaagaaacctggaacttgaaaagagtaatattccaatctactgaacatgctctgtttgttttttttctttcctggttgtgtgttggttgttttttgtggtggtactggtatacctgtcgttatcaggtcattgaaaaatgggcatatgctaattttcaccggtgcatgtgacactagagtcatgcaattgtttatcatgttacttttgttgtttaacatatttatttcatcttgcagactctggatcaacagttgagaacgagcaggtaccagaaacctctacgtccagatttacgtggaccattgaagatttttcgaatcacagaaagctgta

SEQ ID NO: 2956 - DNA, 4469 bp, Oryza sativa
ggctacgagggcatcgacctgggcaggccggccgccacggtgtcgccggagttcagggtgacgctcgggacggcgaacggcgcgtgcgtggaccgcgcggccgtgaccgtgctgtactcgggcgtggcgctgggttgggcgcgcgcggagccgcgcgactgcgcggcggggcgcttggagagggacgtggaggtggtggcgcggggccagggagtggggctgtcggatcgcctccgcgcgcgcatggcgtcggaatggcggcgctcgtcgatcgggcgcgctggagctcgacgtcgacgtgaagatcttcgacgaggacacctacccggtgcacgctacctaccacatccctgacagggtgatgctgtgtaaggtgaggacggatgggcgagggtcggagtcgccgtcttgcccttggttttcgccgataactttagctttcgcatagaaattagtaggcacactgcaaactgattaattaatattagtagattgtatatttgtactactgttgtttgtgtacaaagtccatatattaagattggtagattgtgcatttgtactattttttttaacaaagtccgcatatgttttttttccataaaagaaagttacaaagcgagacgcttatatatgtgtgcacatttaccactatgaacaccttcaatcaccacatacatctggttcttgacaggtactgtatgtctttaatcactaaaaagataatttaaccataaatatgagtaacccatgtcagattttaaacctgaatttttaccattatctaaaaaagattttaaacttgaacttggattctcaagtggacatatttttaaaaatacacagtatgaatgcagacgttcataatgtggatatattcatcctatgaatgcacgcaagcacatttacccgtacagacgcacaccttacctatgtgagtatctcttaccatatatatcgaccatacattcatgcttattttacgtagtttaaatatgttgttggtaaaattccacaaaattgcgttgatgtatcggaatttcttctatcttttttttccctcgtacaactggaatactcggttgagtttttcttctttttgcgagatacttgctaatttgcaccatacaatcaccaaattatttcgatttatttatacacgtttgatgagtttggagaaagcgagcatcagaccgttgggcctcacctttttcttatgctggctcatcagccaaaattgaaattttcactattagggcccgtttagttcccaaaaagtttttccaaaaacatcacatcgaatctttagacacatacatggagtattaaatataaataaaaagaaaatctaattgcacagttataggggaaataacgagacgaatcttttgagcctaattagtctgtgattatccataagtgatacagtaacccacatgtgctaatgacggcttaattaggctcaaaagattcgtctcgcggtttcccgacgagttctgaaattagttttttcattcgtgtccgaaaacccctttcgacatccggtcaaacgtccgatgtgacacacaaaaattttcttttcccaactaaatacacccttaattttggagttgattttggggttttttcatcgaaatttatttttcagtatttgtttttaaattgttaagaacatgtatacaagttatatttataaattattttttgtttgcaaatatatcatttcatttattccctaaaagatgcgtgagatgtttgtgattgcgtgtgttcggcatgcacgccacgccacaccggtcacatgaaactagacaccagcccacatgagtgcatgacccaaatagtgttacagtgagaccgaaggacaacgccggattactactctcactagctgatgacgtgaaagttgaaactactcccttcgtccaaaaaaacacgatttcatcacacctcgaattcgaggtgaacctcgctacacacctcaccgcgccacggcgtgagctttcaacctcagctatatagaagtagtactccagtaattgacattgtgttgcttcctccgcaatcgcttcaaacagttgttgccacagacctactccctacgtctcataaaaaactaacttagtgttgtccagattcgttgtactattatgtatcacacgatcatctccaattctagattcttttttttttggacggaggaagtacggcggttgaaaccgatctttatcatttctctcctttcaaatcacccacgtggtcagtgtatgtgatgcggtgtcaaatcctattagagcaagtttaacagtatagccaactactagctccaactcatctatagccaatctaatagctcatttatacaatagttatatactacagtattaatacatgggcccatcatcatacacacattgcttcttggagtccgtgttacagctggctataaatctgtagcccgctgctcttctctctccttatttatctccttaaaatatgtctgcagctggcttatagcctgctattgtacctgctcttagagcaagtttaatagaatagcccactgctagctccaaatcatctatagccaatgtaatagtcaattcatacaataggtgcttaccatactattaatatatggtcctacctatcatacgcacgttacgtcttagagtccgtactgcagctggctacgatctgtagcccgctgctattgtacctactctaatgaaccacctccttttacgtgtttggagggagagttcactctccctaccgaggacagccttaaaacaaaagcaaaccaaacaaatttacctcacattaatccctggaatttctatttctactttaaatccagccatcacatcgatccgcactaagagcaagtttaatagtgtagctaactgttggctccaaatcatctatagctaatctaatagcccatttatacaatagttagctataaaaatatactataccattaatactcggttccacctctcatacacatataacgtcttggagtccgtgttacagccggctacaaatctgtaacccgctttcttctccctcttctctttttttctcaatatgtggttatagctggcttactgttgtactatacctttgctttgtgaattgtgaggtgcggccgcgccgatggaaacgtgtgtgtccgtctcgagcccctcgaggcctcgatgtcggggtaccttcacggcttcacccagaactcaggactttggttagtaaaacgccatggcacaagaaactctggacgccttggtaagttggtcccgactctgattggtacacacgttaacttgtagcacgtcttgaggtatatggttgcggtaatcatatatcgcaaggggaaggatttccatacatggatggaatcaaattgttgttcgatcgatcggaagttcggaactaatcacggaatcgaatataaaaccggctaaatagaccctaattttcttggactctactataaaatctccagtcgaacgtaaacctggtagcattgttgaacgtgctaattgcatgctaatcatggctcatggggaagacctcgacctccaagctgcggaggccgcggcgccataccatgctctccagggcgatctgcgcgaacacgacgaggcgtctggccgtcgttgctcccaagcttgcctcctgtggacacttggtttgctggggctaaccatgttcctttccacgttcgccttcttctccaccacgacgcggccggcggcgacgcccacgctgggcgggaggtactaccacgaccacgacgccttctccgtcagcatcgccggctacgagggcatcgacccgggcagcgcgggcgccgctgtctcgccggcgttcagggtgacgctcgggacggcgaacggcgcgtgcgtcgaccgcgcggccgtgaccgtgctgtactcgggcgtggctctcgggtgggcgcacgcggagccgcgcgactgcgcggcggggcggcgggagagggacgtggaggtggtggcgcggggccagggcgtggggctgtcggagcgcctccgcggccgcatggcctcggagtggcgttcgtcgggcgcgctggtgctcgacatcgacgtgaaggcgttcgacgaagtcacctcgccagcctacgctgccagacacgttcctgacagattaattatttgtaaagttacgttggatgagcaaggatccgactcgtcggcttgcccgtggtttgagttattgtaattggtttattttgttaccgtggtattgccgtattggcgatttggcggcatgggataatttcaaacgatcagtttgtatcggagtcgatgattgatttgatcagttccaaccgaattatggccttgattacgtttgtgcatagaagttcttgtcccttgcgaactactaccatgataaccatgaacaaacaaattaacgtgctcgatctactttttgcaata

SEQ ID NO: 2957 - DNA, 1213 bp, Oryza sativa
ccgatgtagtagttccagccgatagtgataatagctgatgccgatgccagcagatagcgatagggtttaagcaatcggttatatgtccaatgtagataatgatataaaggcaatcggctgatgatgatgtaataaaataacaatataatccagtataaaccaatcggctagtaataatatgataaataagcatcgatccgaaggttaaagtacacatcggctggaggtctgatgtcatgaaatccacaatattagattaaacagtaaaacctttgttgcgataagctaaatccaatatgtatgcaatccttataagccgatgcaacatccagataactcatcggctgaaaccccgatgaaacccttattggcaatcaaaaagtaggctagagattatggttctaaacacgacttagtagatcaaacttaactgatgcagcactaagtatgaaaagaaacataatatctagacaatcaagccgttgactgagttttcagggtggtagatgtctaagctaatctaatctagcaacacgatttagccgataccggcagaaaccctaaagcgagaagcagccgatagaggtaaattgatatgctaagactagattaacagagacatatgataaataggtagacaaatatatcatccaaaccggaacaatccaagaggtcgaatgtattgatgcagccttgaacgacgctgatgtaaatgatacaatttcctgggccggcggaacattggacttaccccttagccggagatcgaacaccgatgcagccccgcgtcaggtgccaagtcccgccggacgataaaataaagtagaaaaggtaaaaggtggcgatgcgctgaattgtattgattgtagcgatagattacatagaccccgggtgtacatatttatacccatgggttgatacaagttcttgtcggacaaaaaagaaactttcctaaagataaaaggaaaaaataaagtccttataggacactaaacacacttttctaaagataaaaggaaactaacaaactattcctaattaatagataacttgccatgccacattctctttgaactcggtctcttctggataagcttcctttagtagatcaattttcttaaccgaatatagcaagaatccgacaactgacgacttgacaactctcatcggctaatctctggacttcgaagccaatgctgtctctaagccgatg

SEQ ID NO: 2958 - DNA, 1214 bp, Oryza sativa
tctactcatggtaccactagtatgattttaggtagatgcttcgcttgttaattaggcaacattaggtggttttacaactctagactttggaaatactcttatcacctggacactatggaatagttggattattgtggaattggattcacacctccccctctattcaaaaccctcaaaatggttttaggctgggctcggggtgcatggttttgacagtagcacctcggccatataaggaccggtcttcgggcctctgttgcaaagcactaccgtacttccacacgtctagtgggtaaggcttagtttttggctcagtcaggttataaacaaaagtacacggatggagatggacgaagtcgggagtcgatggacatctctagggcaaatgaaggctacacgagctgcggcccggtagtcgagatgtcatggcacagggccggtgtcctgctgctaggggctcagtcctgcctacctgtcccgggggttccggccataggtggggttgggtcggtactcttgtttatggctaggatgggttggaaactatgtcatgtcttccgtccgtataccgtggtggtatgtggcacgtggttacacatgaggaagatgtgtcttgtgggtaaagatgtacacctctgatcagagtataatctattcgaatagccgcgccctcggttatgggcaagtcgagcaatgtacccaagttagtgtttttaattcttaaaacctgcttaataactaaaatgtggaatggttggcctgggttggcttgggacgagttgggacccagggtctggttgccagttcggtctgaatcatcgtaggccttgggttaaggcaggttcgtgtgggttcacggccttgtttaataatattgtatagctctaggaccgtgtttacaaaatagctttgagcaactaagtgtcttttagtgctgtttactgcaaaccctaaccctttatattataacccccttgtactcccttgcatttattctgcacatatgggtgtgtcttgttgagtacggtggttgtactcagtcttgctcaatttttcccaaacccagaagaggacttcctggaagatgaaggcatctagctcgtgcctgccgtcatgcgcctgtggtcgtcgccctagtcttccgctgtttcccgtttgtctttgtgtgtgctgggccttcgccgcccatgtaataaagtaactatttacgcttc

SEQ ID NO: 2959 - DNA, 2064 bp, Oryza sativa
gctgagttctcatacaacaacagttatcaggccagcattcagatgtcgccgaatgaggcaatgttcggaagaaagtgccgcactcccttgtgctggaataaggttggcgaagcactggtgttcggtcctgacatactcaaggcagcagaagaacaagttaagctgatccgacaatgtttaaagacaactcagaaccgtcagaagaattacgctgacaatcggaggcgtgaccttgagtttgaaaaaggagatcttgtgtacttgcgggtatcacctctccgtggaatgaggaggtttgggatgtccggcaagttagcaccccgctacatcggcccctacctcataaccgccagacgtggtgtcacgccccgaactagccccgagcggaactagcccgtgatgctccaaattaacctgttaatcgatatcagtcccaggaaacagtgctggtatcacaggaagacagaatatcacagcaacagaggtctctttattatagagtaggggtacaatcatgttgggctgcggacagatcccgagctcacaactgcattacaaaagggaagcgaaagccaagacttggaccaaacatcataggcgcgacttgggaactaggccgaaaccctaaaactcatcgtagccgacttgctcctggaagaactcctcgtcagcgggatccgcttcatcttcttcagcaactgggagggggattatttatatagagcaatggtgagtacgggagtactcagcaagccatgggaaataagtgtttaatgcaggcttcaaggaaaggctgttgtttttgcaattgattttatttaaactcttttctgaaacaactaagtgagtgcttctcaaacgacacggatgagacagtgcatctcgtccggtcggagtatgtgcaaggtatcagtcttttgaattggtcaaggttggcacccggccaacggcttttaaacggccacctgggcctggctgatcccatcagccgcaggttttccaaacatcgaacccaaaccacatcaacaaatttcacaaaacagtagtcaaacaaaactacgctaggaatcacctcacatccgcccatgactgtgggcacggctgttcgaacagtttaataacctctgcagagggggtacactttacccacacgacattactaacccggatcatccagcccgtgcagaatggccacgactagagaccttaaggctttcatgacaaggcatttcgaaagccgacacaggttcaccatatgccaacgagaggggtcccagaccaacaccagattaggtcccagaccatactgtgccaggaaacccgggggttctccccgacaccaccccgttgaatccacatgtctcttggcatcatggctccccccgtttagctagttactcagccaggggtgtcccattccacccatgtggttgcacttgtcttatgttcggatgaaattccaaggaaacggtccttaagtgcaagagcgggaaaccgtacacccggtacattccccggtccgcgattttggaaattcatttagttcgtaagcaccgacccacgtgtcgggttttccatgtcttttgtaaaacccaagttttacccaaggtgtttctcagtttttaagtttgaaggcgaccgttgatactcgtgcagagtgcacgattaccgaggctcaactaggtggttacaagggaacatgatataacgattaacaaaggaaggatcagatgcaataagctaggtaggcccatcggtctgccttgcagacggggcaatcctatcaatgcataatattttgcaagcaatataattaagttcaaatataggctcaatatgttgaaaggtggcttgccttgctcgagatcttgagcttgatcctcgaaatccacgcactgcgggtcttcgggctccgaaactacacgtgaaacgggacaactcaacaaacggcgaaaataaagccctattattaacctctaagcgtaccattagatagatctcgagatttgaggaattttggaagttgaacggagtcaaacggtcatacggttgagaagatattga

SEQ ID NO: 2960 - DNA, 614 bp, Oryza sativa
aggcacaaccccttcatcgcgagttttcacgagtctattttgttttcaaacacaccaacgccacatgttgggttttcaaggcttctcaaacccatttcccaaattatcgacaaacaacggtgtatgtggaatagttggtatacacactcagagaacacggataccgaagtaccacaaaggtggaacgacaaggaatcagggtagaacaacctacaggaattagtgcgactactgggtaggtccgtcggtttggcacgcaaaccgaggccaagcaagttaagtgtgtgattctactaatgcaagttgcaaacaaaataataatgattttccaattataggagcaattggtcaaagggtgacttgccttgctcaaggtcttcacgaagcttcacgaatcttcgagaaaacccgcgatcgacgaaaatccggtaaccgcaactatacgcaaacaattgaaaacctaaacaaaagaccaaaataaagatcctatttagactaattagtagttccattgaatagatctcaattttatggaaatactggaagttgaacggagtcaatcagagctacggattgagagatatgaattttggaagtttaattggaatttctgg

SEQ ID NO: 2961 - DNA, 1827 bp, Oryza sativa
agtataagaaacgcaagtctacccatcagggaaattcttcccgaggggaacctcgccctcgctttggacaacccatgcaatatcaccagtcagtcactcaggctaaccgccagccaagctatgcccctcgtcctcagatgaatcgtctggcacctcagccgcagcagcgtgccccaagtggcaataccgcgccaaacagtgttacctctttcaagtcaccgccaggactatcagcagttcagtgtttccggtgcaaccagatgggtcactatgccagacagtgccctcagaatcttaccaactccaactcagggcataccaatggcagcaccgccagaactcctactcctgcagcagctcagtcccgtcctagcacgcaggcaagtggacaaggttcccgtgcttccaacaactttggtcgagaccgagtgaaccacattcaagccgagaccgctcaggacgctccagacgttgttatgggtatgttctctgtcaactccgcacccgcaatagttctgtttgattcaggagcatcccattctttcatatcgcaagcttttgtgaaaagaaatggttggaaaacccaaaatttgcgagtaccaatgatagtacattcccctggaagggatataagggcaactaaaatatgctcggaagttaaccttagaattgaggaagttgacttcctagccaaaccgatagtcctagactcgcaaagcttggacatcattcttgggatggattggttggctaagcacaaaggacagatagattgtgccgaaaggtccatcaccttgcaaggacctggaggaaagcaagttcgctttacccccaacactcttactgcaagtcggtctatcctaaccagtttgcaagccacttctttggaatcggtacccatagtctgtgaatatcccgacgtatttccaaaagaattaacggaaatgccaccaaaccgagagattgagttcgccatagaactggcactaggcaccgcaccaattgcaaaaagtccctaccgaatggcagctaatgaattagcagaagtcaaaaagcagatcgaagaattggagagtaaaggttatgtgcgacctagctcatccccttggggagccccagtgcttctggttaagaaaaaggatggctctgagagaatggtaattgactatagagccctgaatgaagtaactaaaaagaacaagtacccgttgccacggattgacgatctgttcgatcaactttaaggagcaaaagttttctctaaaattgacctaagatcagtttaccaccagttgaaaatcagatatgaagatatcccgaagaccgctttctcaacgcgctatgggctgtatgagttcacagtgatgtccttcggactcaccaatgctccagcattcttcatgaacctgatgaacaaaatcttcatggagtacctggaccagtttgttgtggtattcatcgatgacatcctgatatactccaagaatgaggaagaacatgttgaacacctgaggctgataatggagaagctaagagatcatcaattgttcgctaagttctcaaaatgcgaattctggctggaccgagtagcattccttggtcacgtgatctcctctaacggtgtcgaagtagatcccagcaaggttgaagctgtccttgcttggtatcctcccaagaatgagtcagagatccgcagtttccttggcctagctggttactatcgaagattcatcgaagggttctctaagctagccagacctatgaccgagctgttaaagaaggaaaagaagtttgaatggtcagcagcctgtgaagacagctttcaag

SEQ ID NO: 2962 - DNA, 20115 bp, Oryza sativa
atagagggcggcaagggttttcctgcaaaaaaccctccctccgtcaccgcccgtccctcccccgtttgctacgtcagcttgccgcccaagtggtgggcggcagggtctatttttgtaatttttttggccgatagattatttctgtaaatatttaaaaaaaaatctaaaaataaaaaatttcgtgagggcatgagggacagaaatagtagtgggccgaaggttgtggacatcgggcccaactggttggagctttcccctttccagtttgtataggccgtgctcgaagctatacgaatttttaggccatcacatgcatcttcgcatccaaagatttcttctagccgagtatttctacgaggatcgagcgtagcccggttggcacgttcgcagtggagcgaacggccggtcgcgggacctcacctcgacgggattttcccatctttcttcgggagtctcgggtacacacacgcgtgcgtgttcagtgggactgtacgtttcccgtgcactgagatctgaaggtctccaatcttattcctagcgtgtgttgtggtgtgagtgtgcgtcctgagttgtaactttcttaaaaaaaccaaatatttctaccttcaaagatatatatttataacactgtcattttgttgaatcattttattcttatgcgattgtaatatatatatacatatacatacacatatatacatatacatacacatatatatatacacatatacatacatatacatacatatatacatatatacatatacatacatatatacatatatacatatacatatatatatatatatatatatatacatatatatatatacatatatatatacatatatatatatatatatatatatatatatatatatatatatacatatatatatatatatatatatacatatatatatatatacatattgaaccactataatttcacttacaaactccacagctataccaaacaccaaataggatgttgatttgtatgagatcttcgtgtcttcctccaagcctacaacatgtacaagaacctgcaaggtctttgggttgtttggctgaggaaacatcgtacactgtttggctccattcttttctagctaattcaccagattatcattgtggatatttgttccactctttaaaaatatattttctcaaaatgctttactctactgtatttcatccttataacatttcgttcttaaactatttgttaatggtatttttaaaaaataattggtttattttatataatcaagtactccatttatttcaggttataagacgttttgactttggtcatagtcaaactattttaagtttaactaagtttacatacaaatatagtactaatactaaattagttccatcaaatcaataattgaatatattttcataataaacttatcttggattaaaaatgttactacttttttctacaaactttgtcaaacttaaagcagtttgactttgactatagtcaaaatgtcttataacctgaagcggagggagtaggcatgatccatggtaataataatccggttaacaatctgtcgagaaacacacaggggtcttccggctagctccataagatgatgggctagacaacctgggttcgaagcctcaccccttctaattatttgatattaagtcgttccctaatattcgcgtccggttaacaatctgtcagcaatgcaacctgcggacctcagaatctagagaattctaattatttgatattaggtcattccctaatattcgcgtccaatctgtcaacaatgcaacccgcggacctcggaatttggagaaaatgtgtggcacttgataggtctgttcgaatgatgacgcgcgcacaggggggcggagctagtatagctagggtgcccaaaaacccggttcaaaaaaaaattacctatagtttatctatttttatcatatatataccccatcaatttaaacttaggcacccgtatcaagctaaatttaattcaaaccagagtagcaagtgagtggaatccccttcattttattatagctccgccactacgtgcatgcccgtacagtctttacagatgttgcttcaggtgaggagcaaatggaacaatacggttttggtttatcttgatcagatagggttgatgtaccttttttctcccctacttctgtcacaaacattacaaaaatagtcgtttgcgagattaaacataatcttaatctgtaccacttcactgtaacgaagaaatatttacagagcaaaatgaccgggcagaaatggaatcagaaaccatgatcgtaaattcataatcgaataggcactagcagtcagtttggctgtttgggctacagatgaggttcgccttgttggccgacgggatggccgtgacgaccctgcggaagaagtcggcgtcgcaggggatgatgaggacgccctcctgcccgtaccccatctcgtcggcggcgagctccagcagcgcctccatgcacgggtcgttcagtagccccaccggcacaagaaacctcgtcgccgcctcgccgccgccgccgccgctcttcccgaccagcaccggcacgtacccggccttcatctcagctactaccccagatgaatgccccgccgccgctctcgtgatgctgccaggcaaggtgtgcttcggtaatgagaattgagaggaggcgctagccatttaaccagccgcccgagccgcgtgaactcgctgcggctgacgacccggtagtgagtctcactggctcacccagctgtaatacgatttctctcgttgaattgctcccgcgacaaggaaaagggagggaagggatcgagggggagagctttagcttgaagatttgcaacgagcacgtacgacgcctacgcgcaccgtgaccaactgaccgaagtgagggtgagaaatttaatcacgttcctaccatggactttgacacttcctgtgactgtgagtgagctcgatcctgacgtgtgattagtcgcgacatggagtcagtcgccgcggcgtgggacccggggggcagagcggctggtctttgacttccggtgagcgtgtttaacgtggagagtattttcgggggatcgaacagtgcttaggttgagattattatctgcgagtgaaaatgattgggcagtggtattgccgactgtcgagctgagctgagttgacgaaagggcaaaacaagcgaactgcgtccacattgtcattgcgtacctgagcctacgacctggtaaaacaacattttatattgagtttggtgcatgactagttctccgaaatcttaaactgataataaacggtgggcattgttctctggcaaaggcggacatggtattctttgtcagttagggtgaatggattcatgctcttgcctctcgagatcccttgaaagctcacattggttctttcacttgaaaaaaagcgctcaatttggtgaaactcaaataatctcttaaggagatatcttctcattttgcatgttacataaaaagtcatcaaaattttttaaagaatttagtatgatagatcaatatgtgatatgtcacttcacaaacatgcaaattcatattcaacttatacaagtagaaacaaaataaacaaatttgactatgaatagaacgcgtaattcacggtcaaatttattatttttgtttcgaattgtataagtcgaattttaactcacatgtttaaaaaagatatgtcatatattgatctatcttgacaaaaaaaatttaaattttttataactttttaaatgacatgcacaaaacgactgatatattgtgtgctagttcatgactctgccataataaaaggaacatcaaatttacataaaaaaaatcaagaagatgatcagaatccattcgccacacgtgcagctgccccgttcccaacacctcgcgcattagaagaagaagtattttttacacctaggtgcacctaggtgtatgcatacaatttaaatagttatataaatatttcataaaatttgataagatagtacatgataatacaagacactatgtaaacatgcaagtctaaatttgatcgatatatgaagaaacaaaaataataaattttatctgcactgtatgggtactattcactgtctgattttattatttttgtttctctagttgtagatcaaatttagtcctgcatgtttgtgtatagacttgtatcatcccaaacgatgttactaaatttttttaattttttctataactatttgagtcgcatgcaaataatagttgccacggtaattaggtgtagaaaatccttgttcgcttggaactgaattctacctgcatgccacatgctcagcaaagcaaagcccactccactccacaatccacattccttccttccttccccgtgcgagccccgagagccttctgctccccgcttcggatctcgccaccagcctccgccgcgcgcggtagcccggcccgaggccgagatcgatgacgcagactcccacccccgctgcggccgcgccggcgccggcggtggcggtgtcggaggcagggctgcccgacgccatcgcggtcgcgctgccggcggacccgtacgagcagctggaggtggcgcgcaagatcacggcggtggccgtggcggcccgggcgtcgcgcctcgagctggaggccgcgcggctccgccagaagctggccgacaaggaccgcctcgccgcggagctcgccgacagggccgcgtcgctcgagcaggcgctccgtgactccgacgcccgcctccgcgccgccctcgacgacaatgtacgttgagctcggctcggctcgatcgtgtgcagagtttggggtgtaatttcttctgttgctcgatcatcgatctcttctctgagctctgcttaattcttcttgcgtggttttttgtgaaggctaagcttgccaaggagagagactcgctcgcgcacacgtccaagaaactggccagggatctcgccaaggtgagagctgagctgagagcctgagatgatcacacagttgctgagctgcagctgcacatttgcacaaatttcctttacactgagataacgaatttcttctttttatggttatcttgattcagttggaaaccttcaagaggcatctaatgcagtcattgggtgatgataatcccccggtgaggccctttagttctctcttcattccttaaccaaattttctgtcccatgaacttattatatattatgggtagtgtaaataaataatccatttttggtctcgatgaactcatgaacagattcaggagacagtggacataagaacctgcgagcaatcggtagcgaaagcaagttcttggaaaggtattttctcttgaaaaatgttgtttcatattattgctctagagctgcactgctattgcacacacatacacactgttcatctgttcatacgaatgcacctctgcaacatttctgaagatggagtggcacatagtcgtcatcatcatcctgtctcctctcttgctgatggatccaccgaaattgaaagcgtaaaccaggaaggtatgatcagaaaaaaaaaatatagcatgtacctccaagttcgagagcaatgtaatgtgagcagctgattcttcttgctcgtgttccttctccaaacaaaacagtggcgagaccgttcgagcagaagctctccgtcacccacatctctccgcggctcacgtctgatcccgcggcgaagacgagaactgctgccacttccccgagaagatactccaccgccgtgtcgcctaagctggcagccagcgccacttcgcctcggttagaaggccacatggcgatgcagccatggctgccctccagcaagatgtcctctgctgccaactcgccgcctcgcgcccactcgatctcaggtccctcttgttccaacttccaagttcatcagcatccatcactaatccagtgacagcgatatcaattgccttacactgaatccgtatgcaataaaccattgaaaattggtttcgaactctgtttcagggcgcacgacgagagtagatggcaaggagttctttcgtcaggcaaggtaaagctagtccaacattctcaaatcgactgtatcaattaaacatgtttcttcatttcatcctgagttcctgacctgcacagtgcacgcacagcatgaattatgcatatttctttttggtgtttctccccaggaatcgtctctcctatgaacaattcgcagcttttcttgccaatatcaaggagctaaacgctcacaggcaatccagagaggttggcatttgcgacaccaagcctcagttttcaactgagtcccaaccggcccgttaatccgttcagatttcagaacatgagttctttaatctctgacaccgtttcttattgctgtgttgcaggagacactccagaaagctgacgagatcttcggttcagagaacaaggatctcttcatgtcgttccagagcttgcttagccgtagcctgtcgtaggttcgtctcgtagcgctgttgatctggacgctgcacgctgttttacagttggatcatgaacgtcagataacggatggtacagcagtgttcgcctgtacagagactaataacagtttgatcatgccaagaaatgctacagatagattattgctttttattggttttgttttactatttgattgaactcacgtcgcgtcgcatgctaaatgttaaaaaatcgaacaaaaaaacaaacaccgcgatagacttgaataccagccatttagtcgttaaattagagattagagagtagagggagcttgagcgggtcaagccacacaaggcgtcacgatcaaatgagcgctctacgcctctactagaccatccaagtcgaaatctcactaaaaatgagattatcattaactgcgccacaacaaatcaacagtcatcaagacttgctaaaacaaaatcaacaagcaaaacggcatacggatattgagcattctcagataaagttcccaaaattggatagaccatagatttgatactgaaattgctcctatctaccacggcttagctagaaatagagatttgataatttgacactttataaaatggggtttgattatttgacattttggtatattttcatcaactcggatggttgtactcacaggtagtatcaattaaagcaaaatgacaacgaaaaaaataaaatcaaaccatcaaatttctcggctgaaaatggaccgcaagggttaggaattttaattacacatgtttaaaaaaaagatttaaaaaaagctgaggaaaatgacaaaatcacccccctccatctctttctctccttcccacacgcaccttcatcttcgctctcgctttcccgtgtaagccggaggaacgggcggccggccttctctccccgcgagtccgcgaccccgcacgcgcggccggcgagcaagcccagaggcgcgtcgccgagcccgacctagcatcctcggttggcgcggcctactcgagcggcgcagggccagcgagagctcaggttcggaggggggctatgcgggaggcatctttccaccgccgacctccacctgggcggatatagatctaagggtagttgcttctcctcgtagatataggaggtggaaataagcgaatacagcttcttcaggatttcgttgatgcgtgaacctgccccccgtgcgacacgttaggtcgtcgtcccctgccgcgctgacgacttgggatgaatgtttgatcgtattgcacacatatgttggtgttcttgattccttgtatacatttttttcttgtgtggctaaaacttttgcagcaagccggagcgtctcccgttgtcggagatgttcctcatgtttattttttttttcgttttgttttgttgaatgctttatcgaacatgcaatcacatatgagtagttgattgtcaaatgcatacccacaccgcctggtgccacacggtgtgtttacagttcgtttcttggattaaagttcatgcatatgcaagtacagttgcttttcatgggttgttctgcattggatctatgctccattatgacccatgttgctttgtctgaattatatagcaacgatagccaaacatatgatcagctccaaacttttcagattcagagtcatctcgcgatgaaggatatcttaggctgtgttcagttcctgaaaaaagttgaaagtttgaggaaagttagtagtttggaaaaaaaatttaaagtttatgtgtgtaggaaagttttggatgtgatgtgatgtaatggaaagttgggaatttgggggtgaactaaacacggccttatctgcttgtctcaaattatgtctctagtacctaccaaactataggactacttcattccccttctgcaatgtgctgttgcgtgtttacaaccttcaacattgtagtttgcattcaatatctgctacatggtactacctgctttttttcaactattgagcattaaatatgaaagtggtcgagaatttatttagcttcaaagtactaattaaaacatctagtaacttgtttaataatctgccaaattatatttttgggctttcattgtttcctaatatacatttaatggtcagttggatgttatatttacccatctcttggttgcttttctttttttgatctctctcttggttgcttttctgagcatgtgggtagctggatgtctctaaattattcttagttttctgtagtactggccatttattgttcttgactctctaatttccatggctgaatctacaatgtcctacttgactcatcccttttcatcaggtcaggagtcaaggtatatcagatgatggatctgtccacgacttcagtagtggctgctaaggcctacaagtacagagcagaatcacttgttaaggactaccttcttgcagattgttatgtttcatacactgctgtgcttggtgggatcctgatgtgcaaaatggtattatttgtccctcttatctgttgatgtttactataagtctacatgtgaattgtcactttgatagttatatttagctgaatggaaaaatcggtgtaggtttgatatattttttctatgttataagcgaggactgtggagcaggtagggcccctttatatgagatgactattattataagcaggtttttctgggatcgaattaatatagccatattctcagtgtaacttggctacttgccacatcaatcttgagatatggacctatagataaaagtaattgagataagctgtgtaagtgcagatatatgtgcaattgttttcagattatttatgacttttgacttgcctgtatgcttgcagatttaaataaattttcaaattaaaattatgaaacaagtctaactgtttctttgaattataactttgtagcgtttaatcttattaggatcttttagagattattcaactcaatctacagtaaattgatctcaataatgcctcatagaaccaatcatcttatggttagtctaacacaaactaacctcagtgtgagctcctcacagaaaatacagtttccatcataagatttatatctgtgctgtaatatgatggatcaggtttagcatcctatatggaaacaaaacagcagagggagggtggggggtgggttagcatatctttacgcttaatgccctattagctgcttgaattattcagtacctagagttgtgttaattcgacctgacatatttccgcttttcctttaaaaaaaacaacattggtcaatagtgaccacagcatgttagtagtaagtatgctgcaatgctatgtaatattcataaatgatcataaactgtgccgttttgtttatttacgtattatgtaaacattaagtagttgcatgggacttgctatgactaatatctatgtaccacctcttttgaaaaatttcttcttggtcttgactacaatttatcacttgtatctcaggtctatgacatcacacacttaatcagttcattgtactacaagggttatggttctcttacgaaaatccaaaagcttgagtggaacaacaggtgaagcagtgtgtttgtagaatttatgtcctatttcacgctatatttgtcttttaacttccaccttctaactgttttaggggcatgtccactgtccatgcaatgtttatcacattaatgtcagtttacctagtattcttctccaacctattctctgatgagctggatggcccagtaacagttcggagttcaaacctctccaattttacactgggggtaacatatgtcactgtttatccgcattgaataataggttatgctgatatatacattttctccttttgccacatgttagctgaattaaatctgtttaggtttctctggggtacttcatcgctgaccttgctatgttatcctgggcttatccttcccttggcggaatggagtatgtaagtgagcatagttgatcattaccatttattttatttcaccatttgtttactttctaggttactgctattcagtgtttattcaattactgtgtgctctgctgttcatattattcatcacttgggttgaccattgtcaggttcttcaccacttgctgtcaattatttctttagtctatgctatttattctgaagaaggacagttgtacacatacatggttctcatctctgaaacaaccacacctggaatcaacctccgatggtatgcttcatgaaaaagatcatgcaccttttctttatacttattttacttcaatctatctgacctgttatgtaccttcttcatcaaaggtttcttgatactgttggaatgaaaagatcgaaagcctatcttgtcaatggtgttacaatgtttgttgcatggctggtaagtgaaagttgctacactgtaattggaggttagaagttaaaaatcatgcattgactgcaggtgatcggatagttatgtactattattagatgtactacatgcatgcacgaattataattgaatctgtatatagcgagattcaaccttgttatttgttgtgtgtacgtaagtatgagagggagggagatttggaatcgtgcttaatcaataatagttgcctaatcagttagacgctgtctctggtgctgtttaggaagttcttatatatctcaaatgtggaccaccatttgcttactacaggtggcaaggataattttgttcatctacttgttttaccacatatactttcacattgatcaggtgctatatccttctgatttgatatatgggtacatgtctacatgacaaaaatcactgaaattaaactgttcttgtttattgacaggttaagcagatgcgcacctttagctgcattctgatattcgctgtgcccacaatactattagtgatgaacacagtgtggtttgtcaaaatcttgagaggtctcaagaagacgctagccaagaggcagtgaagagtggtgaattgctcataggcgcatctacaaccatcctttcgtacagtcacatacaactacatatattttctacgttaagctttatagtgcaactcatagcgcaagcaaaagatcccttgtacacatgttggaaaaatctcctcaacattgccgaaaatttttgtccctgtacggttctacattgtacatatatatatatgcacgtctagttatggctgaggatgcttttatctgtgcactaatgattcatagtttcaattttcaacaactggagatactgccatagtggccatctcatagacatatagagaactccatgattctagatacaacttgaatgtgcaattcgtattgctctcactatgaacgtttttgtagctcgattctaactccagatttgtagttcattcccgtcatttcaagggagctggtaacactcatcatttccgttcttcaaatatcgtatttctgtctagtccagcgtcgccttaattggccttctaagtggtagatgccgtcgtcattgttgtagtagatggtgcggtcgatgccatcgtatctgtcctagatggtacattgttgtcgtagatggtgcggtcgatgccatcgtatctgtcctagatggtatggtcgatgccattgtatctgtagcgtgctgattattcccttttacagttacagaaacctctaaagcaggaacaatagtggagtagtatatatttatacataactattatctgaactagatattttattttaagttgattatatgtgatttagagctagtagcttgctgtaccattaaactactctaaatacgagaagcacagaagaagagtcgttgccacactttgggtaattacgaaggaaagatcgtgagttgcgactgtcacgagcacgcggttcgaacgcgcgcgggtgctgacttggcgttgacctgtgaaattctctcgcttcactcgagtctcttggcccttgctcgaggcagactcatcgagcagcccaaagccccaaacgactgcgcgcgagcgatagaatggcgctgcgcctcgctgccgtaccagagagcgccgccgccgacctgagcgccgccgccaataccctgccgtgcatctcctaccgcgactcgatccggagcgtcgccgccgtcgtctccggcggccgagggcctctcttccagtccgaagattccgcctccacctggtcgtcttcctcctacgcgtccgactgctccggccactcctccggcgtctccgccgccgcggccgctggcttcagggcactcacggcgcacgagctcagggaggtcgcgcgtcgcatggtcgccgacggctacgcccagcgcatggtccaagcgttcgacgacgcggcgacggtcgaggtcctcgagggggaggtggttcttcgagctcgacgtcgactgggtcctccgaatccgcgaggggcaggggttacggcagctggagaagtcggccgcctcctccccgtcgtcgtcgccgctgcaagatctggtggagagtgacagattatgtcttgtttttactatatatttttaacatctatttttgagataatagttggctgccttaggatgtaaggcactagtaattttttgagataatagttggctgccttaggatgtaaggcactagtagttttccttaggatataagccactcctaatttttaggatgtaagccactaatctataccttatggtgtaagccactggcctatatatatatatccaaccagccatagttgattgagtggagaatagaaattaaactagcctcaaaacctgtgttccttttgctaacaattggtatcagagcaaggtttatctgacttccatcgactccccatccaaaaatgtctctccactccattcgttccccctctctctcgtcccatgcctcaagcacttccagcggacgaggcagcaggcggtcggcggccgacgctgagggcgacggcgatgcgactgctgttgcgcaggaggcgcgagcggctgcgcgggaagcgcgcacgacgcatgaggaagtggaggcacggctgcaggcagccacgagggcggcacgtctcgcggcggcagaagctgaagcagcacgcaccgcggaggcggccaggcaggctgcagctgtgttgatagaaaacacgaggcctgggagatctacttaactccggtgcaggtccaaagctcgccttcgaatgtatgagcgtgccagttgatttgatcctgtaatcaacaagaaatagagacaaagaattcgtggttaaatctataaatgatagccgatcggctaggtgccgatgtcatatatgaatcgatcggcggttataaatagaaagtaaggaactaaatctattcgatcggctgtagatattaacgatatatagttcttatattaatatatacttaaatcaagtgattgggatagatcggtcaccatgccgagacagtataaatcacttagatcgaaatatatattaataacaggattatatatgtttatagcatagccgatcagatagatctagcatgtatcggctaatactccgatactactttatataaagatatcaaaacaaatataatttaccaaacaaaagcttaatatacttaaatacaataagatcttgatataaagggcggatttaacatgtcattgaagcatatagatcgaatatggttaaatcagataagatcggctgaaactccgatactaccctaatcggcaaccataggacatgctagagattgatattctaagcacgacttaatagatcaaactcaactgatgcagcattaagtatgaaaagaagaacaatatctagacaatcaagccgctgggtgtttcataaagtggtagatatcttatataatctaggacaacgtcgctatttaacctaatcggctgccttctattaacagatgttagccgattgtaggttagatgacgatattgccaaagattatgtaagatatatgataacttgacgaattatatagacaaaattagagtgtcataatgatggaagcactaatctcgagaacacaagtcgtcataacaagttttacctcttgttgaagatcgaaaccgatgtagctcaacccgaaagtaagaactcgtcgaaacaaaactaaagcaaaaaggtggcgatgcgccaaaattgtattgaacatgtgtgttaaaaattacatagggctcggggtctatttatacccgagaattacaagatatgtccatactggacacgaccgctatctctaacaaactctaagataccataagtctttgcagcagacttttgcccaaacatatatctaaggaagttacataaaacatcctaattaatagatacaattgccttctcaggactctatccatgtgcggcaatcatcttgaagcacctcaattcaacccaatgtcatacaccaaattatactgtcagaatcggctgcatcggctcacctagtccgactcagacccagccgatcctaatcgtagccgatttggaattcagccgattattgctctgttctcggatcaatctccgccttcgactccaccttgatctaatctccttttccgactgttgttgcgcgggttgcgcaggaggcgcgagcggctgtgcgggaagcgcgcgcggcgcgtgaggaagcagaggcgcggctgcaggtagccacgagggcggcacgtctcgtggcagcagaagctgaagcagcacgcaccgcggaggccgccaggcaggctgcagctgctgctgctactttgcgagctgaggaggaggaggagcgacgtgacctggagctgacagacgcggcccgcgtgcgacgcgacgcggaccgggatcgacacataggccgacgtgatcgcgacttcagcccccatcgcagaggatcagatctccaccgcggtgaggaggagcggcgcgatccatggcgcgatcctcgaatcaaccgcgctctggagacccagcgactccgggagcaggcagcggcgattgaggcacaactggacttcgaccgggagcagggtggacgagacgttggcgcacggagccctcgcaggcagcgcgcctccccttccccggaccggcgccgtggtcgccgtggacgctccggctctcctcccgttgtgcagatcgtcgtcaaggatgttggcggcgcatggcccatgctcaccaagactaactacgccgagtgggcgatggtgatgaaggtgaagttgcaggcgcgccacatgtgggacgcggttcgatacggcgacgtcgactacggggaagatcggcgggcgttggaggtgctccttgctgctgttccgacggagatccagtcctccatcgcgagcaagcggaccgccaaggacgcctaggacgccatcgcttcggtacgcattggcagcgaccgcgcccgcaggtccacgcttcagaagctgcgtcaggattgggagaacctggccttcaagccgggttaggacatcgactactttgttctccgcctcaactccttgcaacagcggttggcgcagctcggcgacaccaccatcgatgaggagagagccgtggagaagctcctttgcgtcgtccccgagaagtacacgcagctggctctgtcgatcgagacgctgctggacttcaccgagctcacgaacgaagaggtgacaggtcgcctcaaggccgtcgacaaccgcaagcagctacctccctcagagccgatcaccattggtggcaagcttttcttcaccaaggagaagtggctcgcccgccaacaagagcggaagaagggggaggccacaagctcttcggcttcgggatcgtcgagcagccgcaagcgtcgaccacgcaagtgggagaaggcgcgtagtggcgctcttggcggcgccgatggcgagcgcaagggcagccgcaacgacacctgccacaactgcgggaagaccggccactgggccaaggactgccggcaggcgaagcacggcggtcaagcacacgtcgctcaagcgcaggagggtgatgaggtggctctgtttttcgtacacggaagcatcgagccacacttcactcccacaccggacgctaccgcgcccctccacctcgacgagctgtgggcccacgtcttcctcagcaacggatcctgcgacgacaagatcgacgggtggtgcctcgacactggtgccactcaccacatgaccgggcgacgggaattcttctccaagcttgactccagtgttcaaggctccgtcaagtttgaggacgcctcagccgtggagatcaagggcgtcggctccatcctcttcaccaccaagaccggcgagcaccggctgctcaccggtgtctactacatccccgcgctgaggaactccatcatcagtttgggacaactggatgagaacggcttgctcgtggagatagaggacggggtcttgcgggtttgggatcgccatcgtcgccttctcgtcaaggtgaacaggggtgccaaccgcctctatgttctccatgtacaggtggcgcagcccgtgtgccttgcagcccgccgcgacgatgatgcatggcggtggcacgagcgctttgggcacctcaacttcgaggccttgaagcagctcagcaacaaggagatggtgcagggcatgccacgagtcgagcacgtggagcagttttgcgacacctgcgtcctcaccaagcagcggcgactcccctttccccgccaagcaagtttctgcgccaaggagaagttggagctcgtgcacggcgacctctgcggtcccgtgactccggccacacctggaggccggcgcttcttcctgctgctcgtcgacgacgtgtcctgctacatgtgggtggtcctgctcgactccaaggcagtggctgcagacgccatcaagcaccatcaagttgctgcggagaaggagtgcggccgcaagcttcgggtgctacacaccgacaacggtggcgagttcacgacggctgagttcgcagcgtactgcgccgacgagaggatccagcgccacttctccgcgccatacaccccgcagcagaacggcgttgtggagcgccgcaaccagacagtggtggccactgcccgcgccctcctcaagcaaagagggatgccggcaatctactggggggaggcggtgatgactgccgtccatctcctcaaccgctcgcccaccaaggcccttgatggcaagacgtcgtacgaggcctggcacgggcgcaagccggtggtgagccacctccgcgtctttggctgtctcgccttcgccaaggagctcaaccacgtcggcaagctcaacgaccggagctcgccgggagtcttcatcggctatgcggagggtgtcaaggcctaccgcatcctcgacccttcgacgcagcacgtccgcatttctcgggacgtcgtgttcgacgaagggcgaggttgggcttcgtacaaggcggtggacgacggctcgacttcgactctcagagacttcgtcgtcgactacgtccactttagggcagccgggggagctagcagctcatcttcaccgagctcgtccacctcggcacccggctcgccatcagctccggcgagtcctctaccacctacaccaccagcaactcctccatcaccagctacgccccgctctcctacaccggcgcccacaccaccggtggagttcgccactccgttgtccaacgacgaggatcgtgttgatgcgtaccacgacgacgagcctctgcgctaccgcaccatggacaacatcttcggtgatcagcccgtccctggactggagacgcgcgacttcgaggccgagttgcacctggcgcatgaggacggcgagccctgctccttcgcagaggcgaatggagatgtggcatggcgcactgcgatgcagcacgagatggacgcggtcgagcggaactggacgtgggtgttggcagatcttcctgccagccaccgcgccatcacccttaagtgggtctacaagctcaagaaggatgaggccggggcggtgatcaagcacaaggcacgtctagtggcgcgcggcttcgttcagcaggagggagtcgactttgacgacgccttcgcgcccgttgcgcgaatggagtctgttcgtctgctcctcgcgctggcagcccaggaaggatggcgtgtgcaccacatggatgtcaagtccgccttcctcaacggagacctgaaggaggaggtctacgtccaccagccgccgggattcgtcatccccggcaaggagaacaaggttctccgcctgcgcaaggccctctacggcttgcggcaggccctctacgccaagctggactccactctcaagcaaatggggttccagcagaactctcacgaagctgctgtctaccagcggggcaaggacggcaatgccctgttggtaggcgtctacgtcgacgacttggtgatcaccggcaccaaggaggctgaggtggaggcgtttaaggaggagatgaaggcgactttccagatgagcgatttgggccttctctctttctacctggggatcgaggtccaccaggacagctctggcatctcccttcgccaaaccgcctacgccaagtgcatcgtcgagttgggcgggctcaccggctgcaacccagcgtacactcccatggaggaaaggttaaagctgagccgcgacagcacgctgagggaggtcgacgccacgcagtaccggcatattgtgggcagccttcgctacctcgtccacacgcggccagacttggcatttgctgttggctatgtcagccggttcatgcagcgaccgacgacagagcaccagcaggctgtcacgtcgagggcaccaccgactacggctttcactacccgaggtgtcccggtgcgcagcacttcatcgggtacagcgacagcgacctcgccggcgacagcgacacgagcaagagcaccagtggcacgctgttcttcctcggcaagtgcctgatcagctggcagtcggtcaagcaacaagtggtggccctgtctagttgcgaggcagagtacatcgctaccacaaccgcctcaactcaagctctctggttggctcggctgctgggtgatctcttgggcagaaacactgaagcagtggagctcaggatggacagcaagtccgctttggccttggcaaagaatcccgtcttccatgagcgcagcaagcacatccgcatcaagtatcatttcattcggagctgcttggaggaggggagcatcaaggccagctacattaacacccaggatcagctcgccgatcttctcaccaagtcccttgggcgggtcaagttccaggagtttcgcgccaggattggaatggttcaaattccccaaaaggcgccacacatgacttagggggagaatgacagattaagtcttgtttttactatatgcttttaacatctatttttggaataatagttggctgccttaggatgtaaaccactagtagttttccttaggatgtaagccactcctagtttcttaggatataagccactagcctatatatatatatatatatatatatatatatatatatatatatatatatatatatctgtgtgtgtgtgtatgtatccaaccagccatagttgattgagtggagaatagaaattaaactagccccaaaatctgtgttccttttgctaacaacgagccgacgccgtcgctcgcgcggttcgggg

SEQ ID NO: 2963 - DNA, 628 bp, Oryza sativa
tagtcatggtcacatcatcctccccttcttcaaggagaaccgtcctcggtttttccatatggtgttcttcacatagtccattcaaaataacctgtttcatccaatcaaaactagagaaactcgaagtagtgtgattagcaataacatgtttctctaaatccgaacaaatgaaaactctatgcaccaaatatattcctctatcattatatttgccaaagatatgaaaaatagcattagttggacgtggcaaatcagacttagcaaataatttctccttcaaattatcgagctcacaaaaatcatcaaactgaacatagcccaaagtatttaaagaagatagcaatttacgttcctcaacttcattagcaatgtgaacagcatgcttaaaatcagcacacaaagaaacactaggaatagcatgctcattcactagttgtggcatggatataagtgaagcattatcacacaactcttctttatcacaaggaacagcgagtaaatcaacttgtgacaaaggaattccagcatttggttccactaacggttgctctacttttgcatgaaaagtgaacaaatttacttcgttaataatgcactcaccttgattaatttcagtaccatttacttt

SEQ ID NO: 2964 - DNA, 723 bp, Oryza sativa
cattatgtggttgtttaaatccacgtagccatcacgcatgaagcttactggttaccctccatcagacaaacatatatattcgatctttctccggtcaagttctagcacaacaaaacacaagccaaaacaccatttaaccacctccaagcttcgcattccaagagaccgagcgactgttcagccagagattaatcagagaatggctggagaaggagatgatcaactgaagcttctcggattgtgggtgagcccatacactcaccgagtgaagcttgcactcagcttcaagggcctgagctacgagtacgtcgaggaggacctcagcaacaagagcgagctgcttctcagcaccaacccggtgcacaagaaggtgcccgtgctcatccacaacggcaagcccatctgcgagtcgcaggtcatcgtgcagtacctcgacgaggagttccccaactccggcgtctcgctcctcccatctgactcctacgatcgcgccattgctcgtttctgggctgcctacatcaacgacaaggtaatcgtcaaattgcctcggttaatcgatctgaatttgcatcgattgatgtgatgttgtgtgcgtgtgctcgcgtgtgtcgtcgttgcagctgatgccgtcgtggctgcagtcgtcgatgggcaagacggaggaggagagggcggaggcgctgaagcagacgttggaggcggtggcgaacctggagacggcgt

SEQ ID NO: 2965 - DNA, 714 bp, Oryza sativa
ccaacgatgacgtctggagttgtcagcacatcctcggcagtcacgtggttcacacgaccccgaatgacatccttaccaccattgttggggcggggaggcgcttggccttgctggcgcctcggctttgggcatttatccgcaaagtgcccgggctcgaagcagttgaagcacagacgctgctgaccttgaacttctctgcggccttgaccaggctgcacaacgggcgcaggaggacggggcacacgggtcccttgctgactctgctgttgctgcggctgtgaggaggatccccctggatatggattggtgtagcggaccctttggttagccccctgttgattgcggagattcgccaagcgacgcttctgcgactccagttccttgtgcttggcttccaagcggatgctcttgtccaccagacgttggaaatccggatagtccccggagaccagacgcacggacagctcagggtccattcttgccaagaacttctcttgcttctcctcatcttcacgaacatcctccggggcgtaccgggccaggttgttaaacccatgcaaatactccatcacagagcggttgccttgcttcaactctcggaattcccttttcttaagggccatgactccggcgggcacatgggtcctccggaaagcggcggtgaagcgggcccaagtaataggctgcccctctggctgcgtagcctggaagtgg

SEQ ID NO: 2966 - DNA, 1217 bp, Oryza sativa
aatcccaaaatatccaaactcatgttttgtttccttccttgactccttgaacccttgtgtacaaagtatcaaatttagattcaaaacccaaactccaaatctctccaaatcaaaatctttcagcaaaaatctattttgcctcccttgtcgatgggctgatgtcacgccccgaactagtaccgaccggaactagcccgtgacgctccaaattaacctgttaatcgataccagtcccaggaaacagtgctggtatcacaggaagacagaatatcacagcaacagaggtctctttattatagagtaggagtacaatcaagtcgggctgcggacagatcccgagttcacaactgcattacaaaagggaagcggaagccaggacttggaccaaacaacataggcgcgacttgggaactaggccgaaaccctaaaactcatcgtagccggcttgctcctggaagaactcctcgtcagcgggatccgcttcatcttcttcagcaactgggggggagattatttatgtacagcaagggtgagtacaggagtactcagcaagccatgggaaataagtgtttaatgcaggcttcaagggaaaggctgttgtttttgcaattgattttatttaaactctttttcgaagcagctaagtgagtgcttctcaaacgacacggatgagacagtgcgtctcgtctggtcggagtatgtgcaatatatcagtctttgaattgattcaaggttggcacccggccaacagctttcaaacggccacccgggcctggctgatcccatcagccgcagattttccaaacatcgatcccattccacaacagcaatttcacaaagcagtagtcaaacaaaactacgctaggaatcacctcacatccgcccatgaccgtgggtacggctgttcgaacagtttaataacctctgcagagggggtacactttacccacacgacattactaacccggataacccagcccgtgcagaacggccacgtctggagaccttgaggctttcatgacaaggcatttcgaaagccaacacaggtttaccatatgccaacaagaggggtcccagaccaacaacaggttaggtcccagaccatactgtgccaggaagcccgagggttctccccgacaccaccccgttgaatccacatgtctcttggcatcatggctcccccgattagctaattactcagccaggggcgtcccatt

SEQ ID NO: 2967 - DNA, 599 bp, Oryza sativa
accttgtcgtcgatgtaggcggcccagaagcgagcgacggcacggtcgtaggggtcggatgggaggagaggaacgccggcgtcggggaacgcctcgtcgatgtactgcacgatgacctgcgactcgcagacgggcttgccgttgtggatgagcacgggtaccttcttgtgcaccgggttggaggtgagaagcagctcgctcttgttcttgagatcctcctcgacgtactcgtagctcaggcccttgaagctgagcgcgagcttcgctcgcagcgcgaacgggctcgcccacatccccagcagcttcagctcatctcctccaccggccattgtcttcctctctgaagctctgagatggttttggcttgagttgtcttttgctagctagctagcacttgatcggagcacaacacgaaccgtgaatatttgtatatgctatagaagactagtagtgcgtcacgagtgatgcttgattgcacaattgaaataggggtttccacaactactctttaacacgtcgaaagctcttttcagtgttcagatgtattcaaaaacatgcgatcagtaactttagtcaaaacatgtgcagataaatcaata

SEQ ID NO: 2968 - DNA, 556 bp, Oryza sativa
tttcatagcactaaaaaatatcaaagctatttggattgacgataaggttttaactggctttccttgcgttaaaatgtaaaaggcatacaggctatctatgacgaaagacgtggcaactgtactgtggactactcagacaggacggctacaactcatacctctgaatcccttggtttgccacaaggaccatgggttcaagagggtggaccacaacgcgctgtgcatggtgcatacatatggcctcatcgactcaggaatcgatccaactcatcccatcttcgcatactactcgatactgaccgtgattctgtgactgctcattactacggcgtgtgccacgctacaaatgattctccatctggaacctgcatcatacaactcgtgtgaactacgcatttctcgtcctacagccataaccagcggagtgttcaatgcctctcaagatcatgcttcatcttctgatccagatggccatgggacgtaagtactatatgctgatccaacctttatacttatcggcaggagcaagaataccacgcccttaccattctactac

SEQ ID NO: 2969 - DNA, 716 bp, Oryza sativa
ctaaggcttccttttttgctttctttattttcaatagtttattgctaaaatggttacttatctttcctctccctttcaaaattgtagatggcagtgaacgccagcttcagttcccacggttttggtgagggtcaccacgtcgctcagcttcgtgacctcgcccgcttccttggcttctcgtgtcctgagtacacggggtactctgtggaccgtgttccctctcgttatgagctttcggtgtacctttaccctcgtggaggtatacacggggctggccttcgcccacaccacttcactgtggccaggcccactctccagatcgcgtaccaggacctctcctagactgcacttcgtcgcttggcccacgactacagccaccgcctcgggggctctgcctttcggcagctcctgcgccttccttctggccgcactgacactaggtacccttgcccgtacagcgagtctcagcctgtgctgactcgcatggttgagctctctgaggctcaggccactcagcacgacctactcctcgaggcttcccgctcccttgctcgccgctacgctgctttggaggcccgtctggccgaggagggtgtcacctcagttgacactgtctcttgggacttaggccgcctctgccacgccagccgcctgtcctcccacagctctcgcggctctgcccgcactcctagtggcccgcgctcccccagctcgcg

SEQ ID NO: 2970 - DNA, 532 bp, Oryza sativa
tccgtgcccccacccgacatgaacctgcagctcggcgagctgctggagaccgagaagggcgccgacgtggtgttcgaggtcgccggcgagaggttcgccgcgcaccggtgcgtgctcgcggcgcggtcgccggtcttcggcgcggagctctacggcctgatgaaggagggcaacgccgccgtggtcgtgcgcgtcgaggacatggaagcgcgggtgttcaagctgctgctccgcttcatgtacaccgactcgttgccggagatgaagaataaggacgcaggcgtcatgtgccagcatctgctcgtcgcggcggatcggtacaacctggagaggctgaagctgatatgcgaggagaagctgtgcaagcacattagcatgggcacggtgtcgaacatgttggtgctcgctgatcagcaccactgcgccgggctgaagaaaacgtgctgcaattttctcggctcatcggcgaacctgagtcctatcagcaggggctgcctctctgttataagagcttgtgttaggatgctggtgc

SEQ ID NO: 2971 - DNA, 655 bp, Oryza sativa
aaataattttataagatcataaggcggtttggatggtggttttgcctaacgtggcgcctacgtggcgttgatgtggcacaaaaattcaaaaaaaacccaggagtatccgattaaaaataaaaaaatacaatgggaacaggggcggggttaggtttttcaacttgggtattcgaaattgtaggagagaaaattttccaacccaagatctaatagttgtataatatgcaacggtataagcatgatttcataaagtcataaatggatagaattgaccataaattgaatgcgttaaacatattagagtacattactaaactattaattgaaaaaacatatcaaatttatagaccatacaaaatggcaaaatgataagaactcttacaatatagagaagaactttccgtttcttgatattttgaaaatgattgatgatgtcttcattcttaacttgcaagaagaaatatctttcaatgaatataaccaagcaatcattcaaatattcttgccccatcttgcttcttaacttgtttttgatatagttcattgaagagaaaaccctctcaacactagcagttgcaacagggagaactaacacaaatttcagaagtttgtaaacaaggtcatagcgagaaaccttgtttgttttcacaagcat

SEQ ID NO: 2972 - DNA, 512 bp, Oryza sativa
tcttttgcaggaggataattttccagaactgctaagcggcggtttcctcaacccaaatgatatttcactcgagttcatccaagtttctatttctttttcctcttgtttgggcaaaagaagtctaacttccggccttcgcaccaattctcttccataccaatttgaatggagcttatgtatcgagcacaacgataatccgctacaacttcgttgcataggtttgagggtccgttatgaagtttatctgtatcaagacagtgaaggtcgaccaaataagttgagcatagtggttgacatccctgagaatctcagacaagttctagaattttgtgatgaaatagctgagataacattccggaagtttgggagcaattctgaatggcggcaagtgattaaggaatacgggaatcgtctagtgtacgcctaaagtgagttacattgctctctgattcttttaaaatgtaaaaataagtgccaagtgttcatgcttctgtgatttttaacaacaacaa

SEQ ID NO: 2973 - DNA, 1513 bp, Oryza sativa
tcagtgacagtcaatttgatttacacattttttttgccttagtgtaggaaaaagtgaaggataattattagttgattatcctgtaaatttcttacccttcatgcttaattccatatcaatctattctagagttcttttgctctcactgcatttccatgtgataaacacaaatctgtagtatcgtgctgtaccacttgatataactatctgtattgagaagtaaaatggaaatattatgttgccacgcttcctaaatccaattaacaagtgtcttatgagcttccattgatactgatttgaaaatatcctccgaaacattttttttaaaactcattgaatgctgatggattgtgcttgaacaggtccattgcaattagtactccagatgtgaacctttcagcggagaatgttattgccacaatgtcttcttttgactggtagatttgtatgatcaaatatagttgtaccatcaccatggacacattattccgatcattatgtaaaactttattttcattttttatatgcattggtgcttcatctttagattgtaatgtgtaagagttttgttctcagcagaatctgtacaacgatgtatgcaaaattactcatcaacagcatcccctgcaaatgtattcgtgggttttctccttacataatcattgattcagccagaaaacaaatgattagtctacagtaatcaaccaatctatgtgtaggcggcgcgccattggcgcgccccagcatctagttaagtttaataccaggtaacaagtgacaatccatagagatttaatagtgaagctgtagggatagtaaaaaaaactgagacgatttctaacttctgcttaggatagatggtaaaaggcctaaacacggggaattcacccgcatatcagtgtgctaaaagaagataagcaaattaaactacctgatgacaaaggttcaaactcagcaacaaaaactaccactggccattgcaagaacacatgaacagtaagtcactaagcatgactccctggaagtgccagcgtgacaaccagctcttccataagagaggggcaactcctgcaaagatgcttgaagccatcactggcgacgacagcactcaggtttgccagtgagccgaggaaatcgaagcacgctttcttcagcccgtcacagtggtgctgatcagccagcggcaggatgttccataccgtgccgacgctaatgtgcctgcacaacttctcctcgcagatcagcttgagcctctcgaggttgtaccggtccgccgcgacgagcagatgctggcacatgacgtcttcctcctccatctccgggagcgagtcggtgtacatgaagcggagcaacagcttgaacacccgcgcctccatgtcttcaatgtgcacgactccatcagtgtcgccctccttcatcgagccgtagagcgccgccctgaacaccggcgaccgcgccgcgagcacgcaccggtgcgcggcgaacgtctggccgccgacctcaaacaccacat

SEQ ID NO: 2974 - DNA, 1240 bp, Oryza sativa
catgactcgatggagggattggaggcgccagcatggcaaccagctcattcacaagagaggggcagctcctgctcagctgctcgaagccgtcgccggcgaggacagcactcaggttcgctggtgagccgagaaaatgtaagcacgccttcttcagcccgtcgcagtggtgctgaccagccagcgtgaggatgttcaccaccgtgccaacgccgacgtgcttgcacaatctgtcctcgcagatcagcttgagcctctccaggttgtaccgatccgccgcgacgagcagatgctggcacatggtgtcttcctcctcctccatctccggcaatgagtcggtgtacatgaagcggagcaacgccttgaacacctgcgcctccatgtcgtcgatgcggacaacgcctgccctgtcgctatccttcatcggaccaaagagctccgcgctgaacaccggcgactgcgcagcgagcacgcaccggtgcgcggcgaacgtctcgcctccgaccccgaaaaccacatccgcacccttctcggtgtccagaagtttgccgagcttctggttcaggtcagacgcggaggcacggtgacgaaggtttcggtggcgatctccgtcgtcctctcggtgcggatctcgccgacgacggctatgtcgcaccgaatggtgaaagaatcgtccctgagatcgtcggacttctcaaattcgtcccttttgatcaacttcacatgaccccaagtcaagcactcgtcaccaaaagttcttactggtctagatgacagcactcgtcaccaaaagttcttactcgtcaccaaaactattttaacagctcgagtggacgtccacctgagtattagaatctctctccgtacctgatcggcgaaacaaatctgaaactgggctttaaccttcacacccttcgtgctggtggcattttcatctagcatgaggtgaaatgatatgtaatcggcgaacatggcgatgtccccgttggggtagtatctgatgcgccaacggtggccgccgacgacgaactggtcggacgtgagggctgcaccgttgggagtgcccttggttcgcgagtagccgtcgatcttgaggaggtggtacccggtcaccgcgtcggccacaatggaggaggcggtgccgcggctgacggcagtagccatggcaggcaggcaggcaaggttaaccgcctgctcgagacgaacgagatgaaagacacaggatttggttgggaatatgctg

SEQ ID NO: 2975 - DNA, 2015 bp, Oryza sativa
tgttcaaccgtcaggcagatccaactttgttgacgggttgaatagcagtgaagaagagacatcaagaaaggcaaggttgggatgtagcgaggcctaggaggtcagatctggtggccacgggcactgcgagcgatggatccggtggcagcaggcctcgagagctccagtagcagttgatgccgtgacgacggtgggcttgggtgcatagatcttcccttttttccaccacgattgtatatgtgagtttgcgatctgattttatatacgtatgaaccaaaaattgttgaactagatccaaattattgaattgaatttgtgtaacgggatccaaactgttgtgtgtttgaattgaattaaagttgttgaattatattttttagcaattggtaattgcgatggaactattttcttgctaaaatcatttccagaataagccacccatccctcaaaagtaatttgtgcagacggacggctttaggccggaccgcacataaaaattgatttttccctaacggttccttaggtggacggcatgtaaaaattggacttttacagctgaactgcctttgaaaatcaacattcccacattgtttacgtatagtggtaaaaccgcattcacaaatcatagaaagctcttttgtagtatgaaaaggaactagagttaccgatcaacgtgagaggagttgtttaacaaaaaaaaagaaaaaacccggaaagctgagaggagttttttaataaacaaaagggggaaacctgagagttgtgatacgatgcgtggacacactggacagtggatatcgaaaaacttttgctgtcgtgaatccgtcgtctcgtctctctcgttgcgtctccttccaccttaatttgcaacattagttccttcttatctccagcgcttaaccatatacgcgaatccagcagctatagcgtcaagcagcaaagcaagcaatagacgacgagcccaccttgccgtccatgggtcaatgcgccatgtctcacacgcgctctaccaccgccggcgccgccggcggtaagccgccgatcgcgccgccgccgacgtcctccgcctccgccattgtcgccgacacggccagcgggtaccacctcttcaagatcaacgactactcgcgtaccagggacatcttccccaccggcagtgccctcaagtcccgcgcgttcaccattggcggccaccaatggcgcatccattactaccccaacggcaacacggaggagtgcggcgagtacatctccctgtttcttcatctcgacgagattgtcaccgacaagaacgtgtacgcgcagcacgggttccgtttattcgacgagtttgccggtgataatgatgacgatgatgaactgcagccttcctccatcgctgacctcgggcaggtcagtacctttggtggcaacaacattgggttgggacgactgaggtttatcaaaagggaagagttggagaaatcgaagtatctgaagaacgactccttcaccgtcagatgcgatgtcgtcgtcaccaagcggatccgctcggaggagacgccattggtggtgaggacctctccaaagccaaaggtggcgaggctcgtcaccgtgccgccgtccgatctgcaccggcatcttcaggacctcctctgcgccgagaagggcgccgacgtggtgttcgaggccggtggcgagacttttaccgctcaccggtgcgtgctcgcggcccggtcaccggtcttcagcgcggagctgtttggatcaatgaaggagagcgacaccacggtggtcatccgcatcgacgacatggaggcacaagtgtttagggccttgctccgcttcgcgtacaccgactcgttgccggagatgaaggagaaagacgaaggcgccatgtgccagcacctgctcgtcgcggcggacaggtacgccatggagaggctcaagctggtgtgcgaggagaagctatgcgagcgcatcgatgtgagctcggtggcgaccgtcctggcgctagctgagcagcaccattgtga

SEQ ID NO: 2976 - DNA, 832 bp, Oryza sativa
accccaagttcatcaggagagaagatttggagaaatcggagtatctcagggacgattcgttcaccatccggtgcgacatcatcgtggtcgacaattaccgtgccgaggacgccagcagcggcgctgccggcttcgtctccgtgcccccgtccaacctccatagccacctcggcgacctcctcaagaacgagaagggcaccgacgtagtgttcgaggtcgccggccagaggttcacagcgcaccggtgcgtgctcgcggcacggtcaccggtcttcaacgcggagctctttggcatgatgatggagagcgacaccaccaccaacgatgccatccaaatcggtgacatggcggcgccggtgttcaaggcgttgctccacttcgtgtacaccgactcgttgccggagacgatggaggagagggaggacaccatgtgcgagcatctgctcgtcgcggcggatcggtacaacctggagaggctgaagctgatctgcgaggaaagattgtgcaagtacattggcataggcacggtgatggacatcctcgcgctggctgatcaacaccactgcaaggggctgaagaaggcgtgcttcgattttctcaggtcgccggcgaacctgagtgccgtcaccggcagcgaaagcttcgagcatctgagcaggagcttcccctctcttatgaaggagcttgttgacattctaggaacttcacataattatgcttggtgagttgtggcaatatatcctagcttatttaggaagaaactccaaatcgggtgcctgattgtttcttaaaaaatcggatggtcaaatattttagttgaccactagtgaaa

SEQ ID NO: 2977 - DNA, 875 bp, Oryza sativa
tcttggggtcacagaaagttcatcaaacgggaagatttcgagaagtccaatgatctcagggacgactccttcaccatccggtgcgacgtagcggttatcggagagatccgaactgagaagacgaccgagatcccatcagccacaacattcgtcactgtacccccgtctgacctgaaccagcagctcgtcgacctgctggagaccgagaagggcgccgacgtggtgtttgaggtcagcggtgagacgttcgcggcgcacagatgcttgctagcagcccggtcgccggtattcagcgcggagctctacggcttgatgaaggagggcgacaccgccggagtcgtgcgtatcgaagacatggaggcgcaggtgttcaagctgttgctccgcttcatgtacaccgactcgttaccaaagatggaggaggaagacgtcatgtggcaacatctgcttgtcgcggcagatcggcatgatctacagaggctcaagctgatctgcgaggacaggttgtgcaactacattggcgtcagcacggtgttgaacatcctggtgcttgctgatcagcatcactgcgacgggctgaagaaggcgtgttttagttttcttggctcactggagaacctgagtgctgttgtcaccggcgatggcttggagcatctgagcaggagctacccctctcttatgaaagaactatttgttgtgatggcacttccaccgaatcatggttaatattcttgtgctctagcaatgatagttgttggtttctcaatctgaagttctgaacctttctcatcaggtagatatgttatcttcttttagcacgcaggcatggtgctgtactccctgtgtatctatgcttttgttatcaggtacactat

SEQ ID NO: 2978 - DNA, 1696 bp, Oryza sativa
ctaagtaactagtcggttcagggaaacctcgcatgccaatagttggggaacgccggggcggggtcggttggagccaacccgggttcctggtaaggcaagaacacgaagcttgccagattaccgatcgaggtggttggagtttgatttgtgaaaactaaaatggcctatatttatgtgaggaattgatccttctatgtggcatgaggtaaccctgggtcggcttgggaaaggctttgttgcgaacctctgataccgacgggtgttcggaataagttcgtatcttgtgggtaaagtgtacccctctgcagaggttaactaactgttcgaacagccgtgcccacggtcatgggcggatgtgaggtggttcccgttgcgtagatttgtttgcctgtgctttgtgaaaagttgttgtggtgtgggaatcgtaaccagaatcagcctacgtggcagatggatgacctgagtagtcagaaacgaatctgtgtgattcgggatgtctgtgggcatcatagactaggcttcccgagtggaagcggattgctttgctgctgggcagctggactctgggagtccgagaaaatgaaaaaggctctgggagccgcttaatcgagtgaaaaggctctgggagccgataagtaatgatctgaccctggaggtcgatatattaccatttgagttgttgaaaagcatttcttaagtcaaatcgagacacaagtctcttttcgatccaaactcaaaaagaaataaatcacttagtgttttcaaaatgaattcaaacaaaggatttgcaaaacaaccttgcctctcttccaagcttgcattaaacacctaaattcccgtgacttgctgagtacgaaagtactcacccttgctctatataaatatatatagttcctccgccttgaagtgaagatgaagtgaagtgaagattagggtttcgtccttgttcccagccgtcgcctgtggtgttgggtgttagttcgttggttccgctgctgctgctgttgttggtgtttactcgtccgtgtcgtcggttgcattctcgggttgttctgagctgcaacctaagttaaggtaaataagtcctctatttattttaaggatttgcaatgattcatatttgtcaccgtgggtaccagcactatgtctgggactggtaccgagatcgcggtttcgtaggtagcggttcgcgccgtttttcttacgacacgctcctatcaggtgccgttgtacggcggtgccggattggggtgtgacatgcgcactagggtgatttttacaacaaaacagagcatggagtggacatttgttacaaaataacttatcaaacttcaagtgacttatgggatggtttttgtagtttttcctatcttttatggtacatctataactaaggctcggtttgtggttgttgtgttggtgttgcgctgtgctcatttttaaaattgctctaaaaatttgaacatataattttggtcgtttggtttatagatgaattatgattatatatattatccaactttcacgtctcttccaattgtttcgtattttcataccataataatattgacaagattataagaaaatcagtttaacaaacaccaaaatgtcaaaaagttgttgcagcaaacgagtttatgatcaggatccatatgccgcaatgtcaaactgaacctaaagcattcttagtttgaaa

SEQ ID NO: 2979 - DNA, 754 bp, Oryza sativa
gcgtcgccggccggcggaccggccctggcataccctatataaaccatacctattttctgatttcaacacacttcttcttcttctttcaacacatctccccaccgtatctatttttcatagaaaatatgcggaggtccaaaaagcgtcaacacgagtcgacaaccggtccataccagaggtcggtcgatgcccggcagctatccccgggcatggacgactacgggatggatgatcgccacatggatggtctggagggcgatgacggtgatcagccatctcctggcgaggccaacttctccgtcgacgtcgacgccacgacgttgcccacaccaaattccgataaccagccatctgccagaagagcggagtgttggcgacacttcgaattattcaccgagatggttgacggtaaaagtatacctcgtgctcaatgcaaatattgcgaaaaaattttgtctgcagctacttcttcagggacaggccatctcaaccggcattacttggcgcatctcaagaacaaggcgccggcaggagcaagacagacacatttgtccttcggccctgacggttcagtaagtacatggacctatgattcaaaaatagctagagaagagattgctaagtttattgttgctgaggatctaccaattagaatgggggaaagcaaacattttgagagaatgatccaaaaagctttttgcccacagtacaaaaaagtttctaggaaaaccaccaagaacgatattacatctat

SEQ ID NO: 2980 - DNA, 551 bp, Oryza sativa
tccaccacccaaggagatcgacatcgtcgccatcaagcgtcggatcatgctcagtatgatcggtgacgaggtagtggttaagctctgaatccgggttccatgttgatttgttctgtgaggatggagaggcttggtccttgcctgtatgctgcttccacaaatttagtgcacttgacttgcttgctttcttttgtgaggtctgctcaggaactcggggagtaccaccaagcttggttcggtacagacggaaaaccctatagagctcattattgacatgttgaaaagcttcagaataatcaagccccactgcatcacctattgagttcatggcaaccttggcaatttccaactttttgcgaggatcaagtatcaaagcaaagcaataaaggtgaggtatagcggtgaagtatttgagaaatttttcttccatgggtttaacaatggaagacagaatacgatcagaccggttttcatccaaaacaagtgccagcttccaaatccactcaagcaccaaacaagatgtaggatagtaaattcctgataattgaact

SEQ ID NO: 2981 - DNA, 664 bp, Oryza sativa
gaaattttttccacactttcactgttataatacgatccccctattcccccaattacaacccaccccctatatatataaaatattaaccctgttataagaatcataataagatcaaagataggtccatggagccaagtaccagacccagaaggctacaaccaaatcgagcaccgttgggcaggtacggcgagggcggttctcgacgaattcgtcggcggcggggagatcaaaatcggatcttgaaggcgatcccgaggtggcgaggcgctcgtggcttcgtgcagcagcagcagcaccaagaaaaaggagggggatttgggggggaggagaggagacgacaggagcggagaagacaacaggagcaaaagggcaacagcactagtagcatgggatgtgtgtgccttgtatgtgtagtgctgtgctgcctgcttggcctgcagctgctgcactgaatccatacacacaatggggttaagcactagctgggtggatgtgtgtttactttttctccccttctttttctctcaagtgctattgcttttgtaatttgtactagctttgcccctctttctctgttactacttggaatttgggggtaaaagaatatctggaaatctattatataattaaaggaatagaaaaaggagcctccacgttcgctctc

SEQ ID NO: 2982 - DNA, 5507 bp, Oryza sativa
gaaaagtagtgagggctctgaagaacctcatcatcacagggaatcactttttgaagtgtttatgcagtttatggaaccattgattttagagtgtaagtcatattcggagaagaacttttctaatttaggggtcacaaagctagtagaagttcattgtatgttgaagtccatcaacaaggtattgacaacagttattgaagagaaaatctatgtacctacagaggacacatcggaaggatcttactttgagttcttgcaagatatttacagggtcttagtctcaatggccgaaaaaatgtatgaattctgggtgtcagctgtgcatttggaagatgcaaacgttaagaagatgctacctttaatgtttgctgagattgtcgatgcagttggtcatttgttagatattgaatacaaggtcatggggcgggaccttgtaaaattatggttaatgatatttgctttgtcagctactaatgcatcttccaaggacattaaaccctgcttcctgctagcctcaaagatttctggcctttcatcccaagtgatttgcacattcagtgagcttcgtcaggttggttatacaacttttcagaagttctttatgttcttatactctgctttgtggtccttaattgcctatagacctcaattctatatttgaattatctaaatatctttgcagactgccatgttcattaggttggtttgttgattttcagtatgatgctctctctccgttgaccttattaattattatgtaggtttccttctccatttttacattgtgcggtgctgtgagaacattcagagctgctgttggtactggtgttgcagcgagttcattttctgtgtcttcgttatcctcagataaatgtttggaatcactagcagcattgttaagttcccagacattgagggatgctattcgtacttcaataaactcaatgccagaaggacagtctagtcgttgcattgaggagctaacattagaccttacaggtacattgaagtggatgagaacttgtggccttttggatgttaaattggaagtgcagggggaatcatccttggttacaagggattcagtgtttggtcagagagctgaacttctaggaaggcatttatcggaaatatacacaaatgtgctcgagtcaataactgtgaccacatcaaatagtacactcgttgcaaaatctgttgaaaggttggttgatgcaatcagaccaaatttatgtcatttggtgagaaatgaatcaaatagttcaagtgagtttgtttactcagttataggaaagcatatctctaacaaacaaggtgccaactggcagaagatcccaagtttatcttggctttatgtcttcttttttcgcatatatatgtcatgtagaagtttgtatctgcaatctattggcctcatgcctcctgattcagcgatagaagcaacagaactagtggggaattcattcgttgtatgctgcgggaaggaatggaccaattcagccaatattctcgcagaaggctactttgcttggattgtccaaaattcattccctctttttgatgctatcgagattttaacacaatctctttcgagaaattgttctgggtttactctgcttgttttcatccttcatgtgatggctctgcagagactaaatgaccttaacaggcagattaatgcttttgattttttgcttgaagatgatacagatcaatttgacaaggagaatagtgaaggcactgagttattaaagaagtctagctgtctcgaggccacacaactcaccagttttatgatgagctatgtgagactattatcatcaggagaaaccggctctttttggtgttatgagattagttcttcctgggattcaagtctatgctctttagatgaattttcatttcctatagcaacttggcaactgctgtgtgaaaacattgatatttggagcccccatgcatctaaaaaggatttgaagaacttcttttctaatctgataaagtttgcttttgttgaaaagaggtcatgcaaagatgtggagaatagtggcagccaatcttctcaccgagaaattactctttgtaatgtttcagtgcagctcctttgtgatactattatttatgaccgaaaggtatgtcctctcttaatccttccatccaaagataatatagtaccatttatctatgatttattgagtatgatgacaatattgatgtgctgtaataatgatcaatgttagtctttagttctatgttttggtgatttctttcttgtgccctctccaaattgcttggtctaatgcaaacttacaacttcttaggttctgttgaagaatttggtgtcaggtttttgccatgctctgaagaaatcggtattgtcttttgttactgatgctaatgaagataatgacttgttggactcgccacctgatttggtggatatattaactaaactggaaaatgagaagttttttagtacaaattctgatgttacacacacaaatggcatagataaactatggatttgtgagaatttacttaatttttttagtacagttcctggatttcatgcaaactccaagtcattgttgcaacttatagcttacattctccatctggaaaggtaagttcgcattttatatttttgttcatgtgtactaactacaatggctattccttgtataatcatagtacaaatgtatgcacgccctttgtttataagtactaggcacttttgactgagagtagttcacaaatagttatcacttgttaatttccccaatgcataatttttcatgctatgctctatatcattgccgttaattatttgtctcatggcagtaattggagggcacaaatgtgaaacacttgagacttgagagaaagtgtccaatgtttatttgttcttatgaagatcttggtggtctttttagttgaacttcttgtttattacaacttaatttctttctttgtaaataattgtttctctgggttatttctagtggattttgtgttgtctttattgatattggggttctctagtctttttcagtatttcctttttgttaataaggcctatgatcagtttttgatgcaacgaattgtgatggtgaactgcgtgcatcctagttagtcaaaatgtcctgggaatctgtattgacaacaattttgggaaagtgcatggtgatatgcacattgcacatttcttagctgcaactgaaatcttttggttatctccttgctgagaatgacattttttcaattttcttgcagactgctgctattggcaatggtatgccatcgttatgaatcttgtaattccatggggctacttcgtctgtttgtatgctgtcgaagagcaatgaaaaatcttatcttcaattttggtaaagaatttccagagttgaagcaatactcagcattttccaaaatttttggtggctcctgtctgatttggcttttgaggtctgttcaggaacttgtcagtttgtcacacaaaatatttgaagagcacactgatgagatgaaaaatacaattttctccctggtagataagacatcagaaatattttcaacactaactaacatgaattctgtattttacttgttgggtgcaaagaaacaaatcatatcttccagcggagaaagcagtactccaaaacatgatgatcaggcattcagcatactagaaaattcagctttggagcatgtcaaaattatggctgaactgttagagaagtctacaactggcattcctgtaactgttaagggtagtcagtgtgttatcaaattagagaactgttatgacactgtatgctgggatagattattatgcaccatgtcttgcataagaggattcttgtggggtcttatttcagcactagaaggcacatgcaaagattatctatcaagcccagaggaaaggaacgtgatgtttcagtatgcctccagattcagtgggtgtgttgctaagtttgaggcctttgtagatatttgcatgcatgtcttgtttatggagaccaaggattgcgagttggctgatttaatctctgttcatcttccacaagagctggactgcgagaacaactctctgaatattactgcaatcatggatgaatggactaggcaccaacctgaggagatcggatttcactcagatggtgtactaaatatttcaactgagactcgtggttttgatctgcccaaagtacaatttgtgaaaggatttcttttagaaaaccttttaagtggtgagggtccatccatagcatttactttaagggagctctacaatgcatctgctgctattgttaagctgaagggaatcctatcatttccaagtgaggtatgtagacagatatgcagtcctttccaaaagcttccattgggtccaatggttgcgacagcttacatcgctctacacaaattagcagacatgtctaactggcctgacatgttttctcttttatggattgacggaatattaagttatcttgaagctgtaggaaacattttggcattacctgagatcaacatgtcaaaagaattgtacactcaagtagttaatgctcacttgagagctattggaaaatgcattttgcttcaaggaaagaatgcaactctgcctacccatgagattggatcaagtacaaagacactatatttgcagaatagatctggtcatgttgttgctaaaggtatcatcaataggcagaacagattaaattcactgaaatcaagacttagactatcactgggaaaatatgtcaatgtttcatcaaacatgcatctaaatacagctgtgcaagtcattgaaagagcattggttggagtgaatcgtttcagtcattcaatatatgaaataaacacaggaaattgtgatggtgggacagtttcttctgatgttgcggctgggatttattgcctctatctggttcttgaaactgtgccaggttagtagacaattttctgtctggtacttccagattcactatgtttgtaatgcaatgtggttccatgcactgcttcaaagaagtcaataatctactaaatattttcaaacatgatctcatgtgcaatagaattgtctgccaacactgagtgtgtttgacaataccacaaattatcatgactaatctgtcttttcaaatatatgctcaaacaccaactagttaatatcaggtaataagcatggtcctcataaaatatatgtaggtcttcaataattaggaatttttcacagaaatgcttgacacactccttttcatattcatggcacctcttttggtagcatattaatatgctgtcggttcttgtcagtctaaatagactatcgcgttacatggacattgtccagaatgcatgaattattctcaactgagtggagtagttgagcaattcaggatggacctacttctaccagttcacctccacctgctgaccctccaaaatttaactgtgtttgcctcgatcttgttttgctcatatgtatgcgtatgaggatttgg

SEQ ID NO: 2983 - DNA, 1032 bp, Oryza sativa
aatctaattgctctgagggcaaaccaccaccattgccatgattccggacaagcgaccagaagattattgatagtctcgttgcattgatcacaaaagacacatcgatcaaggtgtggcaagccgcgattgtggagctgatcggccatccaacatctattgagatccaccaaccacatgaagtaacgacatcgaggaggcgccaacgacctccaaatcggcttgtcctagaactgcaccctttccagttcccacaaacagagacaggtaggcggaatatgacgagtattcccctgaagactcccaccaccagatgagggaatcgggctccttggagaggtcatccaaggagtggattgcaggccacagattgagatattcgaggattgcctagacccctaaggcactggtgatgtccttgatccatcttctatcttgtagtggcaaatcattttctggtaggtttgggagtgttgtcttgcctgaatggaatactaaatagcctaataattcgaggtacaaacaaatgtattaagtaaaagaatggtttaaatgtaatattttaaataacttatatgtaacttttaaaaaaaatcacaccaatagagaacatgtatattcttattctattttattctcggggaaagaacacaccttaacagtttaggatttaagaagaccagctgaatacccgtgatatggagtacggatactcatacacttcaactatgcaaggaactgcagcagcggttgtcagcaaatagtgttctgctttcatatcagagattgagatttcagagtgccggatgcccggaacatggagcttccagtgtttatcagcaaatgtgttctgctttgatatcagagattcagaatgccggatgcacggatctatacagacgatttcatttcatttcatctttttttctttccctaacccgacgtcagagtcgccgcaccctaaccggaacgccgtgctgcgggtgcagcgtcagcacggtgtagggcgcgtgcgcgtacgtgatgaactgctgt

SEQ ID NO: 2984 - DNA, 515 bp, Oryza sativa
acaagtttgtttttctgaaataggcttaggacctcctcccttgcacggtgctgccattctgggggcatgcttagcacaccatggtccatgtgaggagtatcgctgtcgtctccatccctgcaaaatagaacactttgcactcttccatcacttcttcgatggtcatccccgggcctgaatgtccattctcgtctgcatgcctcgtgcttgactctagtaatatcccgagcaaatcatctttggttctctcgccatctttcatagcatgcatccttttctggaccagatctcgtataattgattcaacctcgttcttaatttgatacatccttcggttgtttttggtaggcaaggacctgaaagggcacaccgcttcagattttcagtacagagaggaactacgagtactgaataacaaacatttaatttcgatagaaattatgtataactgtaaggtctggttagtgttacaatagaggcgtggagcataaaccactaaatcagtgttgatgaac

SEQ ID NO: 2985 - DNA, 2064 bp, Oryza sativa
aacgtgtttttaagagaaccgtcccaggcctaattggtgctttattcaatattgtcttacatcttgaaagtccttttattttctacacagagaggatgcctgttcattacccttatttgcacccagatgctggagccattgtcctaatgtgtattgaggttataacagcatttgtggggagacattcttttcaaattgattcatgccatgtctctcagtgcttgcatgttcccatgacactttttaagggcttcaaacatcttctttcatgtcggaatatgccccattcttgcaaccagagtgaagagcaactggcagctagtaatgaatatatacttgatagacaattttcagttgacatgtatgcttcatgttgcaaattgttatgcactactattcgacaccaacagcggtaaaatattttgcctctcgtattttcattctgtagttatatattattattttcattccatattgttatatttcctccttttatgtctagtgaggttgcacgatgcgtggctgtcctggaagattcagtaaacatacttctaagttgtttggagtctccaaatcccaaaatggttagtagggccggttatttttcttggaacatggaggaatcaatgaaatgtgcttccttttttagaaggatttatgaagaggtcagtgatgcttatatttctgttatttgagatatatgtatcaatgtatactccctttgatcacgtttagtatgcgatgcacctactccaccattagccgcaacgtaggatgttagtatccaaaaaagagtatataaacatgaaccccgtagaagaaatggccctgtggacaatgtataccatatatatttaaggttggtaagccaacaaatcatatgcacactaattatccttttttgtggacaatgtagatgcgccagcaaagagaactcctaggaaagcactcgatgtactttcttgcaggttacatttctatgtattctggacagggtccatttcagacaggcataacacggtatgcccttcctaatgaagctctttcatttatgctttggatcagcaattttacttttcttacatcgcagagaaattgatgaggccttgagacctggggtttattcgcttatcgatatctgcgaggaaagtgatcttcaactgctccacacatatctgggtggtcagtaactcctgcttaaccttttcttaaaatgcttaatctatttacgaataaacaaatgtaactactataaatacaaactgatccccaagataattccttttttcattctttggctttgcagagggtccatgccgaacaacttttgcaaatctggtgcaggactacaaattacacttccagtatcagggcaaaatctagtcaaacttgctaaaggctttttggagcatttgatgttgatccgtcttattctgcataagatatccaatgcatcatctgcatgatcttgggtttgtgctgtactattaattgctgactgcttatgcactgaattttcacccttcagaacggaaagggaatatggctgttgctgaaggtttttcaatctacccttttaacttaggagccaaacaaacaggatggttctgaattctttcctttattttgcagatttaaagctcatcaaattaatctgctggatttggaacaagatgaaaaggagcaaacaagaaaatgagcttagtaatcaagatgagaaggacttggtgatctgcagcctttggctcttgttccataaatcacaacttggtaatctctagcacgtagtgttcatattctggggtaatatttaacacacttgccccccaaactaaactaattcttttggaaggtagttcaatcagactgatcctatccaggccatactccatattactaaaattgaatttgttttcaccaaaggtgctaacaatgataaagatgatacggttctaaatgaggttataatttctccgaagggtatgtttagatgggtcacaaaatgttggtggagatgtactccaacatcgtatgtattctggagaaacttattaaagataagtc

SEQ ID NO: 2986 - DNA, 1783 bp, Oryza sativa
tcatgcgcacagagatcagaacatggtacaaagacactgaaaaaaacaagataattgatgatcaaatagtggcatttctagatcaactgtacgatgaacttaaagttgcataacaacaatcaaatcttggatgtgttcgccgaaaaacaaaacaaaagaaaacaaatattgcagaagtagagcgagtacagtaccgtgttcctccaaggcacggtgaagcagaggcgcgacgcgcgggatgaagtcgtggggccggtccatgggcacgggcttggagcgggccgccgtgacgagccgcaggtcctcggtgaggtcgccatggaggaagcggtactgggtgcccctcaggccctgggccctgagggcccgttccatccgccgcggggccagccaggcccactccagcatctgcgcggcccagaccagcagcagcgcggccaccgcgccgccgagcaggctccacggcgaggcctcgccgaatggtagcgccgcgccggtgccggtgccgatgccgatgccgatgccgatgccgatgccgatgcccattgcttctttttctctctgcatgtaccgagcaaagcaaatgtgttgttgaagcaaacgggacggagagatcagtacgtgtgtgcagagtgcagtgcagatatactaaccaattactaacaaagtaacaatcaatgattgccttctcctgttctccaacactaaaaagaaaatgatatcctaaaaccaaaaccggaaattagtgaccatcctgtcccacagaataactccgaaatcctatctgatactactgacgtcactgattacggtagtgaatcactccacgtgacggcgccacgtagccggaggtgaggtgaggtcacagcgcgacctccgccgcattgccacggtggaggaattcagcaagacacgtgtgtgcagtatgcatgcagatgcagtacctggtaccttgtacgcgggcgaggcgtcgccggcgtcggcgtggtcgacggtgctcaggttggagatcaacgaagggggaggccgagaccggccgaacgagcaggcggggaggctgggggctgccagccggtgagcgtttgggagaaaaggcgaatggcgccggcgccgccggagagatgggaagaaattaagatggggggaggatttggaaggatctcaaacagaaaagacgtggctaacataggtgtatctcttgcaggagcgggacaacgacatggggagcatgggcgccgctgcgcatgtcgacgcgacgcaagcgggggttcacgcatcttggcgtggttctacgtgcctcgggcggtggtacacgactggcgctttgaatggaggagaggatgtatggttgcaaatcccggagataccgcaccgcgcgatagggccggaggaaggagaagctgatccaaagacagaccccccaaaatgttcagtcatcagtgggcctggaacggaaaacatcttccggcccatcaaacaccccatgttgatgcacacaggctataaccaacgaggcccatggatgcgtaaggtttagctgaagttttgatttctgggctaaaccttctgcttcagacgttctgatttctcaagctgacgctcgaacattgtgtttttttcttttaagaaaagaacatttgtgtcattttacttttttttaaaaaaaatacatacagagatgggcatgtcgcctacgtggcaccgtcccaccaccattacactgtcctccacctcactcattgcactcacagtcgtcgtccatctgacccttccctccaaaaaa

SEQ ID NO: 2987 - DNA, 833 bp, Oryza sativa
ggggcctcgggccaccgttcggctcgggggcctcttctccctgctctctcccgggtcgagtcgacacagggtggggatgcgcggagtgagggctgtcctcgtcgcgctccacgaccaatgccgcgctgaccacctgcggggttgccgccaggtagagtagcaacggctcatctggctccggggcgactaggaccgggggagaactgaggtacgccttcaactgagtgagggcccgctcagcctcctccgtccaggtaaacggcccgaagcgtttgaggagcttaaataggggtagcgccttctctcccagcctcgatatgaaccgacttagggcggccatgcagccggtgacgcattgcacatccctaagcttgctggggggcgcatccgctctatagctcgtatcttctcggggttggcctcgatgcctcgggcagagaccaagaacccgagaagcttgcccgcaggcacgccgaacacgcacttgtcggggttcagctttatgcgagcggagcggagactttcgaaagtttccgctagatccgagagtaaggtctcttggttgcgcgtcttcacaaccaagtcatcaacataggcctcaacattacgtcctatttggctacccaaagaaattcgagtagtacgttgaaaagtaggacctgcattctttaacccgaaaggcattgtcgtataacaataagttcctatgggggtaataaatgcagttttttcctcatcctccctagccatgcgaatctgatgataaccagagtatgcatctagaaaacacaaaaggtcgcaccccgcggtggagtcgacaatgtgatctatgc

SEQ ID NO: 2988 - DNA, 888 bp, Oryza sativa
ccaagttgttcttttctttaacaaaaaatttattcagtcatttgctaaaaaaaagctatatctaattattatggttgattaatgaacggctataagttacaaaaccacagggtatttagctatttgtcattattagagttgacgtttaactatttgtaattcatgtgttggatcaggtgtggtaaatagttaattgtcacatataaggatggtaaatttagagatggttgtctttcttagagctaaactagaatctctgagatgagcggctgattattgttttgattaaactagtatggtggcccgcgcagattgcacggctagtatcattatatcttctctcatataatagcatatatgttttctcaacgtattattcaaatatattaaaatgacaacataattttaaattttgtactaactttacgaaactactaatgtgtaatattcatattggattttatatacgtgttagttattaattatttttaatatcaaactttagtaatttataaattatattcctatatggactctagactcgtctttcaatatatttttttaattccgaattttcgttacctgtaaattatatttctatatagactctatgctctttttttaatattatttatttttaattctgaatttttattatttctaattgtatttctatgtagactctaaactcatctttcaatattctttaatttttaatttcgaatttcagttgcttctaaattatattccaatatttgtattcctatattgactttaaattcttcttccaatgtttttttttaaattttgaattttagttatttgtaaattgtatttttatacagactctaaactctacttttaattttattatgtttattccaaatt

SEQ ID NO: 2989 - DNA, 1030 bp, Oryza sativa
agggggtacactttacccacacgacattactaacccggatcacctagcccgtggggatcagccacgtcgggagacctccaagctttcatgacaaggcatttccaaagccgacacaggtttaccatatgccgacgagaggggtcccagaccaacaacaggttaggtcccagaccatactgtgccaggaagcccaggggtcctccctgacaccaccccggcgaatccacatgtctctcggcatcaaggctcccctgataagctagttactcagccaggggtgttccattccacccatgtggtcgtacttgtcttatgtttggatgaaattccaaggaaacggtccttaagtgcaagagcgggaaaccgtacacccgatacgttccccggtccgctgttttggaaattcatttagttcgcaagcaccgacccaggtgtcgggttttccaagtctttcgtaaaacccaagttttacccaagaagttttttagattttaagtttgaaggcgtccgtcgatactcgcacagggtgcacgaatatcaagacgcaactagatggttacaaggggacacgatataacaattatcaaaggaaggatcaaatgcaacaaattaggtaggtccgccaatctgccttgcaggcgagacaacagattaagtgcgatcctatcaatgcataatatttttaaaaaaacataattaatttcaaatataggctcaagatgttcaaaggtggcttgccttgctcgagatctggagcttgatcctcgaaatcctcgcactgcgggtcttcgggctccgaaactacacgcgaaacgggagaactcaacaaacggcgaaaataaagccctattaatgacctctaagcatgccattagatagatctcgagatttgaggaattttggaagttgaacggagtcaaacggatttacggttgggaagatattgaatttctaagattattgaatttttggtctaaaggaaaaggatttcattaaatcctttttgaaaaagaaaagaaaagaaaagagg

SEQ ID NO: 2990 - DNA, 544 bp, Oryza sativa
ggactctagtctcctcttctaatattccttattttttaattccgaatttcagctatatttaaattgtatttctatatggactctgtcttttctttttctccgattaatgtgagaatttctaggccatgagagcgaacttggaggttcctttttctattcctttaattatatatttaattccaaatttctttctaaattgtatttctatatggactctagtctcctcttctaatatttcttatttttaattccgaatttcagctatttttaaattgtatttctatatggactctgtattttctttttctccgattaatgtgagaatttctaggccatgagagcgaacgtggaggctcctttttctattccttaaattatatatttaattctgaatttctattttttcctaattgtatttctatatggactatatagtctacttctaatattccttatttttaattccgaatttcagttatttcctaattgtatttctatatggagtctatactctacttctaatatttcttatttttaattccga

SEQ ID NO: 2991 - DNA, 661 bp, Oryza sativa
ccgttttcgtccctgtcaactacgacggggctacattttctcttgccctgtttcccacgtggtgaatttatccccgcggttaccccatccggtggtagttagcactcagtagccgtcaggggaatcggtggcgtcgaacggcgcgagggagggcgctaacggtggacggtggacggacggcgcgacgatggcggcaggcaccaggcggcgcgacgacggctacaggctccgcacccgcgttgacggctggggcgggacagcgtctgcatgagaggaggcggcagcacgcgtgcctgatggctggtgcgatgtaggcgtgcagcggtgagactaagtttagatatgaaagatgtggaggttgattggttgactagggttaggtgttatatatacatgttaattgggtttcaatattatgagccaaaacatctaacaaagtctagaattagtcctctctacagtgaaggcgagtcaccgcggggggcgaggacggtgaatggtttcacccagggttcacaaagctgacgaaagctggtcggtttttgcggcttttcgacgtttcgacatagctccgaattaattttcgattggaatttcgaagttcaaaagtaaatcttgtcgagattcagtcggaatttaacgaaaattggtcgatttattg

SEQ ID NO: 2992 - DNA, 1164 bp, Oryza sativa
ttagtacctaatccggtggcttgatcaaacaggaggccgacttttgtgcaggcatccttccccaaagggtgacaagaaccctgtaaactatgtcttgggtttgcatggtgcatgagctaacgacaatgattttttctgttaaaaaatgggttaacgacaatgatccagacattagaggtagtttttttatttgacgaagataacccactcctgaatcctgatagacatgagcacagcaaacactgggggttgttctaaaagcaagatggcaagatgcatatatatgacctgtcataggtcaaatgcttcattcagagttcagacacactcaacctgcatagctcatcctactctcttaactctcaatctctcccagcttcttcaaaatttcctgcgagacaagatgaggatgtccaagttgtcaatgctactgctggatcttgctcctggtagtgatggccatggaggttgagggcattcgattggatgcagaaactcgcgcagcaaccagcaaccaaatggtcaatgtaagtgattctgattcactgaatttgttcatcatggaattgtcttctgttcctttttcttttctttttgtatgtgtgtgctgacatatttgttttgttctgaaaaacagaaatcgacagagaatgtgccaaaggattccggtgactcactaggcgaggcgaagagaagcattgctgggaatgaagttagggctgtagcacacaagttacctgagttccatgaagactactatggtcccagtgaccatacacctagacaccactgaagagaaaacaatctttttttttcttcttctcaatctttttgttcagaatagattagatattagctagtcagcggctgcaggttgtagtagatactgaatttcatctgagcttagttagtaagcacatgatggtagcaacatgtgaatctttaacctatctctttttcccctccttttcacctcattagtgaaaaggagcggttttcatgtactgacttgttgacaatacttgaaagcaacaatctcaagacgttgtccatatctttttgtgattgtgtttgttcccatgatcagcgcatagcttaatgtgacgattacaaatccacaaggatgtcaataccatgatgtcgctgatataactggaattgact

SEQ ID NO: 2993 - DNA, 700 bp, Oryza sativa
aagattatggttggtaggagatggatgagttcctgatcatcttcttgctctaaaatggaaggtttccaatggattccagcttctgaatcttgcagctagctaggtaggtaggtagctggtagcttagctaggcagtcaggcagatggtgtgttgttgcttctgctgtgatcgctcgcatacgtagataaggttagaggttgatcgctcggtagatggtactgatggccgggatgcttcccggagtggagtgcgcgcggcggcgacgtctccggcagggcggcggggaggcgccgtgcgggacgcggcggccgtcattgtgcctgtacgccggcggccacgaccacgccctccttggctcctccgcttgtaaggtagagatttcgagatcatgaactaatgttacatcttttttaaacacaaatacaggacaatcatagatcagatattgaatttgaaatcgcggtatttggaattggaattatgttgcagcagcagaggagcgcgtgcgaggagcagcagcccgggtggtggacgctggacagcaacgtgcgggaggcgaaggagaggctggaccagaagctgcggagccagagggaatccgccgtcgtcgtcgtcaagaggtgctcctctaatactccctccgtttttaaatgtttgacaccgttaactttttagcacatatttaaccgttcgtcttat

SEQ ID NO: 2994 - DNA, 1095 bp, Oryza sativa
  unsure (1)..(1095): unsure at all n locations
tcctgcagccccctctggttaccttggcaagaaggcgacgacggcgatcccaaatcctcatgagtccgtcctcgaccaacacgcgtgagccgttctcatccagctgtcccacgctgatgatagaattcctcaacgcggggatgtagtagactccggtgagcagcctgtgctcaccggacttggcggtgaaggtgacggagccaacacccttgatctccacgccggaggcgtccccgaacttgacggtgcctcggacgctggagtcgaactcggtgaagaactcccgtcggccggtcatgtgatgggtggcgccggtgtcgaggtaccacccatcagccttgtcgttgctggagccgtcgcagagggagacgagtaccttcggctcatcaaggtggaggaaagccgctgcggccggtgccgctggaggtagctcgatgcttgcgtgagctaggagcagagccggctcttcctcctccacccgtgcgacgtgggcctggccgcgtcgtggctgtcgacagtctttggcccaatggccaagcttgccacagttgcggcaggtgtcatctcgtgccggcttgtggttgccggtggcaacgccctgggcgcctctgcgggcgccaccctcggcacgtcttcacgcccaccgtagctggacacctccccgcgccttgcgcggcttatggccgcctgtcggggaagatgactcccccttcctcccgtcaccntgagaggcctcccactgctcccgagtgagatggagcttcccgccgatggtgatgggccccgagagaggccgtggctcatcaccatcgacgaccttgaggcgacctaacgcctcctcgatcgacatcgtggagaggtccagcagagattcaatcgagcgagcgatctcctgtacttctcagggacgcagcggaagagcttctcgacagctctctcctcgtcgtaggtgtcgtcgccgtactgcaccattttctgcaagagagtgttgagacggagagcaaagtcatcaacatcctcacctggcttgaaggccaggttctcccactccttgcggagtgcctgcagtgtggacttgcgggcgcggtcgctgcc

SEQ ID NO: 2995 - DNA, 878 bp, Oryza sativa
agcttgacgcgcgtcggggaggcggagcggtagtgcgcggcggagaggacgtgcccgctcggccgcctcgtggccgtcgccgctgccgccatgggagatcgccggagtcgggtggattggggagcagtggcgacgagaggaggagagggcggtttttgtgcttccgggttggtggttttggcaaactgagcggaaatggttttggcggttatttatagggactggttggggcagttccgtaatttactgccggttgggggtgggcccggagaactggtccgggcaggtgtcaaggaatggtggttaggtcaggttaactaactgtagttaataaagctgtgtgcgttgggccccacatgcagcacaccgaaaggctttctccaaccggtcccacattcaaggtaggattccaaacttcttgtttcattgcattcgtcccataatcgtgtatttccgtatctaatgtttaagcgtccgtcccgtttaaaaagtttataaaaagggtgtagctatatttatggcgccatatttttcatcaaaaaatagtcggcatgtatttacattgtaagttcctaaattacatatgtaattttagtgtatttacaatgtaaatctcaaaattacatatgtaagtactaaaattacatatgtaaatttgaaaattacatactaattacatatgtaagtggggtgtaaatgaggtgtaactactgtgtaagtggcggaaaaaaaatcgactatagcatattgcgccatatttctagcaactccgtataaaaattaaaaaatcacatatgaaatactattcatttttatcatctaataataaggaaaatattaataattttttaaataagatggacggtcaaatattggac

SEQ ID NO: 2996 - DNA, 2045 bp, Oryza sativa
tgtgcatccaaaactgcaatgacatagatgaatgagtgatgctagagctcacggtgccaaaaaagtgtggagtcggcaaactgataaaagtccccaatatcttgaaaacttccttgcaactttgttaaacttaaaactgagtggcgatggattcatgtcggtcagccggtcaccaacaatggtgcaacatctaatttggaggactgaatactgttgttctctagcctccgcagcactgtagcattcaaaaattggatttagttcaaatatgccaacaacctgattacctgaataatgttgctttctagcctcttgtagcattaaaagaaattggatttagtagaaatataccccttcactctagggtagtgcagaatattccattgattattgatctgtactggagaccaggcgtttagtacatttagtaaattcggacaaaagttagatgaacaacttatgtttcaggggaaaataacacgctaacatctcataattcaggtttagaaaataaaatacacccatattaaagtacagttacaatatatttgcttaggctaggaatttagtcacaacacctttcagaatcatcgtcccaaggccgatcgcgatcatcagaatattcagaatcacgatgctatcttcttttgcttctatcacggtgatccctgtggcgatcatggtccctatcattatcaccattttttaaaaaacatgagaactcattctgcaacacagaaggtaatgggccgtaattttgtaaacgtgcgaggaaagggaccaataaatataatgagaataagtgaatagacattttggccccaaggtttgcacataaggaagttgcagcatttttccaaaaaaaatatttcaagcaatgtaaatctagaggatatttttgccagcctaacgatgaggccctcagctaacatatccccagtgcagggttgtcattttaaacatatcagaatatgctactgctcaatgagcaagttgattgtaaagtgtgacctattggaaaacaaaacaactttacaatgagcaagtagattgtaaagtgtgacctattgagaaattattggctgaggaggatgaaaacaattactttaactcgtctgaattgctagaattgacaattaaacccatcttaatcctttgggcatttcatcaaacatatgtcatgcacgtccaaatttgcaaaatcgacagaagcaagatcagaaaccacctttccacccatatgtggcagcaatgatcttcacgttacccatctcgtatagggaggatctgcacaaataaagcagtaaaatcaggagccaaacccaccatttaaaccaaagacatataatcagtagatttacctcttttggtggaggaatgattctcagtatctcacctgttgttgccgggttggtagcccgatccgccagccaaggactgaagaagtagaagctggtggatgcggtgcaatgaagaggcagaaagaggtagcagccaggcagcaccgcggtagtaatcactgaaccctccctcgagctcttcactgctcgccgttctgcttctccgtagcacggttcggggtggacacggaaataagcaccagtcaatcgtgacaccactcgaaccggaaccctagccacccaatccccgcaccgcgacactcgaatcggagcccaaacgacgccgtacagaacttcaccttagaggggagaaacttcgagggaccctcaccttcgatgatcatcgccatctccacgagcaagtggcggcggcaggcggcatgacgatccgacgacgacggaggggcagcacgtgagggatgcgacgacagcggaggggcggcgcgggagaggagagaaatcgagcagcggtggacgggggatcaaccgcgcgcgggtggggcgtcggcgtcgccgggtgagtgcgagagagagaggagggaagagccgagcgagacgcgggagggtgaatgcggcgtgatttccggcgtgaggaggatgggtgcgaggaggggaggggatgagagggagacgtggggtaatctg

SEQ ID NO: 2997 - DNA, 578 bp, Oryza sativa
tgaagagaatgatatagtgcatggatcacttgtagttgatggacgagaaaacgagaatcagactcaacccgagaatagtgatgggcatgccgatatgaagagagcttatttgttggatcctctccctccatgtaatatgaccgccagtactagtgctgcaaaatcacctgagggctcagaagttcagcaccacaattcaatgttacattcaatcagaactcccgagtggcctaagaacgatagcgataaagttatgacgcaatacagtttgaattctgataattcaaagtgcaaaatagatgattcttgtactggagaaacctcgaggtcactccaaaatgaccttttgatggatgaactggttcctgacactgctgtacaaaaagaaaatatgatccagagaactacggacttatccacatctgagataaactatacgaaactgaacgataatgttggtatatatagtgtgtcagctagtaatctagaaaaggaattatctcttctgagacaggaacaagaatatctcggaaatgaaaggcggaagcttgaaagccacgcagagtctgtcagcagtg

SEQ ID NO: 2998 - DNA, 1731 bp, Oryza sativa
gggaaggcgtgagaggtgtaaattaatcactagtggacgttgacggaccatcgtttcgtttattcgcgaaccgtaaatgaaaagtaagagtgaataaaaacttttatatgtgtttctagtgatctagaagcaaagactaaaaaataaattttaataaaaaaaatcaaaatcagctctaaatttaaggttgaaaattttaaatttttacggataagtattagcataagcggaaagatgaggccttctcctgcgcctaaattctcctccaaagttaaccaaactctacggtagagtttgagtttggttgctgggatgggatggaatggaacaggatgaacccatttttagaggtgtttggttgaggggtgagtgggatggattggtcctggagaggaatattcttcttagatccgggaccaactgatccgggaaaatatgacggaccaacttgggatgagcaaacggcgtcacaacggcttctcgcgtgctcgccgccctgctcgccgcttattgtccgcgtgctcggcgtgatggtggaagacagctcgtgtgacagcaacggcgacgggctcagcttgggcgacggcgacgatggcgggctccagtggtggggagggcgagggaagcggcggcgggatcggcgacggcagcgggtggcggggtgctcggcgacggcggatccagcaatggatcaggtgcacggcatgagcgtcgtccttcttctccgcgtgctcgtcctcccgctgctctctcgcaagcagccagcctgctcgctggccgtgctagctctcccggccaccggtcactgccgattggtccgattagagcaggcgatggtggcgctcgacgaggactcgcgctacctcaccaaactctcttgacggtaactgcaaacggcggccattccatcccttcctcgccccttctactaaacaaaaaaaactgggttcattccatcctttaaatcaaacatacgaatggaatcatctcatcccaaaatctggaatggtatcatcccatcccacctagtcccagaatcaaacacacgctacaagattaggctttggtttcaggtttagggtgtgtttgttcacgctaaaattaaaagtttaattgaaattgaaatgatgagacggaaaagttggaagtttgtgtgtgtaggaaagttttgatgtgatagaaaagttgaaagtttgaaaaaaaagctggtaactaaaccaggccttagttagggtcgtgtaagctacggtttagccgttcactttgtttgatacagttacggatggagtaatattttctttaagctggatgtttttagttttacaaatctaatatggatctgaatatatgatcatataataatattttgataaactattctgtttcacttataaataatttagcatacaaatttcaaatccagtataaataagaaatgtgaagttgtactaaacaggacctgtcttcaataaacgtatgataaaaaagattacggataaaacatttatatttataatcttttaacggtttgaaactttaaaagcaaatgttgaaaagatagacttttatgaacccctaaaatcaactttaaaattaggcttcaaaaattaaattctgtcaacgactgattaaaccaacgcaggcttgacttcttttctgaagacgcaggaatgtcgattggttttcagagtttcttcatctttctcttaaagttcaagaagcttgccagag

SEQ ID NO: 2999 - DNA, 1150 bp, Oryza sativa
tcctctcaaactcagaactttttagttcccaactttttttaaaaaaaactttcaactttaaactttcctacacacaaacttcaacgtttcggtcaatttctttaaacttttaattttaacgtggaactaaacacaccctcaaacgttaattcagagatgagataatctcatctcatgaatcattaagagccatcgttttgttattcatgcggcttatctgaataaaacttttatatatgtgttcttaacgatctaaaagtaaagattgaaaaataaaatttgatgaaaaaactcaaaatcaactttaaatttaagattgaaaattcaaattttggctgataagtataagcatgagcgaaaagatgatgcattttgtcttctttgatttattcatgatttcttttcattttctaatgaggatgaaaaacttgtctggttcatttctttattgcggagaagtggcccgagtagtaattgcaaagtaactcaaaacattttcaagctgaaactaacccaatttcattctctaaaactgagtaatggggattccttataataaaaaaaaagtagcagcagcagcgaaaaggcaggggaaacttagccgcgtaggtgaagtcaagagacgataatcaattaaagatgggggcaaaatcatctcgaaacttcacggaaaagaacagtaaattactcacagccacagacgctgacacgcacacataaagagcatttgctttcaggccaagcttcacggccgacctgtgaacatgcgcctctccacggagctaaacccatcatttttttcccacttttttaaacaaagattttcttttttgaaaagaagaggaagagatcattaaccaaccaactgaaaaaaaaaatcaagcatgcatgcttgatctgcatcagtaaaattcgcataactgaacaaaggattttgattgaatttaattgaactgatccattcattcctctgaagaaaaaaacacacaaaggagtacagatactagtagagtagtagaaaagcaaagagcacatcacacatggcttcctagccaagccctggatgattctgattctgattaccctagctctagtgtcactcgatgcgtacgcgcgaaatagtggcgtactatcactcgatccgaagagg

SEQ ID NO: 3000 - DNA, 626 bp, Oryza sativa
aatttttggtctcatgatacatgcatggaccatggaataacagtactgcatcatgatgatatttgtttgtagatcattcttcagaagtgctgataatttatctcctctcgcttttgtctgacagaagcaacaccgaagcgaattcttcagttgatgggcgtgaagggagttagcatctctcatatcaagagccatcttcaggtaattttgtagacccaggacttaccttttcagatttgtatgctaataatatacatgcatatgtatatatgcagcatatgctctttagatttgtatgctaatattagctagagatttgatccgtggctcaacctcttttttctctctcttaaataatggtcagatgtacagatcaggctctagcaacagcaatcatcctgtcagcctccagaagttgacatcagctactgttaacaacattagcaaacgtgagtttgtgaatagtgaagatcgctgcatttacgcgtcaggggatagaaacactgcatcttcagacaagaatacttacaccatactccgctgcggccgctcatcaatgtgagtgtgagagagagttaattagtcatttttcaattaatgttaattccaagtacatatgtgtgtta

SEQ ID NO: 3001 - DNA, 13356 bp, Oryza sativa
tcctgcagccctactaccatagtctagcactttaccttccattggactagatgctggaggaatcgcttgtccattctgtacagcatccaatgaggatggggaatcagaatgattgctgtcctccaacttcgatgaacttccaaggcatttgtcgggctgctcatcgggagtgtctgggataggaatagctgccaagtagatgagctccatcgttgtgctactgctatcatccaaatcactgaacgttgagtttttatcatatgtctcaatatcgacatactcatcctcgtttaccagttgttcttcagcctatacagaaagatttagataaaacacatttttatggcacgagtaacagctaaaagtcttaaagacaggtaaagaattgtcattcaccttttctacatatgcatttaagtcaaactcatcctctcgttcaacatactcttcgttttcttctaattctacaaaatcaggagcaaatgcactccaattctctacatgttccttggcccaaatgtatgctaagcctgctacagacactgaaacaattgtaggatctactggatgccaggcaatatcaataagagcttcctttggaccttcaaggatttttacaagacgtcctgatcggttccatatgcacaatctgtgctctcctttgcttgctgaagcaccaacaatccactcactatcaccactaaagcatggtgccttccacggtatctttgcgatagcatccaaaagttcacaagaaatagctaggcagcttgcaccatttgcttttagcttctcgtagtgactctcatagctaatgttgttactgcttattttttctatctcctctccagaacctttaacaggcagaagattatcatagactctaatcacccgatcattagagtttgtgagtagatatcggccatccctgctgaaaacaatatccttaactactgttccacctgggatgggaatcacagcatgtaccttgatgctttttgaatctataattaatatctctcccttggaattgcccacatatatcagatccccatacttgtcaaatgttgcagcagttggtgtaaaaggtggagaaccatcagaaaatttattgcgagtattaggagcagggaggttaccattatcagacagaaaagctgggagaactgtagtacttccagtgtttaaatcaacaagaataggtgcagacgagagagggcatgccaaacaaatagatggggtagatggaccaccaggatgaagacggacacttaacggagtctgctgaagagtaatgcgggcaatttttttctcatttaccacatgccaaagtgtcaatgacttgtcagtagcagaggcgagcaaatggtgaccatatttagaccaggccacacttgttataggtgcagtacaatctttatcatgcagttctcttgcaatcccccttgtttcaaagtcccagataacacaggtaccatttgcacatccagctgaaaaaaaaaatcaactgacataaattgttggataaatttgctttcagggttcaagtacaaagcagcagtccaccaaaatttatggcactccacatgaatgatgtttttacatctgtgtatagatatatcacaaggccttacaggtgtgcacaggttagtcttagaaaagaacaaaaggatgcattaaagtaaacagatcccttatcatatcatcatgttatacttatatgtggcaatgccaagataaatagagatgcggagacaacacaaaagaagaaaaggaactacttcaggctacaagaaatggctttggttactgttaagtgttaacagctaaagaaacttcaaacagattaaaactaacattaatcgtgcaggcatgcttcacaagcgcacagtgtaaaataaacagtctgtgtgaaataagaagataattacatatgagcacaatttaagtgtactgttacaggaatataaaatgggataattaccagcaaggagagttcctctgcggttgaatgctatgcatttcatactcccatactgcaagaactcctcaatcgtctcagggaaatccccctgcaaaggatctaaaccaacataacatagcagaggtcagtatattgctgcaaaattcactgtagttttatcataaaaaaacacaagacaatgctcattgactcttagcacaacatccgtaattgcaaaagaaccagttatctgaacagaaaatttcagaatttgatgcacgtagaaaatgcagcgccactagtaaaggcaccagtgcattcccaaatttaaccaataggccaatactgcaaatcttctcaaatcctactcctagataagcaaaacaatcgaaaatctgagcctaaatcttgaataccacttcatttcaatgcatccaggagacagaaaccagcaaaagcgttcactatagcacaaatacacgctaatgttacccacaagtcccaaaatcaccaaaagaggggggaaactagggccaaacagcgcagccctaattcgcgcaaatccgccctagaaacctaaaatcccacccaaatcggcggaagtaccgcacaaatcccccaaactctcgacctacccacccccgaatcgctccaatcaccgcgtccccgacccatcccgccgcccccacgcagaatgcgagagagagacgaaactcaccgactatagggacgttcatcgcggcggcgccaccccctcagcctcgcctcgccgcgccgctgtccccaggcggaggcaaccggcgaaccgcccccaagaaaacaccaggtggcgagagcgcgcgccacgccggacggaccagggcgagggctagggcggaggaggccgccccgctgctgctccgctacacaaagccctaggaagggaaaaacctctctctctctctctctctctctctctctctctcggcggaagagtgaggaggggaaggaggggatatgcgtttggagcacgagtccgaaaccggcgcgcgctgggccgaggcgaggcgcgcgcggggcaggggaagggaggaattcgccctgttatattctgattctgattattcagattttatttcgatattggttatggtgtaacatcccggctcaggacttaataagattaatataatactcatattaacaagttgtaacttctttttcggaagctgatgtctaaagaactccagggttaaacgtgcttggcctagagcatatgtaggcggacccgaacgctttgtctgtggccaagagggggacctgaggacaagggatgggtgaccgaccggtttcacgggcagagcaatttgaaacgggtgaccggctgagaaattcttcccgggtgagtgcacacgacaatttgggatgggtgaccgaccgaaaactccaagggatgggtgaccgaccggtttcacgggcagagcaatttgaaacgggtgaccgactgagaaattcttcccgggtgagtgcacacgagtgaggacaagtgatgggtgaccgaccaggaattcaagcaatttgggatgggtgaccgaccgaaaactccagggttaagcgtgcttggcctggagcaatttgggacgggtgaccgaccgagaaattcttcccgggtgggtgcacacgagtgagtgtaagttcaagtgccttaatttggtttcggtgattaatgacaaatctaattatatgagactaacgtttttatgagtctttttttgactaatcttatttggatatgaaagtaaaaatgatgggaggtatgtattaaacttcacatattctaacttggtctctcttgtggatccaaaatatagtgtgagctcccttattgatcttgattgattatgtgcatatgcattccttcatatccatatgtatgcacatcttgagagggagcttattctatattttgttcattataagatctctaccttgatttgaaattatctttcatctcatctctttgtattgtttatatcggattattatctatcacaaaagagagaaaagattgaaagatcttggattaaacaatttgtgtaattgttactttggtgatagatgataaaccgatgtttatgggattaacctctcttttctataagttttcaacaaggttatttcccgacaatgagatgtggtagatatgcattctttggtgatggactttaatcatgacaaggatgaaattcatggagataaagcgatatgtatcacttcttatctcctactttttgataggttcatatatatgatttccatgttattgttatataagtgtaagactaatatttacttagtctcctttacattgagaacatggagatcatgaaggtatgtgtttttttttatcttcatcattactacatatgccttctctatgtgtataggataaaccccccattggttcttctttacttatgcatacacttgtctctcttgtatatttctttgtatgcatatacttagggggagcaaatcctatatatttattgtgcatgttttagatccatattgttcacctattatttatatcggatctttgcacttgaacttgcatacgagtatatgacacttgtgatgttaatgaatactcaacaaacatatacatatctttcatatgtaaccggttggtcattaagtgaaggatgacaaccgatttgttgagactaatgttctcctttgagatgtgaaaaggaataggtcccactatgatgaggctaatggatgacaccatgggttaatggtcaccaagccaaggacatcgccatgttggcaagaatgaaatcaagcttgtgatgagaagaaagtcttaacaaatgatggtaaatatcttggtataaacatggttgaatcaaatggtcacaagtgttgatctcgactcaagcttgaccccaagatggatagcgcaaggcaaaggtataatgtagctaagaatgttttcttagtcttttcccggtcttggtgtttggtgtagaccggatttgctagataggcgccgtactatcaagaggggtctatgaagcgagcttgtggatgatcttgtgccatattagttcatatgcatgtgtgtgtatttggtgggcttgtctagccaagtgtggtgagttttctcaagtcctaaacaaagagagatgtgggcaaatcctataggtttgggtagcctcatgtggttatgtccggtggagtatcctttggagtgtgagccctttctccctgagaaaagttgtgtttcttagatggattgttcatgggttggatagccctttgaataagctttccataaagtccaagaacgccaaattccgagacccgagtcaagagatatcgtcgttttactaacggtcggttgagttgaaaagtgacctgcggtctgaccgtgggccttaggccggtcggaccgggcctgttagccggtctgaccggcgtggtaaggccggtctgaccggccccattggtctgttgcactggtttggtttttggtggcgatacagagccgccagagccgcaaccagtcagaccgagccgacggcggtctgaccgagctgtggacggtctgaccggccactacactgcggtcagaccggccagattgagtgggctcaatgattgccctgtaacggctagttacagggcaaaactagccgttacaaagtagtccggtctgaccggccttacaacggcggtctgaccggcagagcacaaagttggggatttcggttccaacggctagttttggtagttgggggtatatatacccactccccagcagtaagggtaaggttttggcactccattgcattatcttgaacccttgcaagagctctcacacccttgtgcacttagtttatctagtgaggtattagagagtgagttaagccaatccaagtgcattgcttcattgttataactagtatggcacttgatcatcctcggcaagcatcctagacttgttactcttggaggttgccgcctcctaaacggcttgtgtaggtgttgcccggtgacctctccgaggagattgtggaggaggttaagcgtgcttggccgaactccagggttaagcgcgcttggcctggagcaatttgggatgggtgaccctgatgtccaaagaactccagggttaagcgtgctttatccgtggccaagagggggacctgatgtccaaagaaactccagggttaagcgtgcttggcctagagcaatttgggatgggtgaccgaccggaaaattcgtcccgggtgcacacgagtgaggacaaagtgtgcactagagcaatttgggatgggtgaccgaccgaactccagggttaagcgtgcttggcctggagcaatttgggatgggtgaccctgatgtccaaagaactccagggttaagaactccagggttaagcgtattttgtctgtggccaagagggggacctaatgtccaaagaactctagggttaagtgtgcttggcctggagcaatttgggatggtgaccgaccggaaaattcttcccgggtgcacacgagtgaggacaaagtgtgcactagagcaatttgggatgggtgaccgaccgggaagattcccgggtgcacacgagtgaggacaaagtgtgcactggagcaatttgggatgggtgaccgaccaggaaattcttcccgggtgcacacgagtgaggacaaagtgtgcactggagcaatttgggatgggtgaccgaccgggaaattcttcccgggtgcacatgaggacaaagtgtgcactggagcaatttgggatgggtgaccgaccgggaaattcttcccgggtgcacatgtgcagaaaagacttgtgttaccctgtgagggcagtttatgacatatgaaagctgtcatatgtaagcggacccgccctgggagaggcgggacgttattatcatgttttttaaactactaattcctctatttcagattataagtacactagtattttcatttacacttcaaatcatcagattaaaaaaaataaaaactactagttggctcgtattgttcaagtgtaagatgtggccaagattcctggtcgaatgctttcttaacgaagaccgccatccttattcttgtttgatgggggtttatccccgagagggagagtgagggtttattcccgacagggagagtgaccactacgtaggtttttattcatcaagaattggaatccctcccttcttgtctacttcctctattttataatgtaagtctttctaacattgcatatatttatataaatgttaatgaatctaaacacatgaaacaaaacagagggagtatgttatttcaccgtctttaccgaccaccaataagacctttattttatataaaaaagttcattattcaaaattaattactttggagggatccaaagtacaatattttaaacgaaaagactaggaattttttttcacctagtacccctgtttaatttagatttatgttaaacccggcacggtcctatcctggataaatagtgaccgttagatcatgatgagcggcccagatcgaagaggataatctacggcagcatttttacataaaagaccctttgttatcatctagtcctcgattaggtcggacgggagagagagaaaagtcaaagaccctagcgaggagccggagctccggcgattgacagcggttgcgccgtcgtcgccatggccgcagagttcccgaaggatgtgaggcgaggcggcacgccggcagcggtaacgagaggacgggtggagcctgacggcagggctgcctctgcatctggctgcctaatgagacgatctgaaggaagacgacggccatggcgacatctcctgaagataacctcggtgggacgacagggtcatttgcctagttcaaaagcatactgatactgaaccaatcaaccaatgatcatgacaaaccaggaagaaattcagcaagtgcaacaaggattcctgactgttcagaagttccaagtgtcaacagcaattctgcagatcatcatcatccaaaaaatgagaaaggtaacaaagttatctactgctgtttataacctcaaacacatgaatgccactgtggtttatcccaaccctaagtggagaagcccaaccaattcgctaatgcacttatacaacagcagaggaatatacagtgtagttcatcggtaggcttcttcctggagctaatacaaatagacttttttactatgcttcttcctggagctaatacaagcaggcagtagtacaagtttttacatgggggagcatctttcttctaatatgatctgcttcaccatggtagaaactaacagttctgaaggccgataagggaattgtcctgccctttttttgttcaaaaaacttctgaaggcgctcatgtgctctttgtcattgctgagcggaggcgagaatacagtgaggtatttcgcatgataagatagacgatgaatgcaaggtaaactgccaatacaacgcacaagcttgaccgaaccaatgctccccggacttcagtggcatagaaggacagtataagatacccattgatgagcatcaagaatactgtaacaatccagctaatcacctaagtataagcaaagataaagttaacagcctacccttgcaaaaacatatatattcaggttttcttttctcatctgaatacagatatgctgttaaacaaccaaagccgaccaaataaatctacagttgattaagaggttggtgaatggtgaactatatactgaaaaaaagtttatatagatgtaagaaggtaggatagcatagacaaacatatatgagatggatttcagcttcaaggctaacagcttaatggaataaaacattgaagaatcatgttcatgcatatcaatttaatcacctacagaaacaatgatctgaaactaaggaactgttgtcgatgattatgaaaatgaaaaccttttattcgttcagtttcatcagatgacaaaaacttaataataagatcacatgacctaaaacagcaaatggagttcaatactagttaaattatctgccaacatgagacatatgataaagaaatattaaagggaaaacttacttttgtgataggaccaaccacaaatgatcccatgacttgctcctttgagacaagtgtgatgagaggaatcagtgcaaatggtatctgtatggattgaagaacattgagtgcctcattcagaatgtccattgtaggatcctccgtgtcaaaaaataaagccacaatcatagttggaataattgcaaagcttcgagtaatcattgctcttaaccacttcttcaaccgaagattaaggaagcctcccataacaaattggcctgcatatgtgccagtaatagtgctactctgtccagatgctaacagcccaatagcccagatatacagtataggaaagaatgcagtcccatatttctgctgtaagtactgtccagcattctcaagacctataccatcagcttgttcagatccataaaatcctttcgcaaaaactgttgtgacacagatgttaataaagaacgagacaatgagggcaagaatggactcaatgttgtaatagaacactgcttcttgaacacgggatttcttgtttgtgtcaatcttccttgactgcactagtgctgagtgcaagaagacattgtggggcatgattatgcagcccacaattccaactgcttgtttgattgtccttgaactcaactttggaaccaccaaacctagataaagaaaagaaaagagagagaataaactcttcgacttctcaaggctgcaagataagcaaaagtatttgcaaacaagtcagcttgaataccaatcagaagctccttgccacttggctttgtttcaccaaacataattgcaaatgatactgccatgactgcaatcaggactccgaaaaatgcttccaattttctcactccatagttctccaggaataaaaagatgaagctggcatcaataacacgtcatgtaagccaaacaaatgtcaattttattggacagttcccaatcatataacaaaacagacaatttgtcagcacataaacaaagtaaaggctaagtcaaaatagagaatcattgaataacactacagcagaaacagacaggaaaatgttgtctctttattagtcatcccgatttttaatatgatttgttcctttcatcgttactagcttcatacccaaacatccctatctagtagtcaataaaattcaaaactaggggcctaaccagggaagacgataagcactaagtagaagtgtacggacaatacataaggacatgcccttagattaatcaacaatcccaggtctcttaactgaatataaattagaagtattaaaccaaacaataaacgtgcattatcgtctgaccgagcgactcccaggacatctgggaccattacagtttttaagcattccgcgaccaccaaacatggctttgatgacaaaaccaacagaaaaacgtctccaagaaaagagcaagcggcaacaaaaataattactacaacgcaacataataccgtcagcaagtagcacggaattgatcgaaaagaagcagaggaaaaactggagtttcgtctaaattttagctcccaagaaggaattctgaagatgaatgcaaaggtagccatcatcacactaaccaaaataataataataactgggggaacaaacaatggaagtgaatagtcccactcaaaatggattcgccacaagggcaactcaccaaaaagacacgaactttatttactcacctaacgattaacgattggcgggaccaaagaaaggaagggaagcgatcgaaggacaggaggaggaaagggaaagaacggaagcgaggtttctgctctctcctgagatgccatcgggaagagtccaacacgagaacgaacaaacaatactcgctgtgtcaatcgagagaccaacaggatcgacgaaaacacatcgaattacagtcttttagttcaaaaacgggaaaagaacaagggcagcgatgaagagcaaacagagcgtccaatttaaccaataagaaagcaacgaactctcctatccaagaaaggaactccttgccagtcaagaaaaaaaaaaaccgatgaacttactcgcaaattctactcgccgcaggtaagaaaggaaatcctaatcagttaaacgatatcgatgtcatactcgcaaattctactcgccgcagctccaaaccaaaacatgaaccaagcaaactcggggctgtatactatgatcagcaataaactgaaaaaggaaatctaggaattttctgtgaacaagaccaacggggtaaggacaaaaaggaaagcctcgttcgttcccaacacccaccaatcgaacgcggtgatgacgacgccgccccagagcgggacggtgccagcggagaggatcttgatggcaatcgcgctgccaatcacctcctggatgtccgcgccgacgagcgcgagctcggtcatggcccagagcgcgcgcgtggcccagggcgggtactcctccctgcagagctcggcgaggtgcttccccgtggcgaccccgagccgcgcggagagcagctgcaccagggcgcccatgaccgtcgcccacagcagcagccacagcagctggtaccccgccgccgcgccggcttgcaggtcgccctccaggttccccgggtcgaggaacgcgatgcacatgaggaacccgggccccgtgaaccgccacagcttgcgccacgagaaggccgggcgcatggcgtcgccgccgccgccgccgccgtcctccgagtcggagtccgagacggcgatggagaccttgtcgtcggagtcgtacgcgcgctcgtcgtactcgtcgtggccggtgacggtgacggtgccggtgacggccccgccccccacggggaggaggctctcggcgaggtcgcgcgacgccatggtgggggggagtgcggcgacggcgaggtgggcgagcgagtgggaagaaatggatgggtcaggactcaggagggaggttaggatgggaagttgtgctctctggactctaggagtggttgtttttctaagataacaagtatagtggcccgcgcagattgcgcggctagcatcattatattttctctcatataatagcatatatgttttctcattatattattcaaatatattaaaatgacaacataattttaaattttacaataactttacaaaactactaatgtgtaatgtttatattatattttatatacgtgttagttattaattatttttaatatcaaattttagttatttgtaaattatatatattcctatatggactctagactcgtcttttaatatttctttttttaattcatttttatttatgaatttttattatttctaattgtatttctatgtggactctaaactcatctttcaatattctttaatttttaatttcgaatttcagttgcttctaaattatattccaatatttgtattcctatattgaccttaaattcttcttccaatgtttttcttaattttgaattttagttatttgtaaattgtatttttatacagactctaaactctacttttaattttattatgtttattccaaattttagttagttttaaattcctatatggactctatactctacttctaatattccttatttttttaattccgaatttctatttttttttctaaattgtatttctatatatactctatactttacttctaatattccttatttttaattccgaatttatattatttcctaattgtatttctatatgtactctatactctacttctaatattccttatttttaattccgaatttcagttatttcctaattgtatttctatatgaactctatactctacttctaatatttctttttttttaattctgaatttcagttatttcctaattgtatttctatatggactctagtctcctcttctaatattcctttttttcattccgaatttcagttatttcctaattgtatttctatatagacagactctagtctcctcttctaatattcctttttttaattctgaatttcaactatttctaaattgtatttctatatggactctagtctcctcttctaatattccttattttttaattccgaatttcagctatttttaaattgtatttctatatggactctgtcttttctttttctccgattaatgtgagaatttctaggccatgagagcgaacttggaggttcctttttctattcctttaattatatatttaattccaaatttctttgtaaattgtatttctatatggactctagtctcctcttctaatatttcttatttttaattccgaatttcagctatttttaaattgtat

SEQ ID NO: 3002 - DNA, 12326 bp, Oryza sativa
ttttaattccgaatttcagctatttgtaaattgtatttctatatggactctgttttttctttttctccgattaatgtgagaatttctaggccatgagagcgaacgtggaggctcctttttctattcctttaatggactctagtctcctcttctaatatttcttatttttaattccgaatttcagctatttttaaattgtatttctatatggactctgtattttctttttctccgattaatgtgagaatttctaggccatgagagcgaacgtggaggctcctttttctattccttaaattatatatttaattctgaatttctattttttcctaattgtatttctatatggactatatagtctacttctaatattccttatttttaattccgaatttcagttatttcctaattgtatttctatatggagtctatactctacttctaatatttcttatttttaattccgaatttcaggtattttctaattgtatttctatatggactctagtctcctcttctaatattccttattttttaattccgaatttcagctatttgtaaattgtatttctatatggactctagtcccctcttctaatattccttatttttaattccgaatttcagctatttgtaaattgtatttctatatggactctgttttttctttttctccgattaatgtgagaatttctaggccatgagagcgaacgtggaggctcctttttctattcctttaattatataatagattttatactcggttttttatatttatcttaatcaaatttctttagatttggctaaatttatagaaaaaaatagtaccatgtccgttccaaaatataagaacaaccgaatgggacattttctaggatgtggattttcattccttgagaggatatcccctcattgtttgcatgtcatttaaatagttataaaaaaaattgacaacatatattaatacgaaatatatcactctccaaacatgttaaactgaaaatagttatcgcacattcgccgctatatttattattttattacaacttgtagaagttgaatctaagcttgcatgtttgtagactgatatatttcatattaatctattttgccaatttgttcatattttttatgactatttaggtggcatgtgtaccccatttcctagtagtctgtccagattcgtggtaataaaaaatatcacatctagttcttggttattatattttgggacggatgaagtaatatttataacaccaaattagttttattaaatttaaaattgaatatattttgatatatgtttgtgtttatatttgaaatgtaaaatatttttctataaacctgataaaactttaaaaaaattgactaagaaaaaagttaaatgacttataatatgatgcgaagggagtacttttttaaccgcaactaataacatttaatatattagaactaagggacgagctataaaaaaattagggataaaacatgggatctgatggttatctatgcaaactacactcgcgagcttggtgcacgtggtgagaggagaggatgaaaggagcacgacttctcttttaagctagtagagaaacatccaaaatcaagtaaaaaaagaaaacactagccaagtttttgatagaaagatatgtttttaaaaatcaagaaattaaaatataggcatttgcaaatatttaaatgtaactaggcaaagtatttgtattgtattaaaatatggtaccaggtgctttttaaagattttatttttagatgcatacaccatcattccataaaaaatgaaccagtgctagagcaagtatgactgcatgagtaatcgagtactactgtctatatttaaattctgtcgtcagattgtacttggtatacggaagcattctaattaaacaatactagcccttttgtgttgacattggactataaattgggctattatcccattggataatatcttgggtacactttctatatctttgaaagttcttgagagctcagactcgttcagaaaaatctgatccgttaatgcttgtttgcatcggttgtttttcattacctttttttttctcactttttctgttctattttcgcggtgatgcatcggttgttgacaacgtcaaaagcagcaaatttatgatcgcttgatcagcgggaggacgatccctctcgcgtagcattttcgcccatgatctaacgaattttggcggctctattaattgctagtcgaggtagatgattctacgaagatagtgatggattcgtataatcgtattactagatagtagtaaaaattttagatacccatgtactgatgtacatattggatggtagcaaatagtgctttagcgccgtatcgttttcaccgtggataatttgggggcaaaggtagatcgttaaaccctttattctagttaattatcaggacaaggactcgatgagcaaattgtctttgggagttcgcttttccttgccaagaacaaaagtgagtgtagaatagatcgaatttcagagtgtagaatagatcggtcgagaacgcaagacctctcctttttccgcacctttttctctcgctttaatcgtgcgttccaccgggcatcaacagacagcaccactcggctgacgaatccacgttgctgactcactgtgtgtctacgttcatcagctgtccatatttttcaataatgtgaaagggcttatttagaaataataatctctctgtttcagtttatacgacgttttgactttggtcaaaatcaagctactttaagtttaaccaagtttgtagaaaaaattagtaacattttcaactcaagacaaatttattataaaaatatattcagttattgatttgataaaactaatttagtattacaaatattactatatttatatataaacttagttaaacttgaaacagtttgcctaaaacggagggagtagttaactagcatagtagtccgcgatattgcgcggctagcattgttatattttttccttatataatagcttaaatattttcatacgttattattaaaatgtattaaaaatagcaacacaattttgaattttgtattgtatcgatagttattaattattttcgaattttgaattttactcatttctatattgtatcgtatccctatatgttttctagactcttctctcaattttgcttgttttctaaatttaaattttagttatttataaattgtatttctatatgtactataaattatacttttaattccgactttcaattagttctaaatttagagttaacttaaaaattaattttaaatatttaaattttgatttttctttgaattaatagtccattccatgggactcttggatttcggacggtgcaaagttgcaaactataagtgccatgcgagtgaacgcgagcagtggcgcagctaccgggggtgccggagggggccagcaccctccccccggtggctgctagtagtatattacagggttagacaattagacatcatccactgttaggccattagtacgttagattatagtcagacacttagtacttagtcttatgattttcatctttttaaagtaaaatagaaaatgcttatttatgagactatttggtaatttacattgaaagaatttagcaacaaggactagttccaagcttccaatgatattattaaagatctgaattcaagttttttaggcaaaacatatggtgccttgttatattgaacatttgaacctctttttttaaaaacataacatatgatagttttgtaatctagctaaaaaaagctatatttatatacacattggttattgtcagtagtgactatttagcttattatccatattggttaatcggtcttatgacttcctcccccacatcccccctaacctcaaatcttcgccactgaacgcgagagtacccgtgtgtgtctcgcataacgtgtgacgcctcctggccgtgtcgaagcctcttcagccgagacgtacggctcgtctgttgcagatcccgtgcaaaaactgaacacggcggcgtcgcccgtcgcatcggccatggtccctggacagcgacgacggcgtcgcgcgtggcgcgtcccgtcgccacgacgcccgctcgtgcgagggagagtggaagccgcgagcgtgggcatcacagtacaatggtggagaatagctctatagtcccggttggtaaccctttgtagtctcggtttttcaaccgggacggactaaagatcgcaatctttagtcccgattcaaataatcgggactaaaaatatggtcccggttgttgttaccaaccgggactaaaaaagttttgtttgttttcttttcctttcatccggttggcctttttccttttgtattgttctttagctttcgctcgtggatcaaatgaataaaatcaacaacagagcctaaatcatagatcgaatgaataaaatcaaacaacaaaacatccatattctttacacttgttcagatctacaacatcttcagaacaatgagcattcatcacagagaacaaagagagcattcatcacagagaatagagaaagaaaaaagaaagttcacatctacaacatctccagcattcatcagatagcatagagaaaagaaaaaaaaagttctccgcctgccgccgccgccctcccgaccggcgccggctgtccccgacgcagccggctgccgccctctcgaccggcgccggccaccgccacctcgaccggcgccagtcgcccccatctcgccgccccgcgcccgatgcagccggccaccgcccctctcgaccggcgccggtcgccgccgccctcgatgcagcccgccgccgcctccatctcgtcgcctcgcgtcgggccgccgcggaggcctccatcccgtcgccctgtccggggccgccgtggccggcctccatcccgccgccccgctggaggggaggagaggggaggaggagatggggtgagagaagaaggaagagaaggatgggaggaaaggaggagagaagaagataagatggagaggatggctggatgggagaggaggggataaggatggaattaataggagactttcatgcgcgcgcgtggatagaggctttgttttaccggttgttagaatttttagtcccggttacaccaaccgggactaaagttaggatcaccaaccgggactaaagatcaaatatgcccactgtagccaccaaccaggattaaagatgatttttagtggaatcgggactattgtggattttggtcggccgaccaaaaatggtttctccaccagtggtagcaaagccacaacactgcaatgccacttgtacgtccggttccaatttatgtgtttagttcacgttaaaattgaaagtttggttgaaattagaatgatgtgacagaaaagttgaaagtttatatgtgtagaaaagtttttatgtgataaaaaagttaaaagtttgtaactaaactcggccttaagcgccggttgattctcgcatgtactagtacacagtacaccagtactactgtaccactagcactactgatcgcgctaatttttcgcttaaacaaacgggaatcagagggagcgcgacaggcgacagccgccggggacaatcagggtagtactccgtatctctcatccggtcattcttctcactgcgtgagacgaacgtcgcgatcagatcacggcaaattgcgctggtttatatcaccagaagatgaagatggtactccaatcctgcaactgccaggtgccaaattgaaggtgcgcatcacggttggtagtagcgtgctgccgttccgcacttcatcacagggcttcggttagatcctccgtatttggaattttcagatgatctcccggcctgtgcatcgctgattcgctgttagcgtgataagatcgcgactaagccggccggagtagactttttctggagcactagcgagcttggccttttaatttcttcagttcggtggactgtcttctgacgtggtgtatatgtggcgataccagtctcctgtggggcccagctggcagcctccgtagcggaaggggaaggacgcgccacgccggcgaggcagcgtcctcgccgctggccttggcctgactcgtggccgttatctgatccgatctcctaagtaaaaaaaaaagctaacccactactccctttatccaaaaaaaaaaagctaacttaggaggaaatatgattctatcctaatacaacgaatctagatatgatgggttacattctttgttaggttgtttttacaacgaatctagaaatgatgggtcacattttttgttaggttgttttttttaacggatagagtacttttagtagatggcgctgttaaaccgtccaaacgaatgctgctttgttgttgcacgggctcgtgattcgtgaatgccaaatcacttgaagacggctggtcatgtgtagaccgatcgtacacccatgtgaggtagtagtgagtatgaccacacggtccacgggaatacgggatcgtgatgcggctgatctggagttgctggaccatgtaatacagatatctggaatttcagcgtgcgctactgtacatgtgttcgctgtctggctctgggcacgcaggtttaggacgattggcggattgggatataccaatcatgtataggctagtaccatcgctgtgtaatcagttgtgattactcgttgttaaggactggagttcatgctgatatatatgagagttacccatattctcgggatgggaataatttatttgtgggatacgactagcagaaatagctaagcaaaagatactctccatgcgggcacggcagttccagctgacagagttcaattgggaagtgttaatgtggtcaccctgggtcaccatcaattgtaattataactaatcgcctatgcagattaacactgacgtacaattgcttatctattgtattagcaaaaaaaaaacagtgtcatgattaacatttgattaaactagctatactcctccgttctaaaatataagcattcttaattagcaataaaactgaacaagtgtttattttaaccattgctagttatgcaactagaccatcacaattataaatacttatatttgggaattgagctagtatatctgtacccccgtccaaaaaaaccaatcccgcctatgaatctgaacacatatctaaaaattcgtttttttaatgacggagtagtatgtgcctttcaatgtctaattgagcgggtgatatgatgtctaattgaactgggtgatacatgcctatctaagcactagactttaagggccactttcaattggagaaaaaatagaagaaaaacaaaagaattgaaatcctacactattcatgctcttgtttagtaggaacgaggaaaggaaaaacacatgaaattgaactttcatgttcctaggaatctagaggaaaaacgtgaaaaatttaacatccactctaagctcatgtttttctatctcgcgtaggttcgatgtaaatctattagctcatggccatttttctattcaattagtgtatgttagatgtgtataagtaaataaccaacccaatttattctaataattgaaatccattccttttttttcctaatcaaatactcattcctacataattcttgtgtttttcaattttttgtattgcatatatattcatatcctatttctttgttttttctgttaccatgttttttcgttcatgtgattcaatagggccttgagagtatcacaaacacagtaagtgggctagtggcttccgtttcaaccgcaataggggagtcggcctgaaagtccataccgcatgatggatgcctgcagctgctaatgtggacactgcaaccaaattggaacaagttgttgtatcgaagctttttctctagagaacatcatctgtttatctgcactagtacgatcctattcccttctactacatgctcactaatgtcagtaaccacacacaccaacggaattggctgctcagtttggaatcactcgacagacaagacacacagacatcggaatccggacgctatccttctcgtcttctcgttaatttttccggcagcaacggaagactgttcgtgtgggagctttcccccttggctgctgctagcgtccacaaaatgagttcagctccatgcgcgacgcccatgctgcgcacgcagccgcgaatccgcgatgcatctgcacgacgcaccggcggccgaagccctggacccgttgacgagacgcacgcacccgcagccgcgcgatgcatctgcagggatgcaagtgggtcacacgcgaactcacttatagattgaaataaacgagttcccaagttagttttagcctataagcgaatttttatgggtagctgcttgcacccttatctgcaggacgcccagatcccttttgccgctgctgtgcactcctcaaccttcaatcccctgccgccaccggtcagctctgttgacagggtgagaaagagtaaagagtgtgtggaacacatagagagagagaggatatttttattctttttcaataactaggatgacacgtggacgtcacgctaacaaataatactctcggtactacctccatcctaaagtatagcagcctaaaattggataggatacatcctagttcaatgaatatggataagtggttgtccagatttgttgtactaaaatatgtaccatctagtcctaaatagttatattttgggacggaaggagtattgcgcaacaaaactagattgcactcatattaagggactcaaagtggacttattccacgctgtggccgcagcgagactggaaagaggccgtgcaatatctggaccagaaaagcccgcagatgtcatgggccatatgcgatcctgcaatgggcccgctccagccgcagcgcgtttcccctttggccaacgccgttcgcggcggcgccaacgacgcccaaaaccctttgcagtttgcagccggcgaagcgccgccgccatcggaaaaaaaatgccgcccaagccagagcggcggctgttccagtacgtgagcaagccgcgcaggccggcgcgggagcctgcgccggcgcccgaggtctgcggcggcggcggcgaagaggtggtcgcgtccgacgcggatgccgacgccgtgtaccggatggtcacggcggcgcccacgccgtcggcgatggagtccgcgctgtccgcgtcgggcgtcgcgatctccgcgccgctcctcgacctcgtgctgcggaggttccggttcgcgcacggggacccgctccgcgcgctgtcgctcctctccctcgcgctcgaccgccacggcgtcgccccgtcccccttcgcgctcgacaccgcgctctacgtgctcggccgggcgcgccggttcgcgcacatgtgggacctgctgcgatcctcccgccgcctcgtcccggacgccgtcacgccgcgcaccgccatggtcgtcctcggccgcgtcgccaaggtctgctccgtccgcgagaccgtcgactccttccgccgcctctcgcggatgttgaggggccgcggggacgaccaggagggccaactcttcaacgcgctgctccgcacgctgtgccaggagaagagcatgtccgacgcgcgcaacgtctaccacgcgctcaagtacgagttcaaggtgaaccgccagacattcaacatcctgctctccgggtggaagtcagccgaggacgcggaggcgttcgtcgccgagatgcgggagctcggcgtggagccagacctggtgacttacaacagtttgattgattgtcactgcaagaaccggggcgtggagaatgcctacaagctgctcgacgaaatgcgggagaaggacatttctcccgatgtgatcacttacacgagcttgatcggcgggctggggttgattggccagccagacaaggcaaagcacttgctgaaggagatgcatgagcttggatgctaccccgatgtacctgcatacaacacggcgatacggaactttgtgatagcaaagaggcttggtgatgcgtttgcattgatggaagaaatggcctcgaagggactcatgccaaatgccacaacctataaccttttcttccgttgctattattgggcatacgacattggcagtgcttggcagttgtatgagcggatgcgttctgaaggatgcttcccgaacacccagtcttgcatgtttattgtgaggttatgtcataggcatgggagggttgcacaagcactagagctgtggagtgatatggtcaataatgggtttgggtcattcaccttggtgtctgatgtgttgtttgatctgttatgtgatgaagggaagctggatgaggctgagaggtgcttccatcaaatgattgagttagggcagaagccgagcaatgttgcatttagaaggataaagatactcatgcagcttgccaaccgtgaagaatctattgccagattaactgctcaaatggcacagtttggacggttggcgcctgaggattgccgaagagttgatcataccttgcagagcacacatcaaagtagtgatagaactgacactgacactatagtgaaacacagcaacacatttgaatcacgacgatgataaattggggaagataacttggttggacagggaaataactgaaaaagagagttctgtacttcgatatgttgttcaaggtataccttcatggtttctattgattattgttcactgtatttgttggccactttgatttcataagttcttatgactaatgacttttataacaggtatgaagttctgcatgtgatctatagatggccaaccatattattttcaatatcaatagaatatgtttctgcaagttctactgtggaagaccattctagcattgccttctgtgctgagagaaatgctattccagcatcattgttatctgcaagctgaatgcctggatgtaaaatcacaactactgtgtagagacacttcaacatttttgtaacctgtggtgtttgtgtgaatgaccatagagaagtcatgcctgactcttccccagctggtttatcctctgagtctctgatagagaatatatattgaagcatgattgcgagattcatcttaggcaagagggacgaaatacaaactgtaatagaagtttcgcacgacaagtacaaagacacatactataggagtacaatctgaagtacattcatgtgtttgagctgccaatgtcaatgtggtatccctgcttcctcaaaaacgcacagtgcgcgcccaggacaacagtttgacggctccaacaccgttatttaggtggtcttgccataaatcatgttatctctttactttactaaggtctcctttgacatagcctcggatctaagattattttaagctgtatattgctaactccacaaatctatatatctaaatatgtgatttgattatgttgataacatttgaataaattattttgtttctattttgtatgaaatttaaattttaaaccactataatttaacatacaaacgttaaatttatcgtaaatatgagatctgaaactgtgccaaacatagcgtaagcactaagcaagcttgagaatacatgtattgaaccgaatcacgcaattttttttctaatttgtatataccccaaagttcggccttattcgtgcattactcgagtagggctgtgtttagatccaaactttggatcaaacttctaattttttccatcacatcaacctgtcatacacacacaacttttcagtcacatcgtaccaatttcaacccaaacttataactttggaaggaactaaacacagtctagtagtactccatattggatatttggatttatgccgtttttggctttgccaacaaattcccgcctatggacggccattcaaatggccaaaccgcgtcaggaccctcctaaacccaaaccaagccaaagcgcaacaccgagagacgaaggcgagcgctgcgctgcgcggcagcgtgagccgcaggcgtcgccgatggagagcaaggcaatcaacgcgacgcacgcgccgccgccgccgccgcctattaatagggcggcaacgaaggcggcaacgccaagcgaggttgaattccccactgactccaaagcgaatagcggaataaccgtctccaccccacgccgccgcggatgacgaagccgaggacgaggtcggtggccaggatggaggccgcggcggcggctgcggcggaggaggaggcggggaatcccgacggcgtggagggcgcggccgtcgccgccgttgcgcccgaagccgccgccgaaggtccgagtgagccgaacgcaggtg

SEQ ID NO: 3003 - DNA, 538 bp, Oryza sativa
agcctgactgccgcggcgaaaccgccctgctgaatgtgctcgacggtagtggcccaaccccccagctgcctgctccggtcaagaccaccctccccaccgtgaatatcgccccggcagtgggctggcccaaggacgccaagcccgaggcagcaccaggcactcaggtgaaagcgttcgccagcgggctcgaccaccctcgctggctatacctgttgcccaacggcgacgtcctggtggccgaaaccaatgccccgcccaagcccgaagatggcaagggcctgcgcggctgggtcatgaagaaggtgatgaagcgggcaggcgcaggcgtacctagcgcaaaccgcattaccctgctgcgtgatgccgaccacgacggcgtggctgaaatccgtacgaccttcatcgaagagctcaactcaccgttcggcatggcgctggtcggcaaggacctgtatatcgccaacaccgacaggttgctgcgctttcactatgagcccggtgccatgcaaattcgtaatgaaggccagccagtggtcga

SEQ ID NO: 3004 - DNA, 689 bp, Oryza sativa
gacagcctctcccgcgcccacggcatcggggaggcgctgctcatcgtcagccacgacggctacttcccggagatggacaagatcgtgcagaccatcaccttctgccaggtcaagcagatcttcgcgccctactcgccgcacctcttcccggaggccttccccggcgtctcctccggtgactgccagggcaaggacaaggcggccgagaagcactgccagggcgacccggaccagtacggcaaccatcgctccccgagaatcgtctcgctcaagcaccactggtggtggatgatgaacaccgtgtgggatgggctggatgagaccagggacttcgatggccacatcctcttcatcgaggaggatcattacatcttccccaatgcgtaccgcaatgcgcagctgcttgtcgacttgaagcctagcaagtgtccccagtgctatgctataaacttggcgccatcggatgtcaaggcgaaaggggaaggttgggagagcttggttgccgagaagatgggtaacattggctatgccttcaacaggacagtttggaggaagattcatgccaaagctaagcagttctgcacattcgacgagtacaattgggatataacgatgtgggcaaccgtgtatccgtcgttcggatctcctgtttacagcctgaggggacctaggaggagcgctgcacattt

SEQ ID NO: 3005 - DNA, 1783 bp, Oryza sativa
tgtcagatgcaaaacatgaagactattaattattactccatacaaaataaggagagtttcttatatgaaccaaggtaggagttggagttctggtgcaaagaaaaataagtataatcactatattgtgtagcaactgcatcaaaccatcacaattctgataagtcaaaaaattgatctaacattttaggaaaatgataccaaacacgattgcaacagacagcagtactaagcttacatcttaacagctaaatggcagcagaaagagcaactaaaatgactcaaaatgtgaataaaccaattcattctattacatcgtgcaagctgctagcacatctctccataaaacccattgataaatcctagtaaagcttacaatagttattcagtctttgtataccaaaagatgacatgagctaagattttgtgactacaaactttttgatgtccactattctcacctctcatttgagtaatacactctgcatcgggatgagcttaatctgctttcacggatgagaaaagatagtggacgaagcagaatgatgaaatgaatcccactgttccagtagccagcataatagcaataaccatgaagagtgagtagccgagatagagggtcgccgacacaggtccactcaagctctttaggtcaaaaacaagatagttgatcgagtacaagaaaatgtagatcgccacagatccagatgagaagaatgatttccaccaccatttccaatcctcgacacagagatgcatgtaggtcagaacaagggaaacctcagcgcagacaataacaaggagcaacaggacgatgaagaggaatccaaagacatagtacacacgccccatccatatgctagacatgatgaagaagagctcgatgaacagggtaccaaagggcagtgtgccagcgccgagaaccagcaaccaggatgggtacttctgaggtgggatttcacgagggatctggttagtgcgcacggggtactcaatgtgcggtgccttggcaccgaggagtccacctacaagtgtaagcggcacagagatacagaaccagagcagaatcaatatgacaaacaacgagaaggggatggctcctgtgctttggcttccccacaacaggaagttcagagtggtaaggatcaggaatgcaatgccggggaagaagcaagctaccctccatgaaacagccatccaccctgtatgatcaccgcacttgattgtcttccacacacgaacacccacatatcctgccaaaattccaagaaccagatagaagaacagcatgcccgtgatcagagtaccgcgggaagctggtgacatgaacccaagcgccgcaaacagaatggtcaccactgccatcccaaggatctgaacaccatccccgaccataacgcagagcaacattgggttgcttggcgcgcggaaaacatcactgacaacaagcttccacccagacagctcctcgttcatctgcgcctcgcttcactgtcaagctcctcatacctcgtcagatcacgcctcacggtcctcagtaatatgacaaacacgataccagcaaggaaagcaatcaccatgagcgagttgaggatcgagaaccagtgcaccttggcaccctccatcttgaagtatgcctcccacctcgagggccacttgatatcgctctcgacgaacgacacctcgtaggtgtacacgaagggctcgttctccttgatgctcatggacacggtggtcgggtcgcacttgatgctctccgggtacttgccatacatcttgagcgact

SEQ ID NO: 3006 - DNA, 2008 bp, Oryza sativa
tgccaactccgctgccgccagtctggccgccctcgctgctgctgcagcggtctgagccgttgctcgcctgcgctcttctgctgcggcgagctcggcgtcctgctgacgccgagtgctcgaggcgaccgaacgccgagaccgagcgtcggacatggcgcacctccggggggctgctgtgtggagagggggaagggaaaggggaaggaggagcaaccggtgctgctgctgctgctgctggctgagagctcaaccgagcttgggaaggggtggaacaagagatgtttagcctacaggaaagtgtggctctgataccagatgttagaatttcaatggttactctcattgagaagaggatggcactcgagatggggcaattttctggttttcttcattcactaaacacaaaagccatgtcctcccaaagaggattggatacatatttatagctgcttgtagcagccatgcagccatgctagtctaagagggtgctgtcagcatcccaacaaactgtcctagagcagagcatcccaacaaactgtcctagagcatctcaacaaactgctgtcctaactgtcctagagcatccaaactgaaagtagagatgctgtcctagaaagctgaaaagcaggaaaaaggcaccacaagcccaagaccaaccagccaagacttattcctacacttacaatcctttaccacaagttcttccaatgatccggccctgccaaggtactccagccactccacgttcctactttcatgcaatcaacaaggtggaaagtacaaagactcttgcaaccaactgccaccgagagaagccctcttgaacttattgctggtgcaaagttcagcctgaaagaccttagtttcttgcaataagccagatagccaataccagaatcatcgatataggagcagaagtttaatgtgagatcggtcagtgaagagcagtgagacgaaagcacaaggagcccttggttgtccaactgcttcccgtggatagatatccaaccagagtaatcaatcactactttccacaaattagggaaccgggagcatagtgatgccaaagcttcagttgccgggtgaagaccacagccaacatggatagcatccctttgctccgcgtcgatagtgtagagctgcttcgacacaagggaaagagagttacgatcacttgtcttggcaatcctcttgatgatctctgcgagcagtggctctgacaggttgtccattgggcaatacggttgccttacttaagcaatatcaatgttcagctggcactacggactggcctaaaagtaataagaatgaaacatatgagatgtgatagtcagatggaattaatgatattaatttagaggtaatactttcgataagatggcaggagtgtttccaattcaactaagaggtagatttagattagcaaataactttaaatgagggaacctccctatgcatttataaatgactaagcaaataaagaatatgcaattagtctaacaacctgatcaactgaattactgaagcagataataaaaagggaagtttctaacaagcaaatgagcagtgcaagtccagaaatactagcattcatctgctgaaactgaactaacatatttggaagcactttactagtaacatgaatgaaaatcacgcgtataacaaggtgcagacgtgcagtgactcattattattttctacaattcactaccttcacaataaacagtacctaggacagacagcgccaactttatctctagtagtctagttggctaagaaacataagaattgcaaactattccgaacccaattaagaaaaacctcaaactattctcgcccttattatctcaataaaaaaaatctcaatcagaacaggggaagggactgaaaacacaactaaaattagagaccggatcatagataccttagagaaatcaaggacctcaagattgaggggttcagagaaggacaatccaagaaaaagaaagaggcgtcgttcttgatcctt

SEQ ID NO: 3007 - DNA, 676 bp, Oryza sativa
tgtttttcccaaaataaatttatttttgaacaatcatttcatccgagtttgtgaaaatagaagataaatgtattaggagtatataaagtagaaaataattgcattgagatttcacaaagtgagtgtattctggtccttttatatatatctatgtgggatgggtgaaaagtaaaattattttagaagaaagacagtagcattgacaaaatatacactttattaattgcattggttggagctaagaaaaattgaggagctaagcttcttgcgttgaggtcaagaggttcctcgtgttattggatactccctccgtcctaaaatattgtaacttaggataggattagagccatcttaataaagtgaattcggacagatattctgtttagttttattatgctacaattccgacctctctggagtaaatcagtctttcataactcttctcccgaaaacatcagcaccagctcaaatcaaagattttagaccaatttctctgctgcacagcgtaccaaagctaataagcaaggccctgaccaacagattgcagctcatcatcgactatctcattgaccctatgcaatcaagttttatcaaaaacaggtcaatctcagaaaatttcattctagcatcaaagatggttcaatctgcgctcaagagaaaggagccaatgatagtg

SEQ ID NO: 3008 - DNA, 530 bp, Oryza sativa
aaagtctgtgttgagcaagtcaaaaaatgcgaaagctgtcagcccaatggcggagctaacctgcgccccaataagagctgcagcctatcgcaccaatttggcctttcgccagatgggggctggacatcattgggccgttcccggtggcgcgaaacgggtacaagttcgcaattgtggctattgaatacttctcctgatggatcgaggccgaaccacttggcgcgatcacttcggcagcagtttagaagttcgtatggaaaaacattgtttgccgtttcggagtgccaaaagagttcatcactgacaacggcaagcaattcgacattgacaagttcagagagatgcgtgaggggctaaacatggaaatcatgttcacgtcgatcgcacacccgtagtcaaacggggcggccgaacgcacaaatggtaagatcttagaagcactaaagaaaaggcttgagggggcagcgaagggtaaatggcgagatgaaatgctatctgttctctgggcccttcggacgacccccacaagg

SEQ ID NO: 3009 - DNA, 519 bp, Oryza sativa
atgtagagctaagaacgccctttgcagcacactctttttaggatgttcaattgaggggaatttcttcacttcgtaagagctcccagggtttctttcctcgataacaccaagcaggcgtggcaaattgtcatacgaggcttcgtaagttccaaatctcatctctattattttctgtttggccctccaggccttgccatagctaatagtatacttgtatgtctcttcgatgtgtcggattattgaccttggttcatatgtgagattatcgatgacatgcgcatacatctcagatgcaacaaatgcacaagtaatgttcctgtggtatttctgaacaccaggtagaaaacatgtatgcttggtaacgactgacactgtccaataatccttccatttccccttatacgcgtgcactctccagggacaaccaatttttccttaacacaccgaacttcatattgcgaccggttcgacttggcaacccaaaactctctagggtaccgagctcgaattggccctata

SEQ ID NO: 3010 - DNA, 555 bp, Oryza sativa
ggccacgtcggcgcggccggcgggaggcggcgcgcccgcgctcctatggtcaccggcggcggccatgggcacatcggagcggcggccgagagaggggtgggaaagggggaaacgaggcggcggtccacggctcaccctaggtcgacggcgacgacgaaaaggcagccggagcggaggaaggcggcggcgcggctcgggtcgacggggacggcggcgctccggcggtcgacgagcgaaacggaggggtggacgaggtcggcgaggatgcggcgaagccgaaggaggcggcgccgaggtgggaggtggtctggggcgacgacggcggcggacgggagctcggcggcgacggcggagagagagcgatggcgcgagctcgattccggcgaggaggaagggcggtgagaggcggaaacggacggaggaggtgcggggagggtttaaatagggttggaagggggagagagcggctggcggggaaggaataggcgcgggaggtccggccgccatcaatggcgccggcgagatttgtgggggcaaatccgctcgtttgaacgc

SEQ ID NO: 3011 - DNA, 1198 bp, Oryza sativa
gtatgaatgtctccgagattttcttatgaaaaatggtttaaaaattgggtaggtggacagtactctcttcactaaaaagtttgaaaatgatttattcatttgccaaatttatgtcgatgacataatatttggttctactaatgcctctctttgtgatgaatttagtagtatcatgactaaaaggttcgagatgtctatgatgggtgagctaaccttctttctcgggctacaagtcaagcaatgtcacgcccagatattcccgaatagaattccaagtagaatgtgcattaaaatccccgtccaggaccggccggggtacacaaacgacaatgttgacattcagatccacgtcttacaaacatcataaaagtcttacataaatgcagcgaaaagaaagaaagacaacaggagctaagccttgactagaactgcagtgggaacaccactccacaggcatcctcgacggcacggacgaagcctactcctcggagaaacctccatctgacacatactcgtactctggggttgggaaaaaatagagcaagactgagtactacccactgtactcagcaaatcataccggaataggggcatgatgtagggaattatcaaagaagagctagagtggttcgtttacataatgcgagcatttaaaaacagaagttgaaagatttaaacagttgtaataattaattaatattaactatccaccgtccaacgctattccacgttgcaacaggcccaaccatctacctaaactatccaaaatcaaaagattacactagggtgagactaatcacggtgaatctggttgaccgcccataaccgcgggcacggctattcgaatagttttactctgatcagaggtgtacaactgtacccacaagacacagccccacgacacgtttccgtgcgccgacatgccaccacgacataccacaaagaggtcgtgacaggacccttcgcctaaccccctgtaaccaagcgcaccacacataaggttttcccccactcctgcaaggcagcgggcagtcccctatcgtgcctaggtgtatccggaagcgacataggccgtcgcagggcccgccccgttccatcacgcccacccttgcctggatgcgttgactagagaaaagctacactacaagcccagccgttgcccacgctggcttgtggtaagtacgataagggctgcagg

SEQ ID NO: 3012 - DNA, 676 bp, Oryza sativa
aatatatatatatatatatatatatatatatatatatatatatatatatatatatatatatatatatatatatatatatatatagtgaaatcatatagtactttgcaacttaactaaatttatagttggttagggaaatcaatactttgcaaattaacttattatgtcaaaaccttcttaaaagcttacctagactaatagaccatatacaaaagttcttaacaggatcaaaagttgcgcaagcgcgactacgtggctagtgttgttctttagaaatcccaagtaacctttcgagttatttttgcgaggtgaattgacatatcaaattgcacatatcttgaggaaatgctccaatggccctttaatccaggattaaagaaagtactttttaatgcttgagtagaaaccttaattaattgcagtatgaataattcaggttcttcattatcctactccctccgtttcaggttataagacgttcaactgcttcaagtttgaccaagtttgtagaaaacaataataatatttcactcaaccacatttattatgaaatatattctattattgatttaatgaaactaatttggtattataaatattactatatttgtgcataaacttagtcagatttaaagtagtttaactttgaccaaaatcaaaacgtcttataacgtaa

SEQ ID NO: 3013 - DNA, 1002 bp, Oryza sativa
catgttcaagtgacaagcatgacttgccttgctctgctgctggaggaacctcggcgactatttcgaagtacaccggagcgtcggaggaaccggaatctagcgacatacaaggcaaacattgcaaacaggctataagactactaaaacagggaacaaaactatttttgatggattctacacatttttcttgatttactgagacttgaatgggcttaaacggagctcggatgaattagttatgaattttagaagattcactgtgtttattactataaaagaaaaaccttaaatcatttattgcgcaataaattccagggctgacgtcagcacggggggggggggggggggaacgcggcgcccacatgcggggcccaccggtcagcggctcgggggggcggttcaccgtggaccgggaccacgcgggtggtccaccgccggtccacgggaccgatggcccagatcgccctcggggccgattagacgggtggtggcgacccggctcggctcaagaccggccaagcggccacggcgacggcgacggcgcgcgcacacgcgttgccggcgacggcaaccggcggcgcaaaggcggcgccgacgggcggtggtgctaaagcgaccactaacgggcggcggccctaaagcggcggctacgagggagagggaggggaatagaagggagagggcgcctcaccgagggtggccggcgcggaggaagacgacggcgaacggcgacggcgagccacgggaggacgacggccaccagcggacgggattcggggtgccctaaggaaggagaagagagagattacagggagggagatgaaccacggcgaccggcatttatggcccaaggcggcggtagaggttgaactcaccggagcgcgaggggatgcgaattccggcgatgaatcccgacggggaaggggcggacaagatggagttcggcctcgtgaacccgacggcgactgcggcgcggcgcggcggcgaccctatcggtggcta

SEQ ID NO: 3014 - DNA, 563 bp, Oryza sativa
cttccccgccggcctgatcgcttgtccttccccggagttcccccatgagccaggttgtccgcatccacgaatatggcaacgccgatgtactgcgcatcgacgacatcgacgttcccgcccccgccgccgacgaaatccagatccgggtaaaggcgatcggcctgaaccgcgccgaggtgatgttccgcaacggcgcctacctgcaggaagcgcagttccccagccggctgggctatgaagcagccggtgtggtcgaagcgctcggcaatgacgtgaacgggttcgccattggcgatgccgtcagtgtggtgccgccgctggacatcgcgcgctggggcacctatggcgaactggccaatgtaccggcgcggctggtggtgaagcatccacaggcactggacttcgaaacggccgccgcggtgtggatgcagtacgtgactgcctggggcgcactgctggagcaggcgcatctggcagcaggcgatttcgtcatcatcaccgccgccagcagcagtgtcgggctggctgcgatccagatcgccaatgccgtgggtgccaccccg

SEQ ID NO: 3015 - DNA, 515 bp, Oryza sativa
ttttctgggatttatttgagctaaggaagtatttttaataaatggaattgcatttaagaaataatttaaattgaaaaagttttaaaaaaagtcttcttttggctttgggccgaaagtcggcccaaaaccgccttctctctcttctcggcccagccggcccagtccgctgccgcgcgcgcgcgcccgctgccgctgacaggtgggtcccgcctgtcaggaccttcgtcctcctcgcgccatcgccgccgaaaccctagctcgcgccgccgccgctgtttccttccaatccggccgcctctttccttctccggccgaattgattgaggggaaaccatctccgggatctcctctatctttttccctttggaatcatcggctaaatcgctttggaaagcgttggaatcgagttcgattcggatcgggttccctctctccaagccgaggtttccttcgcccgtgccgtcgccgtgggcctccgccgtcgtctccgagcccctttaaaagcttccccgtgc

SEQ ID NO: 3016 - DNA, 5873 bp, Oryza sativa
gccccaacatcccctccttgtgattttattttttgatgaatgttttaagagatttccttttgctgttttttcctctttttgattttccccttcctatgattgaatctgtgatgaattggctgcccaatgaggtgaatctgcgatgaatcggctacgaatccatgggtggtttattgggtttctctcttttttttacatcgctaacaaaatcggattaaattttcatcacttaaaaaatcagtaatcataaattttaaaccatttattaattttttttatccttctttatgcgtcgttgaactcaatagagactaaattagcaactaaagactaatattagctatgttttaacttgtaaaaaatatgttgttttcggtcctatcctgacctgcatggctgcatgtcaaccaaactgtcaaaaacaaattttaaaaaatttgcaatgcacattaaaacatcatatatcaattagaaaacataaagagtcaaattatatgtagaatatttaaaaaacaaataaaggctctatttccaaaataatattccacatgtttctcgtaaattgcaattctcacatgtgaacatggagatacgagaaaagaaagcaccatgagctatttttaccgtctcttacaatctttcttattacaaataattatcctgtaattatggtcagctagctagtactaaaatcaacccatatactatagtctaccctctccaatccccaaaactctcttgcttcttcttcttgccgcccaatttcatatgaccaaatattcatactagagatgatcttctttatgctagatggtgagtatgactttggtacaaatgctgcttcaccatcacgaacaataaggtcaaatggatggtcttaggccactcatacaacttgggaaggaaaaccttgttttgcatcgacttgaacttagtcttcctcatcattgttgtgtatgttcccgtgaacagcgcccgtccttcccaggtctctaacttgtcccactccatcgtcgtctcattgagcttagtgacatggataggtgcaccattgtagccgacgaggacagccatgagctcaccttggtccgactcaaagaggtggctgtcaacttgttggtggtcaataccaaagttgtcaggttaaccaagaagtctaaaattatcggtgtggctacatggatcatacaccgccagcttcccatctccaccaagaacgtacagcaagccatcgtggagcaccgggttgctgatcgcgccgccggaattagctgtgtccctgcttccacgttgaactccgttcggtcgagcgggtgagctgtagcgccagggtcgtgttgacgcagtacaccctccgcgagccatcgtcgtatacgatgaagtcgtaggagtaatggggcgtacacggcaactcgtatgcgacgctcgtcaagagatcgatttgggagatggagaaaggtgagaacaacgtgaggcgttgttcgttggagcagaagatcctggtggcatcattggacgacgccgccttctgcataataacctcgaagtaggggctgtagtacctgatgttggttcgaccgacgacatccgcgcagctgagtaggagcggggtgatccacgctggatagaagggcgacacggcggagcgccagtgccggcacgtcagcgcgaagccgggggtggctcgaccacccgagccgctcaaggacgagcgccagcatatccgacgggagagacgaccagtcccgttccgccgccatctcgcttccttttttttctttttcttttttcccgtacgtgggataaagttcacgagtacacgtgcgtgtcagcaatggacatggtacgtatatacgcagcgttttattatgcacaaacgctcgatgtatgggtcggtttcagcttgtaacccgtcgatcgggttcttattggttgccaaattaaaaaaacgctgctgcttccttttcctaatttaattaccggtgcagattatggttggtactaattgatctgatgtcgtgtaggcgtgcatatactttatattttccaagtgtaattcgatcgggtggattctttttctgtcatctttacaattgcagtctttgcaatagaaatcatgagacaacacgatcaggcaaccgcaaattaaactacccttatatatatcgtgtataagtaagacacggcacaaataccggccgtctctcacacaagaaaagatcgatcgatccgtcgaattcatggaggagaaagacaataatgaatgtccgtcgtcgttggatcccaagcttgctcctctgctgctgttcggcggcgacgacgacgacgacgccaccttcatgtacagcgtgcggacgagagccctgctgccgaggaggtcgacgacgacgacaacatggacgccacgacgagagcccaccggcggtggaccacggcacagggctggttgctcatggcgccgcgccgcggttcgccctcaccgtgcgcgacgactttcctatgggaccctttcaccggccgccggatcgccctgcctcccgaccacgacgcacggcacccttctcacccacagctgcgaccggatgtgcctcctgtcacgccgccggcccacggaccccggctgcgtcgtcgtcgtcgtcgacttcgacgacacggtgctctggtattgccgccccggagacctccatggggtggtgcatcactacctgcagcccgggacgcctcaccacgagcaccgtgactgcgtcggctgggcgataggaaatcttacggcgatcgatggcaagttctacaccgacttcaccgaccacgtcgccgtcctcgagttctcgccggagcccgtgttcaccgtgaccgccgtcgacggcgaccacggatgcccagcagggtacacgcggctcaccggtaacttggtagaatcaaacggggacctgcaccacgttttcttctctcaccccatcggttgcagccggatcgttgcgcgcgtgagcgtttacaaacttagcgtggcgacgcagaagcagagatcggcgtgggtgaaggtggattcactggatggcagagtattcttcgttgggatagacagcttgggagttggagcgtcacttgatgcaaaagaaaccggcttgaaagggaattgcatctattactggggtatcaatggcaaagtgttgaatgtatacgacatgaaacgaggaactacggttgtgatcaatcccggtgagaatcttccgccgcaagtcttgatgcctacccgatgagtgtttctatgttactccctctccctctccctctgttttaggttataaggtattttttactttggttgaagtcaaaatgtttcaaatttaactaagtttatagacaaatatagtaatgtttataatactaaattaatttcatcaaatcaataatttaatatattttcataataagttgtcttaggttaaaaatattactactttcttctacaaaacttggtcaaacttgtagtttgatttataatctctactacttaaaaaaaaactgtagtggtgatggtgaagccaacgtagacgtgcatccaacttagaaacgtatacacgtgacagtggaaaaaaaacgaacgcttcatatcgacgtgcaacagaaaagatccggaatcagcgcaacagaagcgcccccaatccatcttcgcgcatccccacatcgccgcgcccgcgattccgcgtcgatctcctctgcgtcccccttctgtggccagatcaagatcggcggcgagccccggcgaccaacggcggcgccctctgctccggcaacctcctccccgactgccgctctgcattgcagcgcccgcttcctccgcatccaacctcgcgccgccccccatcgccgcgcccatcctcctcgcctcgccacgcctccaccaccggcccaccgcaccgcctccccatcaccgcctccatccccagtgccccggccacccagccgagccacatgtggaccggggtcggcgaccaccgtgccgcgtgctcatcgtgagcaccgacgcaggggttagttcccagatggtgtgcttcgccacgtcccccagcaaggaatcaatcatccaccccctaaggagccccttcgtaaggccactgtagattggaatcagtggcggacccaggatttataccttgggtgtgcccacaaatacaagcactacacattggtctagagcatatacacaaaaatataggcaaaccgagcattttatacaccaaaatatggagccctgtacatggcctagacaaagcataatctggattttctaatgccttgctaaaagaagacaatgcccttgttcctcttcgtattaactgatttcagaattttcaatttttcaaccaatctctagctctcctttaaaagaaaattcagggagacaaagaaactaaaaatagtgagagactaaaagtcccaaagagtatatctgtatctgaagttttagatagatgatgcgaagctggacctgcttgcttgccttggtcaatgtggttgctgctggctgcattccttgcgttgctcacagactcaccgggcgcgcatcgacgttgcttcgccatgtctctaaatgctagtggctgcggctctcgtctccaccgtcggcgctccacactcgtcgtccaaccaatatcggtgctctggcctgttgaatgtcgtgctcttcggtgtcaccgccgccgctcgctgaatgtggaacaacgcctgatgccctgaccctagctacctttcatacgatgccaagtggatacgcgaatgcgaggtgaagcggggaacttgcacgatgcaaagcgcacaacacatcacacatgcatctatgatgggctggctcatgcgttcatacttattcaaacttttgccccaaactaatacatgctatatactataagtttttcgtttttttgggtgtgccggtgcatcctgggtccgcccctaattggaatacatattcgtatagtcttctagctctaggatgctgaatactcggttctacaatggattggaatcactattgtggtagccctcttatgattctctcagatgatgaatattcatcttagatgatggtcttttagatcttttttgtccccatcttaatttactgtcacaattagctcgatttaatcctgcgacagtttacaaactttgccaattgtagtttgtttaggagactagctaatggagtgttcttttgtttttgctggcaggtggagattcatgtgaggaagatttattgcatcaattaacctaatggatgcctcatgaagtgaggctaaaattgaaaaggctggacaggtatgtatatgcgatctacttgctttctgcttgcaggatcaacacaattttgtgttacaactattatgcctcaaaatattaaaatcatagcgatacagaagaaattaaccattgctgccatttcagactgaacagaaccttgacatgtagaatattttttggatttttcatgatgatttttatgccctaaaccgtaagtggttgagtcatgaatggtgagctaatttgtatcttaatcttaactacttcagtcacgtacctattttctccacctccccattgttttccatcattaggggttaaaatacaagtaactgcagcggcaccagcacgagcctcatgaatcactcgtggcgaactggggtagattacccttgatgctcatcctaatatgacatggtttgatcatgcagaatctgtttgttcacgagcccgcaggagtggggagtataggctgtcacacattatgaggttatatgtatgcgtgattcatgtgcctgttggtttctgtgtctatacagggtcattcgaggaaatttgagtgctcaagttgt

SEQ ID NO: 3017 - DNA, 596 bp, Oryza sativa
tgatgaactcttttggtaccccgaatcggcaaacaatgttcttccagacaaacttttgaaccgcagctgtggttattgtgcctagtggttcggcttcaaccgagcgagagaagtactcgatggctactatggcgaacttgtagccgtttcgcgccactgggaatgggccgatgatgtctaagccccaccttgcgaatggccagattggcgcgattggctgtagttcgtattgtggtgccgtttggcttcagccatgtctctggcagctttcgcactttttgacatgttcaacgcatactttaagtatggttggccaatatatgccttggcgaaatacttttgacgcgacggtccttgctgccaggtgtgctccgcacatcccttggtatatttcctttaccatctcctcacctttggagaaagatacacagcgaagcatgggctgtagtattccagttcggtacaattgcccagagattatcttgtacttcgcggttctgatctgcagctgttttgcctttggttcgtcatctggcagccatccctctttgaggtgcttgacgaagggcgttcgccagtcatctgggtcttcgccc

SEQ ID NO: 3018 - DNA, 18691 bp, Oryza sativa
  unsure (1)..(18691): unsure at all n locations
gcgcaggccgctggcagtcgccgatcgccgcttgtccgccgctggatgggaggggaagagggggaggagaggggagaggaggataatgaaggggaggaggggagagaaggagaggggagtgtaagaggaagagataagatcggatctgagggaaggagaagaggagatgttccgatcttatctaaatatttcgtctgggacttaactgattaaagatgggagaaaatatttactcccggttggtagtaccaaccaggactaaagatctaaatgatctttagttccggttgatagtaccaaccgggactaaagttgttatctttagtcccggttagttgtatcaaccgggactaaatatcctcggccccctggcaggcttttgacagggggatgaaccaggattaaagatcatctttagtacaccaaccgggactaaagatcaaaaattatttaaccgggactaaagattatctttagtcccggttctttttggaaccgggactattgtggaaatcgcccgaccctccaaagatcatttctccagtagtgtaattggcacatcttaaaagtgacaaataattaaatgtcccctttaattactgcctgatatatttcaaatctatacttctccgcagagggtgatacaatataagtggcaaaagcgtgatgattgttggcttagtgccaatcggacatgaaagaatttgctcgaattttttttttaaaaaaaaacagtaaacaggtatactccatcatgcaagtggaaatctcacataaaagaattcgtttatggcaaaaatgagatgtgtaaaaggagaattcttttaaacttcagtgcttcattttacttcaattcaattgtaaaaggagatgtgtcgataagtatgctgcagcagaaggtacattttcccttttgtgaggtgccataaatttctggtgtatgttgaaggacaaaaattataaatacactattgtgctctccagtgccaccctcttaggtaggtaaaaggaatttatacatgattttatgcaacagacaatggaagtatggtcacgcgcttctcattaggaatttttattatttttttgaacatttaaaattttaaatttaaaaataaaccatctcgatacttatttctaaatctgaaccttcttacccattgcgcctcgcctcgcttggcgaaacaatagtcacaccacccgcacttgcgcgtggcaaaaaaggaacatatttgaaaaactaaaaactaaaaggttcaaaaaatttaaaaaaaatctctgattggtcatatattatattttttatgttggatttcatatttcttacgagcacagagcttttcaacatgattagtccaattccctgttatactaccttggagttgtacgcttgtgtcatgctcaaacagctagattgttcaactcatccaattttcagatgatcttaacgattgattgttgcagggtagtggcatacaaagaacaaacaataattttgtttctaaaatagctcaaaagaatacttagtgcaattttatcagggtgaatatatatgttgggatcatgagctcccagtctcaaattccctcgccgcaccaactgtgccccttttcaatcaccggttcttaaaaatatatgtttgtgtgttttgggtgacacagcaggaaaatgcaatattttttttagtgtttttatatgtcaaaaacgtgtgcatgtagcaggctaaggatgaagcctgccgaaacacgagcacagcaatccccgtaagcaccggcaacttcgacaactgagccggccacctcttgcgtccactcagaaaagtcgaaagctgtcccgtcatctcccggggcgccctccgtgcgcgtgccgagatcgttgagggccagcctgagcgtgtaacaggcttgcttggcagattccgtcgccggcgccaggccgaaacgaggtgggcctcaagagacctgatcctctcttcggccgcagcaagctaacgatcatgctcggtgccccgcctgttcgccgactccagtttggcacagagggacttcttctcccccatcagggacttgttctccgcatttgccttcctcatggtgtccgccacgacgcgcctcttgtcctccttgtggcgaaggtcgtccttggccttccggagccgaagccgataaccatccagcctttcaaaggaagacttcttcgcactcaggtgcgcggcaagaccctagaaaagggagactgaaaccattacggcgtgacataagagagaagagaaaatttcgcacaaaaaataacacaaacaaacatacccgaacggacaagctctccacagctgcacagctttcgccgaactcgttcatctcggtgaagagaccaaggccttcggagggcgcgataacttggcacaccccatccacaaaaggggcgatctccggccgagtggcgaaatcggcgggaacgaagtacggggcggtaagcgtcacgtctgacatagtcgcttcgaccgccgaagccttcccttcccactggcgagctggcgaaggaatcgcttcaacccgttcgtcctgagagacgttcgccccggccgccggcgccgaagcactcccgcctgttgccgcttcggcgtcactagcaggtggaggtgacgtgcgcctcccccgagaaggagcgcgctgcagaaccagcgaagtcggtgtcccgtcagacccgtcgctgtccaaaaaggcacaaccaatctgtacgaccttccccttcttcttcttccctcgggcgactgatcccggcttcgccgcagtactagagatcgccagaagggtgttcgccacagcaacgtcttgctggcgaatgggtgaaacatgagagcccgccccagatttcactggggtcggactaggagtataaccgcgggagccatcgtcctcagacccggcctccctgtcgtcttcctcctcctcaccaccgctttcggccgtgtccttcgtggcacgatgagatcgcacttggccacccttcgcgaccgcctgcttacgctttctcgacgttccgacgtcgtcgtcaccagccttggcggggatcgatcgacctggtagttcgccaaagtgaactcggttcaccggccgtcgagctgacgcgaaagcaggcgggcaaattcggccgaggtaaggcccccaaccatcttcgacgcctccacttcagcctctccaagtgtgcgaactggacaaaaaaaaaccggaatgagtcgaaagatgtccacatgcatacagagggcgctgataaacacgaggaacttacgcttgactccaggaggaaaagcgaggcggggaagcccgagcacctcttcgtcctcactaacggacaccccccattcgcgagcaaggggagagatccgaagcaggcagaactcctcgcagaggtcgcgggtacatagccgccgcgcaaccttgcaaaggagaataagccgagactcaagaacgctgtcgacctccacactcggcttagcagcgatcgaaacagcaacgcgttcgaacctaagctagttcgccttgctatcttcagcagaatatggattattgatataaaaccatttttgcatccagtttcgctcccatttcgccatcgaggcaggcacccgccaggcgtctgagcgctcagggcggagtatgaaatttacgcacccaaacaccgtcctcttcggaccggccggtgtgctcacgtccttcgtcgtcgtgcacgccataaacagaatggcgaacagctcagcagtgggatcgaacccacacattcgacacacccacgcaaaaacagctaacttcgggaacgccgatgggctgagctgggaaagcctgacctcgtacatctccagaacggatagcagaaagtggtcgcaagggaggcgaagaaggcggcgaagacgacagtctggccgtcaccggacgaagggacgacggctttgcccctacaggtcgcctgccctacacgagaacgccagaaaggacaagctcggctaaggcggcctccttgacaagtgatttgccaaggaagcacgaccacccttcgccaaggctgccagggtcttcgccagtcaacccagccttcgtaggcttgcgaggagccatcgagtctgtggcgaaaggaagggactggtcgaaaggcacgagagcgcgcaaaggcgaaggtatcaaatcctaagggcgcgagcgtgtagtagcagtgaaagtaaaaagcgaggggagaaaagcggtaacccggggcgggattatataatcccgtcccacgacggttcggcttccgcccaatcagggcacgacacgtgtccaggggcagacgaaacggtaaattcctatcgggctgggccgcacagtacaggccgaaatccaagaggagcataccggcccacgaagggccccttactgtcgcatttcgggccaaaatcaaggcaatgcagtctcgccctttccgaaagggcgaatgctaaagttttctaaccaaaccatgaaaacaccaagtgttcacgttttttctgcaggactctaagaagaggtttcggcaggtacgtcggccgaaacggggcgcctcataccataccacatggtttgcatggtctcggccgaagctccttactcacccttgcccgtgaggggcttgttggcggtatgtcatcaggccctttggccgggcctgccgaaacctaagaaccagcgaggattcgagccaaagatatcagagccaattgggcgaagccctatggcgaaggccatgggcggagatggcgaaggctgacaagccgcgttgggtccatgcgaagcaaaggcatcttgggcgaacggcatatagcgaagggcatatggcgaagccacgaggcctccatcaggacgggttcaggctgcttcggcctgacgggcccattcaccataagccgggcccaatctattggcccattagaagcccatgtatgcgaatgacactgtgtaccgatgtaaatgtccctttcataagggcaaccatgtaaattcccctgtaaaacctaaaccctaatagggggacctgtaacagggttataaatagacccctagggccatgtaaagcggggacccaagaaaaattctcaaagttaatacagtttattgctttccaacattgttgagcaaccacatccttcaacgtatgcagttgttgtttcgacaacaacggtactttcctaactgggaagtaccgaggctagatagtaacagccgttggtgcggatgcgaacaaccagataattctagtagcttttgcttttgttgaaagtgagaactatgaaagctggttgtggttcttgcaacatctaaagtggggagtggtgcaaaaacgcacatcgatatgcatcatccatgaccggaatgtcggtctgttaaaggcaatcaaagagctccaggaggatgctgatggtgcatactactggcctgacatgcacagctgttggtgcatgcggcacatgggagccaattttttcaagcaattcaacagtcggcggctgatgaacatgttcaagcggttgtgcaaggaaaatcagtctacaaagttcgatgagctttggaaacaacttttcgaggggacaaggacacacatctggtcaaagcagagcaacaacaacccgcatgatgtacatgtcccccaggccctggaactaatggatgatcttattccatcaaatggaaataagcgtaggtcgtcaaagaatatcaaatgttttacccattggattgagtgcgagccgaatgataaatgggcactcctgcatgacactaatggggctaggcatggcataatgaccactaatcttgcagaggcgtacaatgcggttcttcccaaattaaggcctttacctccaactgctattgttgaaggcattatgcacaggacaacgatgtggatgaggacgaggcaggccgcggcgttgtaacaaatgtctaacacacaaacacctttctgcaaaaaaatggcagagtacctccaagagaaggctaagaaggcaagatttcacacggtcattaccactgggaacgtcagacgaaaatgggaagtcacatgtcgcactaaagggggttttggatcttctactggggtcatgactcatgaagttactctagggcacgaatctgataacacatgttcgtgctcttgcaataagccgaagcttcttcataagccatgtagccatgtcctggccgcgtgcgctaaaattaagcttgattcaacatcatacttgtcgatgttctacctaaaggatagagtgttgaatgcatagagtgctgagatcctcgggtggaggtccctccaacacctagttgaaagtgggggtgataaaaggatctatgtgccagacttggatttgttgaaggctggtaagggtagaagacaaacacgatgcttaagaaatgatatggatgcatccgaagcgggagggcctgtgcggcgatgtgaggactatcttcagtacgagcaccgcactagagactgcaagaataacaaggagggcacatcttctagcatggaatctaggcaacaacgtgcaatgtcacgtcctgataaattcatcccgaaataaaaatcattctctaaaaggaataatagaattaattaaaattcgaaaagaaattggcaaacactaaaatacgtacaagaaaaattcaaatgtggcccggagaatttttgttaaattctccttggtctaaaaagagccctcaaattttagtggaattttcagagcacaaataataattattaagaaataaacaaagttaaaatgagtttataaaaagaaaaaccctaaaaagtctttttccccccccttcccctcttgggccggctcggcccacctccctccctctctctcctctcccccgcggcccaatcggcctcctccccgcgcgcgtgctgctgacgggcgggcccgcccgccaccctcgctgacgggtggggcccacctgtcatccctatcctcccgccgctcctgccgcctcgcccgtgccctagcgccgccgccgccgcgaatcccgccgcctcccgccgtccccgcgcgcaataaagagggggaaatcactccccgtgattccctccctctttccccccacttttccctctctctctccctcggattcgttcggatttactcccgcgaacttcgccggcgcatcaatggagcccgagatcgccgcgccgatttccttcccctccggccggcctctctcactcccaaccctatttaaacgctccccgtgcctccctcctccgtttccgccactcgccgctttctctccccgtcggaatcgagcccgcgccgtcgtcctctctctccgccgtcgcagccgagctccggttcgccgccgtcgtcgccccggacctcctcccgctttggcatcgcctccttcggcttcgccgcgttctcgtcgacctcgtccactcctccgtttcgcccgccgaccgccggagcaccgccgtcctcgtcgacccgagccgcgccgccgcctctttccgcttcggtcgccgttcccgtcgtcgccgtcgacccggggtgagccgaggaccgccatttcgtttcccccttccctcccctctctcgggcgccgctccgtcgcgccggaggtcgccgccggcgaccatcggggcgcgggcgcgccgcctcccgtcggccgtgccggcgaggccgcctttgggcgcgccccgcggctgccatgtggggcccggccgtcagccgcccgcgccctcgggtgcggctgacgcgtgggacccacggcgccggccagcgcaagccgcgtgcgctcggtccaccgtggaccgtgaggctgccgcgtgggccccactcccgtggacccggtccgcgcgttcctcccctcggctcacgcaataaatccgattttaaattaaaatttaaatgaagaaattcgcaaatatccatttaaagagcatataaatttcaaatggccataacttggccatttgaactcggaattggaccgttcaagtctctaatttttccttaagaagtcaagaacccatttttgtgctttgtttctgcttgttatatggagtttagtagagtaaaagccgtttcttttccgttggtcgtgtagacgctgcagcttcggaagatccgctcttcgtggaagttgaagccgacgtttgggaaagcgagcaaggcaagtcacatcatccttgaacatattgaatcccagtttacaaaattatgttgatttaaattattgcattatcgctttatttaaattcccgcgttatcactgttttatttagccatgcctatttacctttgttatgaccttattattgttattgttattatttccttgttcaccctagaataaacaaaaccccaactagtggacactctactcctggtatcactagtatgattttaggtagatgctacgctgtttaattaggtaacattaaggtggttttacaactctagactttgggatattcatatcacctggacactttggaattgttggtttattgtggaattggattcacaccgccccctctattcaaaatccccaaaatggttttaggctgggctcggggtgcatggttttgatagtagcacctcggccatataaggaccggtcttcgggcctctgttgcaaagcactaccgtacttccacatgtctagtgggtaaggcttagtttgtggctcagtctggttataaacaaaagtacacggatggagatggacgaagtcgggggtcgatggacatctctaggacaaatgaaggctacacgagctgcggcccggtagtcgagatgtcatggcacagggctggtgtcctgctgctaggggctcaatcctgcctacctgtcccggaggttccggccgtaggtggggttgggtcggtactcttgtctatggctaggatgggttggaaactatgtcatgtcttccgtccatatgccgtggtggtatgtggcacgtggttacacgtgaggaagatgtgtcttgtgggtaaagatgtacacctctgatcagagtataatctattcgaatagccgcgccctcggttatgggcaagccgagcaatgtacccaagttagtgttttaattcttaaaatttgctcaataactaaaatgtcgaatggttggcctgggttggcttgggacgagctgggacccagggtcgggttgccagttcggtctggatcatcgtaggccttgggttaaggcaggttcgtgagggttcacggccttgattaataatactgtgtagctctaggatcgtctttataaaatggctttgggcaactaagtgacttttaaatgttgttttctgcataacttaacccctatatcattaccccttgtacccccttgcattagtcgtgcatctgccggtgtggcttgctgagtactgtggttgtactcattcttgctcaatcttttcccccttcagtaagagaagctttggagaagaagtcttaggtggagtcttggcttataccccagttgagcgcctgtgaagatggagccgtaggcccgctagtccgctgctgtttatttttgattgtcaggccttaagtgcctttgtaataatgtaaatattatcgatataataaagatgtgtcttttatatcatgtttgtatggtgtaccccggcttttcctgggacggggattaatacactagcgttcgggaaaatgcaattttctcggtcgcgacatgcaaggaggaatagaaggggctctcaaggggctcacgatagggaggaaggaaacctactgtagttatcatctacactgtctggttatgtatgttcggtcatgatatatatgttgcattacgttgtagttcaataagtttgtaatatgtgtaatataagtatgtgtaatatttattttattctggtaatgttgtaatatttgattgtaaggtgttaccaagtttgtaacgtttttaaacctatttcgtaaggtgtgctcgagtttgtattcgtactctgagaaaattgtattccttttttttatgcattatgtactttttcgtatatgcacttgatgaaatttctaatttacctttcatgatgtacatgcagatatggaagaggagtggccttacccgttgcttagcaaagagatcgatgcacgacatcgtgcaaaaaagatatctgatggaaattcttgttctagtctagctgtcctgataccgcgtacagccggatggtgggtgattgatccacgatggaagccgaggtgcataaatggttaaagtttacaacataatgatatcgtactataacatatcctaatgtgacgcaggtcttcttacctaacataaatttcatcataggttgtcagctgcaggtcttcttaccttcgttcagatgacgcaggcaacgatgcattacgatgctagagaatctaaacaaaaacaaatgggggcacatagaaaacgacgacaaaatatcgacaagtccctacttatggcattggttgataggtggaggctagagacacatacattccatctaccgtgcggagaaatgatcataactttgtaggatgtgtctatgctcacggagttgcccatagccagccaggcaattgtacttccagacccttcggaagattggagagatgatattgtatcacgatatgcctgtattctgccacagtacgctaccggtgatacagacgatgatgaggataaaatatttttctctgaaaaataaactcatggccccacattgaagtggttgtcatagtttgaggtaattgaatatttttaattaaggcatattccattcacattcacatatctcacaacacattgtttttttaggtgcgatatatgcctgacaatgtccaggagtaccaactgacgttgtaccttgaggcttatctactttggctgtttggttgagtcatgttcaccggctcgcacgggaacactgtggacgccaggcttatcccccttgctcaccaaattgctgaaggtaatatagtgccatctgcacagtttagctggggatcagccgtccttgcagccacataccgtggattctgcgacgcttgtgttaagaccggacaaagggaggcgattttcacagggtgtccacttttggtcaagttgtggtcgtacgagcacttctcgttcggacatccatacatgagcgtggccgtggcccacaaggacgattacgctgacacagttgatgatcgtcctaccttcggtactcgctggtgctacggaccggtacgtatgcttgcattaaaggaatatttctgtcaattcaatgatactgcataactaaatctgcaatctccgatcgtgcagccacagtgggcgagaatccaggtgcacaatgtgtacaagtacttcaccgagacgttcgaaagccttagggaaaacgaagttcggtggacaccgtacacgaacgaagaggccattttgcgtggaccaaatggagttagcatcttatgctaccgcgatgaagcgtactggatgacatgaaaaatgctggtgtacgacatattcgtcgaggggtataatgttcaaagggtaatgcgtcagatgggactgtaccagcaagttccagttcctgttggacttcaccttccaccagatgtgcacacgtatgttgttattttacatcgctttaatttctgtgctctccaacattgtgagatataattaacagctaattgttgtatttttgtttcatgcaaaagaggcaagctgacaacaggtatcgtcgatctatgcacttaaggatgaccccatggatagaggcgtggtcgcaggccttgaatgatgtcgtccacgagaccagggcatacgatcacaacacttacgaacaatacatggcctggtactcatcgcagactcgcatccggctgcttgcacccgaggatcccgacgagcgaggtccacccactattgagcaaatatatgatctgtagctagcaccccccgctcacttgacggtactactcgcatttaaatattttattgcatcggtgtctccttatacatggggttccaatttctaacactgttgctccgttccatgcagaccgacattgcaggggagttagtaagggatgcgaaaactttgtgggagaagcttagagatggtatcgcgggtaccaaccaggaagttatggccacggtcgactccctccgtagaaaaggtaaacgaatcatgcggctcgcgtcgtgccgacattcctcgaacgtgtatactccggcaacatcaataaggacgttcgagcaaatgccggagcgtccctctacctcttcccggccatccacctcagcccgcccttcagcctccgcgcgatgatccagtgatgttcgtgctccagtaaggtcaacttcgtttcgtgaggcacctactattccgactatcccagaaatcactcaaatgtcggaacgcctaggaggcttcggttcaactcaacgtaaaatacgttattacacaatgccaaattaagtgccatttatattaacgactaatttatatgttcgcagcacaaccggaacgggtacccccacatagctctgcgcccatcacctctcaatggcagggtgggtttgcggcgttcgctggtacgggatagctcataaaaatgctgattttttttcccaattgtttatgtgaaatgactaaatgatgttttccaattgatgacagagggaacgcgaatggtccgtcccgtggctcagatgcctcatgcaaggccacatatgattcctcaaatgcctcccgatgtgccaacctcacactggcagggaggatttgcaccatttgcatgtccgtgtacattcagtaccatattgtcacgcatatgtccacacgtaattttacttgttgctaattaattgcatatacaaggactagccaaggtatccgtaccataccccgagtggaagcagaatttatcggtcaaggagggtttacgtcattaggcggtcagtctccacttacatctaatttcacattnnttattattcaatntnnataattttcatgtataggaaatctattgactatttacttttctgaaataacaggncctactcagtcggttccactgcatgcacctacatatggcaccaacccatggaaagcacaatccatagattcggtgggtacgcacanccatcactctctatacacatatatcgatggcatttccctgtcatacatgactcgcacttcaccaacggataataactccgtgacattttatatggatgcaaggcacgtcgtttggtggtggagtacatggttatatggacttgttgcaacaaggtgattggctatttggtcaatattcctcgcatcgtaatgaaattccatatatgcaagcaccgtcaacaggtttggatttttttttgtgttattgttgtttgctccagctttgataatttcattgatatctacattgcttatgtagggtcatttcgccctgaactaatgtcagggtttaggccttacactgcatcgtacggtgacatttccagcttcggtggagggtcatcattggtacccaatgagcttcgggcttcgcaaactgatgatgcaccccgggtgacacagcccacacaaccagaggttgacgatttacaaggaaacaacaatgacccgcatagatctaaccgtgagcgccatgagccaaaccgtctgtcactctcaggccctcgacatgccgcaggaggaaagaaaaaaactacaaaaaagcccgctggcatatctaggactatgactgaccatgatgacgagtagaggttaacattatgtctttaagttcactggcaaccctgtctgaaccttgctatgcttttggctttctattactagcagagaacattatttatttgtactggttattcttcatgttatgtacgatgtttcgtcgttcataaatatctcatatattttcgcccctattttgtacgcagttaacacatatgatttttgcttaactaataatttttcgtacgagagctaacaaaaataatagtctcacaaactaaattaatagtgcaatttcgatgttactcgtgcggttaaaattggatagttgtattactttttactactgtgacttaaattacatactaatttcttttcacagagatgcaatcatacgcacctaaaatggcatcctctctttccaatcatgggacatgtcacagagaatcaatcattcacaattaaacagtgaagattccactgcgccgaaagtgccttcgtcgcgtagtaattactaaagcaaacagttaagcagcatgtgccaccgaaagtgacggtgtccctttgtaattattcacttcacgagtgaaacagtccgacgcgccgtcgtctctttctaataattgtcactatgcgtagcttcttgcaatcccctataaataacaaccaaacctagcacacaactacatctcttcttcataaacgttccgctggttccaacttcgtgttgcatattcttaggcccgatcttgaggcaggaactgagtagttggtgaactcgctctatgttgttcattcactcgcgacacggttcctgtcccaagatcgggtctgtgaatatacaaatgtgattttttttaatacattcttacacccactctttttttcaagttccagcatccgtttgtgaatatgacctactactgcaaattcataaactcggtgttgcatattcttaggcccggtcttgtggcaagaactgagtagttcgttaactcgttacccggttcttgtcacaagaccgagtatatgaatatgcaaaggtaattttctctgtgaatatgacatattctaaattcctattctttgtcaactttgtaaaaattgctcccgaatgatctctctactcctttatatatttttcctatattctaaattcctatattgtttctttcctatttgtatagtcgcactccgtcgacaccatctcctcctgcctcaaggctggcatgtcgggtaatgaacctgcttgcgtcgccatctcctcctcttagcagtggctgctcgagctgttctaatcctcttgcgtggtgttgtgtggtgtgaattgcagtggcctgatatgatttcttgtggagagacgccgagtaccaccaggaaacccttgaaatcctcaagctcgccatcaagtccaccaagaagctctgggccgtgagtccccctcctcaccaccttcagatatactgcagttcgatttattcatggtcatggtctcttagtgttgcttttgttgtttttgcatactgacatttgcgttctgtactccattggcaggtcatgcttgacacagtcggcccagagttgcaggtggtgaacaagagcaaagcctccatctccctgttattctcaccccttaccaggggcaggaggcctcctcacatgtactgccaattaacttcgctgggcttgctaaggtaatacctttcagttctattttttccggaatcttattaggctgtgcatgaatgattgcaagcggataggtaatacctttttgtgcaaaattttattatgctgtgtacgaatggttgcaagcagacatgtccttcttttatagaacttactattttgtcactgtgatttccagcatatgctcagtttgatataaaaaatgacttttttttttgttctttgcaggctgtgaagccaagtgccacaatatttgttgggcaatgcttgttcacaggcaatgagactacttcaatttggttaagacgtaaaaaatattcggcatactgcacttagcgttctgcatttttttttccttatgtcattgtcagtagaatttactttctgcccaaattttctgataccaaaactctaatttgccttgtttaggtttcagaaaacaaagccgaatttacatgtctacactggtatctccgaagtgcctcgttttcaacgtcaagaatcgtcagatgctcaccaatctgaacggccatagcgttatgttccttagaggactactcgttaaggtgttcctacaagaactacctgttaaggtgtttgttagctttatggttcagtatttgtgtccagtatccaccatgcagctgtttcatgcaaatccttttgtataacaaatattctatagactcttagctttctaatattgctgctctttccatctaatagatttgtcagtttatagtcattcctatattacttacgctactgttccagcgtcagcatcccactgcagattaaaagggtgcattgtgtttcttattttactctgatttatatatgtgcatgtggcgtgggttagactgaatattttgtttcattcacttagaatgatttaagttagattaacagctttgtttttacacctttctttgaatgcccatttcgacgtctgttttattagttctagcagtcattctaccgttaattgaacatcagtccaaccaagatcgggctaaaagcatatggttctgggcctaaatacacactgcaaggacatattctgctaatcactcatcaatgcttgctaattacagcctattattacccaggatgacagcactctgatccgactgaatttcttccaggcggcgcgccaatggcgcgccccatcgtctagtttggtaatcctttttttctcgctgaacgatctagtgaatgatgcaactacggttacagattaataaagcgcgtcaaatggcttctctcaaaaaaaaaaattgatagggtgcggatgctgatgcaaataagattatttcggatattaaaaatggcacatacacgatgtgataatggattaaaattgtgaggtgttatgtatatacgcaatcaacacggttcataggtactattgatgtgtaggggtagtgttgttgtggaagttggggaagctacaaccgttgtcaatggagtcatgtgggctacgactgattaacgtcacctcgctgtcgtcggtttttttccttttgaaaactcatgtattaatttacattactgaggttacgtaatactaatacattagcaattacaatgcatagagcacacatatggactatggcacatcctagttttctagaggactttgaaagatttgaaaatagaaacaatcgagtccttagtaatgtaaattcaagaagcttgattccaatatagcttaaaataagatgagttgcacatgattgaaccactgtactatcccaaaagggatctcacacaaatggatttttaggcgatggcatacaatgtgatatttcagccacatcatagaagatttttgccaaagcattagccaaagaagacacaacagaagttgttccaaaggtctagccccaatccatgacaccagcgaagcaaacataataagcacagcaagatgcaaatgaacccgaagaccgtacccaaaaggggcctccatgcataggaggtcggggtcaacttgggttggctcgacaccattagtcacctcatgaagaacttccaccgaagatgaaaaaggccttcacccttggaatgagctcaccagagatataggtgtagaccggtgcaacctattctcgtgcagatctggaggcattctaaccagtagaaaggacccgtcgacgtagtgactcatcggtgggatcaaatcccatagtgaactccatgatggcagcaccaatgaccagctctagaacaacaagagcaagatcgactagattaatctagacaaacgggagaacccgactaaaacaacaactactagtaggatggtacctaacccctctttcactcttcgttggtgacaaatctccagagagaaggatgaagaggggtcggagggatgagagtgctactgttggggaaatttaggagagaccttgcatgtttcccttgtgggtttaccatccggggactaaattgcccgatggaagatctacttgttttggcattggaaccgttgttatcaagtgacagaagctaaaaggatgttgcctcgctatatggcgtcattgggaaatacgttgacatgggagtgtgggacattgtgttccattttgtgttggggcgcatcatcgtttgccactcagctcgatggagagcagagtgttttccttgggcgcacgtgtgagtgggcgcgctaacatgagaagttatgtagaggtgggattggagatcatgaggaggagacagagaggaaagatgagagctagctaggttgcaagagggcacacggaggtggatcgacttctccccaggcgtcgacagcgacacttgcaagagagcaagccgtctcgcgtgacgaatccaacggcgctcgaggctcttctctagtggcggcagcgactctcggcactagaggtcataggggacggtgaccctaatgacagtggtggcggccatagagggcaaatcatgatttgttcctgggtacatagggccacacataagcgttacatagggcaactctcaatgactcaagttagaagtcatacatagagcatcaggcatctgaaattggcccatttggctttccgcggacagcccatttggcggcccgacgcaggataagatgggatcgtccgatctaatggatggtctcaattgatcccaacctagataaatacccggtagccaaaaccctaaccctaaattcatttctcccgatccccttgctctctcactcccgtcatcgctgccggcaaagggagggggg

SEQ ID NO: 3019 - DNA, 605 bp, Oryza sativa
ctcgatccccctctcatgaacaagaaatcccaaaaattggccagccgatacaccaaaagcacactttgtcgggttcatcttcaagccatacttcctgggtctctcaaaaaccttcctcagatcggctatgtgatcgtctatctctttggacttgacaaccacatcatcgatgtaaacttccactaaccagccgatcaggtcatgatagatataattcatggctctttgatatgtagctccagcacttttcaagccaaaagtcatcacaacccagtcaaacaagccgattgcaccaggacacctaaaagatgttttatggatatcttcttcagccataaagatttggttgcatcctgtattaccccccataaaacttaaaatcttatgtcctgaggcagcatcaactaactgatcggctactggcagcagaaactcttcttttggggtggctttattcaaatccctgaaatcaatgcataccctgatcttaccagacttgttgataaccggaactatactagaaacccactcagcatatcggcacggacgaataaaaccagcatcatatagatgtttgatctcagccttcacaggttctagcatat

SEQ ID NO: 3020 - DNA, 695 bp, Oryza sativa
gttgttgggcgtctacgttttcactgaccggcttgccttcgcagctgcagactggtgtttccgcctgcacggctggcctttatgccgccgttgtcgggcgcctacgtcttcaccgaccggcttgcattcgccgccgccgactggtgtttccgcctgcacggctggcatttatgccgccgttgttgggcgtctacgtcttcaccgaccggcttgccttcgccgccgccgactggtgtttccgcctgcacggctggcctttatgccgccgttgttgggcgtctacgtcttcaccgactggcttgccttcgccgctgccgactggtgtttccgcctgcacggctggcctttatgccgccgttgttgggcgtctacgtcttcaccgaccggcttgccttcgccgccgccgactggtgtttccgcctgcacggctggcctttatgccgccgttgttgggcgtctacgtcttcaccgaccggcttgccttcgccgccgccgactggtgtttccgcctgcacggctggcctttatgccgccgttgttgggcgtctacgtcttcaccgaccggcttgccttcgccgccgccgactggtgtttccgcctgcacggctggcctttatgccgccgttgttgggcgtctacgtcttcaccgaccggcttgccttcgccgccgccgactggtgtttccgcctgcacgg

SEQ ID NO: 3021 - DNA, 1862 bp, Oryza sativa
  unsure (1)..(1862): unsure at all n locations
tgccccattganagtcacttctcctggtacagaagctcatcaacaagcgatagtgccaagcaaaataggtgtgcttttttcttgatctaccatgtatacatccaagtcacagctggtgacaacaaatgtcatgccctgtcgtgcaaaggtaaaagaatcccctggatttttccatgaaaagttgtagacatcaccaccggaatttatagggatgacatgggtggaggtgatcggaattaagttgaagtggataaaatagatattcagaccatctaccccaatatcaccaagaacctctgtcgatccattgttcaggaagagtttaggaggctgagtggccatgtcgcatgtgagactgaaatcgacatggcggaaacaaccttgtcctatgccaaagggataatcgaagctcaatttgccgcatctctttggacagcgagcgagtgtagaagtggagggtagggatgcattagaaggacttggattggtaccatgatccagtaggaaccttttctccaaccgtctggtcataccctctggatatggggtgatgagatggccataggagaggactggactgagtgcaaagcttctcttgacttgagctatccccaataacacgaatgaaagcaaaggtaacatggtgttgaggtggcccatctaaactctgccaagctgctaccctctcagaagtttaaatataagtgtgtctagagctatgcctttcagcctttgcctctgctcttacagttggccctctatttataacagaatgaaagctagtcaatttcagtgggtagtgacgaaattttctataaaattttcaatattgaggtggggaaggtgtttatacagtatgtggcgccacaagctcttgctacgtgtattggattattcaaactaccgaacgttgaattgtacttatatgctgttggcaaattagtacatgtagtggttggaaagaaggatgagtcactgcatttcttgggacaaaaatatgttaatgtctaccctcttcgttttatattataagatatttcaattttttaagttatatttgtttaaatttaatcaagtttatatatagaaaacactaaaattttcaacataatacaaacatatatattattcaaatatattcaatgctaatatgattagactaatttagtattatagacgttgctaataaatttatctgtaaatttggtcaatttaaaaaatgcgattagtgaaaacatataaaataaaatggagtgagtaaaacattttattatatttggcattggactaatggatttactgttatttactcaatccaggcagtgctatcttgccacccggtgtcaaaagagaagacttcaaacatgtcgatataaaaacaatgacacggagagttactatcaagcaggtgacaccgtgtaacacaaagcttctcttgacttgagctatccccaataacacaaatgaaagcaaaggtaacatggtgttgagatggcccatctaaactctttgccaagctgctaacctctcagaagtctaaatataagggcctgtttggtataactccaactcctaaatataactctaggagttgaatttggagtggagttgaacccnnccgtcctctgtattgagacccccgagaggctcgctgctaggctacgcgcatatgtgcncgatgtgaccccttcttataaaaaactccactactcccccaaaagtgtttcaaaaactatgtgtgtactacccccaacatggttaaaattatccgtttggttcaatactcggcaatatgttaatttttttgcgccgctgtctcctttggaggtttttttccccgatgaccaatttttcttttctcc

SEQ ID NO: 3022 - DNA, 10628 bp, Oryza sativa
  unsure (1)..(10628): unsure at all n locations
tctggcaccaggagtaggttctnctactgcaagnacctcatcatgaagtcatcctttgccacttagaagtagcatgttggattcctttttcttcattggaaatggtagtaatcccaagagaggtcactggcttaacaaaagagaactcgtcacctatgatcagtgtaagtagtgtatgtatgtgtgtcggcatccttcggggcgcttcctgcaatagcccgtaactagaaattcgtcgcgccaaatggcgcgccctttttagcatgttctatgcatatgaacgtagaattttcaaaagattttggtaggattagaccgacttcattaacttgttcatttaacatgtagatttattcaattaaaaatcatcatattttaatctatttatggcatagctattaaaaagtgtttttatgtaagtctacattatttaaaatgtacttattttaaaaaaatattgattatcaagctttatcttcagccaaataagccatggtctttaaaaataagctttacaaaatggattgttttttatgtaagtctacattatttaaaatgtacttattttaaaaatattaattatcaagctttatctttagctaaataagccatggtctttgaaaataagctttacaaaatggacatttttaaataacgaccgtactcgttttttacataaaaaaagaccaaatcgaatttatgataaaaaaaacaccttttcctcgttcaaaatataagcattcaaagtttatatcagaatatagcaagagtatccgtcccttatctcaaccaatcataatatttcttatttaatttttccacttactcacctagtttatatttggtcttcagctaagaactatgtaataatggctatagcttctattgaagtaaactggattttatccattttctaaaaaactcacctagtttattaatacttatacccaattccaaacatttttttagacctacaatgacggggcatttctcaccaaagtagaactaacaaaaaaaaatctactccaaccccgaaaactttatttctagcaattcttcattttgccaaagttatataaatatcgtaaaatattttacatgttaaatataactatatcttttggatccatcaaaacatgacaatttaaaagctgattccggctatcggttggcaaaagtgaagcatttattaactctctttattattttatttgtcgatacttatcaactgcattagtgcaaagagacaggtagagtaatgagttttctagagattctgatgtgcaagggacatcacaagagcttattctgattgacacgtggcaaaattttggtgatgtttagctaatttttcagtctgccacgtggcccaataacaagctagaatcatgaccctgaaatcggtattaaagaaagatttatcgggaagacattcaccttgggagattgcaaaggtcaggctccctgttttatagcgatatatgggagattgggaggtctcgggggcatatgttccaataatgaaagcgggagtgtggatgatcctgtcgcatgtcattagaaacaagggcatattgattggagtcggcatggactgtgtcccacacgacttagtcttttttgtaagtaaagattgactaatttgcatgggtatcccatattaacttgtaatctaaacaaaacttgcaaactgatatgaagaaatgaagctagataaataacatgtctgtgattcaggagtcgggaacattacactttacttcctctgtttttttaactaactaatgtcatgtaatgtaaataaaaatggagtgagtatctagctaggttcgatcatcatagaccaatttatccctgcaggggcgaaagaatgtcatcaagatgctgaaagaaatactcgatgagaggaagaacacacaagagccccatgaaagcgttgacttctttgatgtgatagaggaagttaaggccaagaatcctgatcaaatgaccgagaatgccgtgttggacttgctctttttgcttctatttgcaagcttggaaaccacatcatccggaataactgcaatgcttatatttttgacagataatcccgaagccttgcaagaactaatagtaagtactagtacaagtcatatgaactcctttaataaattcatactagaaaatcaataaggtcagatgttcaatatttccatcattgataccttaggattgagctatcatataggagtatgtgacaaccgatatgttaagacatatttaattaataagaacatatgtatacataagaattatagcaggaatgtgaatttgatatctacgaatgcatatctatgctccttataaaaagagtattggtggtggtggttctgacaccaccagaactcccaattttttatgagacaaaaaaaatagagcaccacaggtcaactacttgtctgaggtcaaaggatccacgtgtcgataacaaatatgtacaacaattaagatatgataataatgggttaatggtaatcttatttaattaaaatgctattggctattgcaacgcatgggctttacccaaaaaaagttaccgtggtaatgctatacatttccaaataatccaggatacgttttcttgaaaattaatgatgtttggtctttttaggaggagcataataacattcggaagagaaaggctgataagaactccgaaatcacgtgggaggaatacaagtctatgaaattcacatctcatgtatatgccttcaatttcttaacttcatttctacataaataattagcaatctacacatgtttatggttaaggccaaatcgtcgtacaatatatgcatacactcatctccttaattatttgtaaccttaattatgtgtaggttatacatgaagctttaaggctggcaagcatcgctccagtgatgtttagagaagccatagaggatgttcatataaaaggtaaaaatgaattgtttttaacaagaattagttatacaagtcataggtaaaagttctatacctcctttccgtattataggtagtttgacaagttcattgaaaaacatagtaactgttacaacatcaaattagttttatttaatcaaccattgacaatattttataatatatttgttttatgttggaatttttgctacatttttataaagtttgttaaatttgatgaaatttgacttataacaaacccaaaatatctcataatatggacggagggaatagtatcaaatttgtcaaaaaaaaaaacattgcagtatgtcttcttatgagatatattggtataatttatacaggttttgctatcccaaaaggatcaaaaattatgatttgtccttacactgttcacttaaaccctgtggtttataaggaccccaacacattcaatccttggagatggaaggtttgtgaaattcataaggagttaatttctatctgatataatacttaaccatgcattaatgtatatctatattcctcctagtgaaaaccaatattgagcaattaaggagccaacttttttgcatgtaaacacatgcaacattgtaatttcaaatgtgagcaggccaaatatttaagtatataggcaggattctcaagtgtagtatagttccatcaaacgggatgtccaacaattaacatgacgagccgctgaattgagttttattacattgagataatgtttgacatacttaattaggtggtttgttcacaacttacatgtttaaatatggtttaagttttgttattgtgctacataatttattagtgtaatctgaatatagcaagctaagatacccaaacaattgctattggctgataaataagagagtttactctactgatcttgctaagtactacacgttattgctagaaataatggagcaaaaagcccactgtttttgttaggcatcaggtcgaaggattaacatggtcatgtggatattttgtctacaaatagaattccaaacatagcttactcacactaacataaaggcttgcatgtgcttagatatcaaaaaataggattaaggagtgcggcctatacagcattaattccctccacaaagttttgatttgttgcatgcatgttgctatatatgtacggaatattcctgaacctgctagtggtgcctccaaggatttcatggcctttgaaggggggctgcgcttgtgtgttggtgctcattttgccaagctgcagatggcggttttcctccactgcctagtcacaagtccaggtaaatttttcactcctattcgtttcattctacattaagtatcaaatcctaactataaatctgaacatgtgaaagatttgattcttttttatggagggtgtacctttttcagaatccatctgagaacttagagatcattttcatctgtattaaaacatgtgtatacagcttttgcaaacattttgttatatatgcaagtaatgagtgtacttaggattaagagaaccacttacctatatatccatggacgcttaagtgcactgcaaaaaaaaaaattgatctttctgtctacgattgtcagttggaaagcaatcaaaggaggaagaatggccctttctcctggactacgatttcctgaaggttttcatatccaacttttcccaaaagcctgaagtacttggtccatttacttcttgctcctacacaataaataatgttcataagcatctatgtttcagatgcaaattgctcaatgctttgatgtaatttcttcacttcgctatatatgtcgtgtgtgtgccgcccaaactataaataaatatataatttatatatgtttgagtcctcgtaagtagtaacaagcaatttgctaatatgttgtcgcatactcgcacagtcttcacctatgtcctcgtatagtaagtactatgtggaaatgcataatgtatgtaaaatgagttcgattcataagaagcatatactccctctgttcaaaaacaaaggtattctagtttatttagcaaatgttaaggtttgagaacaaaatgctatgggctacctttgctaaatgagtactccatgcatgcgtctatataaaccataatcaattcagctttttaatgatatttcaatttcaggtttctacctaagttgcaacatatactcccacccgtttcacaatgtaagactttttagcattacccacattcatttaaatgttaatgaatctaaacacatacatatgtctatattaattaacatctgtatgtatgtgggcaatgctagaaagttcatttaaatgttaatgaatctaaacacatacatatgtctatattaattaacatctgtatgtatgtaggcaatgctagaaagtcttacattgtgaaacggagggagtagtatttatctgaagattcatattgttattgcatatctatagagaaaaaaattctttgtatctactatctccatttcttttttttaaggaaagcggcaagagtattgccgaatatattagaagaagagtaatatgcggtttacatgattacacgattacataattgatgcgacgtaatagcttagaagcatcccaaaaccatatattatggtttgatagggtaaaaatatacatcatggtggttgaaatacaaaactgctttattgaataacttagatgatctggtgtgctgtccgttgcacgtccggttcttctcctctgaagatctttgcattcctttggagccaaatatgccaccacgtcttgacaagaacacccacctttctccttactcncgtcttgttttcattctgcatgatacctgccatccattcttttatggaacataagtctggttattctgaataccttgaacagcagagacaagattccatgtttcttttaggaaatcacattgtcgaaacaagtggtcggtatcttcaaattctcctctacataaggggcaaatccagtcacactcccagtgccgaatcagcatgttttcagctgttagaaccttgtggtgtaggatgagccaacctaagaatttttgttttggaagcgccgacgccttccagttcaacaggaaaaccttgtcttgctgagaaccaatgaattggaagagataaggactttttgccgagtatgtggccacattattccttctccattagattgtgtcttctatttcatttagcaaagtaacactgctcaagagtcctagatcaatgagttcctggatctcttcaaaatttaaaacaacctccgtttcatgttattataagactttctagtattacccacattcatatagatgttaatgagtctaggcacacatatatgtctagattcattaacatatatatgaatataggcaatgctaaaaagtcttataatatgaaacggaggaagtagatttaaggaatcttaataatttcccttttttttcttatgcatattgtttagggcctattttgttttaaaatgaaaattgaattgtttaagatctcacataacaaataaatggatagttggggttgtgatgtttattggaaaagttcaactgctgaaagaaaatctgaaaaccaaataaataaagtacatgtcttggatttgtgcggaccacatctattcctaacattcttgtgcacgacctgcaagcctagcatttggaaggcccgcaggattggttattagcttagtggtagaatgaatcactgatattgcatcattgtgcctgggcaataagttctctcacctatatggatagttgaatgtactcattagcatggcatactcgtcctgtttaaatcagggtttgaaacatgtatttttctttttcctatgggcccatgtgggtggaagcaaataaaaatgagaaacatgttatccgctcccgcttcgcgttgccggtgcaatgctaataatttcccctttttcttatgcttattgttaatggcctcttttgtttgaaatcgataatacattttttttaggatctcacataacaaaaacatggatatttggggttatgatgtttattggaaaagttcaactgttgaaacaaaatctgaaatttgtacatatttatgatttataaaatttaaactgctgggcaaagccctggctgtactttcagtcaaaaaaaaaatctgaaagctaaatgaacaaagtacatgtcttttatttttgtggcccacatctgttcctaacattcttgtgcaagccctggaagactagcatttggaaggccccacataatgggctattagcttagtggtagagtgcagacaccactgatattgcaacgttttgcctgggcaataaggtctctcaccgtcaatgcactcatcagcgtatgacccaaagatatggatcatgtaagacgcattagcatgggcatacaagaaaatttcacaatgcaacttcaccatcccaaattcacccaaaaaaaattcatgctcacaaattgacaaaaaaaaaacagccaaggatgtcgtcgtagtgttggagttatcctccgtagtatcatcggctagcgtcttggggaagaagccgaagctgtgcacaagcatcggcgtcgacgagggagggcggaggccagccgcgacgagatccacttgaggccaggtggcagcgaatccactctcccgagggccagcggtggcggaaccgccatttgttgctgctcttgccgccgatgcatgagggagagagaaaggaggttgcgtcgacacagtcatcatcctctctgccagatccaccgttcacaggccaagccaccacaacccttgctctgttgcctgatccgcctcctaggccccgcctctcctcctcctcgtcgctgagatgccatcgatgctcctcctcatcatgactgagacattttcgccatcgctcctcctcggagccgccaccttttcacctccttgttagagccgtcgttgctcctcctcgtcaaagtcgccgccactgcaaccaagtggtgggtttagcatgagagagagagagataagtggcagggggaggggagagaaatgagtggtaaaggagaggataaggagatggggcttagattttttttatgctggggcatgaaattttcacgtacgaagtattgatttttacaagtggggctataactatagcagctcctgctatttttccaatcggtttataagtgggaattttatggtccacctggagaaatgaaagctaatgttgtaaacactagtacagattcggccatccttgacgagtcatatgtgtcgagcttatatgacctattttggatgacgcatctctaacggttcaaaaagtatcccatttaatacatgactatcagggatgatccgtcactgatataaatcatctttgtcaggtcatcgttctaacacatcacaggtaacctataacgggtcacaaccataccccttcaccgatttaaagtcatctttgtcgggtgaaagttctagcacgtcacggatgacctataatgggtcacaaccatacctcgtcattgatttaaagtcatctttgtcgggtcgtagttctaacacattgttgacggtcgttatcgaccagtttcggctgtcaatattacccaattaatgaggactaactatgcttgcaatgcattattccataaataaaatattctattccactatatgcttggaaaactaaccatgcaggagaagctatcaaaatggaggagaatcgacagtacaataatcgatcaatcaaacagacgttatcgagaatcagacttatggatggatgggccaagaactcagaaatgagctatcattctgacccaaaacattgtgtaccataaagtggggcccacatgacaacatcctgaagaaggttgtgggccaggggagccagccagggttcggctgaacccccaacttgcccaatccagcccattttcggccaggcagttactaccggcatcctatgacggttcgagctaattctacctgaagaaactgccatggacacatggcaagaggagatgaaatatgctctttggatgcttgaccatgtcacttgtcatgaggagagcaaagatgctcctaggattcttggagcatctccactctcccaaggcacctcatgggctataaatatcccttctctcattcattcccacacacacctcaaaaagaagatcaagagctctctcaagtattttttagtatttctagtgttagtggagtaggaaatagaatagtcttcatagtcctcgagtcttcaggagaattcgggtatggctttaataactttcctttcttcttttgtaagacttaatgaattaatagaatattcttctttatacaagtttggtattttattccattcatattacttgagtaccgactttactttatacttgaatcaatatagtcgcgtaactagctttccagataggtgtattggtgtgggtttagtgtccgattattcggatgctctatgtcggttgcaaggatgtagagtagtatttagtaatgtaagcgcggtgcttagattattagataccattaataggggttatatactgcggatgagaggtgggccgctgatggtgacagctcagtacgggtattcctctgcgctggtatataatcctaagttaattccctggggagggtactcctctgtatttagccccggttgtatggtcatgatgggctgtcgtaaggaactcggtagacaggggtggcttcttgaaacaccgagaggacactgggtacggggtattggttacatgactatataatagcaagtatagactaaagatgtatgtatactagaaggacaagaatgatgcttttcttattctttctccacttagcttagactatattttagtgagagtagttcttagttctttcttctctgtgtcaacctaccctttgaactgaactaactcctacatagactttgatggatacaagtaatatatgtattgttagcatagtactctcttatcatatcttcccttgggataaaataaatatgatacattggaatactcccgggtgaaatgctacaatggtatactcgtgagcttgcggatcacatctgtaaccataatataccaggattatttctagtgctacttctgggaattatatttctagtagtgtcgctaggaaataccaacacacagcatgaatgacccataacgggtaacaaccatgccccatcacagataacatgtcatccatgccaggtctaataagataacccatcaaaatgacagcactcatctatgacaaatcttaatgagataatctattctataccactgggtttgtgtgagttcaatgatttgccatcgacattgtatctttctataatataccggccactttatcaattgttctacaatacgccactgggttggacattcttttcaaaaatacccaaaatacccttatgaacatacaaggttaacaattgatttatctcactagaaattccaaaaaaatatgaaaacttttatgtggtctctttacacaacatggaaatttgtataggagtttcaagttttttacacttctttttttaaattataacttatatgctatattgtatataaaaatatttttttattatttgtaatataaaacaactttcacacacta

SEQ ID NO: 3023 - DNA, 3704 bp, Oryza sativa
  unsure (1)..(3704): unsure at all n locations
cccgcctcgcacgcgcacttctcaactctggcntttgctctctctcgcgccccntaccgttgtcgcgcgttgcgcgctcgtactgggttgttaattgtttgttcgcgccccccccacccccccagaacgttgatgacagtggttagnaccnactncatnaccaatggcatatcatagaacaattgctaaagttatcggtatattatagaaagagataatgtcgatggcaaatagttgaactcgaacaaactcgatggtatagatagattctctcaatcttaattaacacccttcacggataatgttaccctgaagggtgacaattacaaacctccacgcatgaggaaaaattcaaatttttgaaattttcaaacaacctcagattatgaaagttgtagatgtcaatgatatttataacttcaaaactgataacatttgaatttgagatagtttacatgcccgaatatctatacctatactaatttggcactttttaggagccctcacgttaataagaaagatccgaccgttgattagattgatcctattatcatgaccgtaaatcatacttaaaattatctcaaataaaatatgtagttttgcaatattatatgctcttttagttatacatacagtatgagctgtttttgtggtccaactatataaaatcaatatgtgtttgactgttattctatgataagcaattggcacctgagattattggttttgatatttggtgattattggcaaagtggttttggagataattggatttgtaggtgatgaatatggactgcttattgtcgtgtcgggttagaccaggcaggtgttgccggtcagaccggaggtatgcgtgcggtcagaccagcttgcccgcggtctaaccagccgactctgtgtcggtttcggtttcgggttgtttcattggatatccgtggatagttcatttttatggcttctagatggatactatgtgtatataatactgttgtttgctaagaatgagtcaaattggagatagctgggtctcggaatatagttttttttgtttgattcatgtgtaggtgtcttgatgcctcgaaagagtattgccgatgatggattaggagtcaacttggagataaggtgatgtctggacggtcacatatcatgcaagatacttgggctaaagatgaatgcacgtggttggtgaagattccatatggcatacgatggagatattgtgtgtgtattggatgcggagtcaaatttggaagtagtccaaatttggtacaattggagtttgtaaagttggtttcttatacaggaaagtttcctagagggatttggacttctggtatgagtttggttcgtggctttaggctgcctacctcatgtataaatagagagggagggtgaggcctcccggtatcgctttagagagcattgagttgtgagaatagtttaggtttcgggtttaatggagattttcgtgaggagtgctgttgctgcactttgtaaacatagagagaagtaataaagttatcatctactttgggtgttcttcaatttgtgtttggtcgggttcggcggtctaacccgcgagacaccggcggttagaccagtgggtacacggcggtcagaccggcatcagtgacaggaagcataggcgatttcgggatggttagaccgggtgatctactccggtcagaccgacgacttccaggcggtcagaccggcggatcaactgccgtcagaccgcgtttcatcgattcaacggtaacttttaattccactcaaagttttggtttttgggtaccgtactacaaccattcaccctttctggttggcttagtagaaaagtaaccagcatagtttggttacaattaaaaattaatattttaacatgacccgtgtaatgcatgggttggtgacaactgcattataagtggtgagagctattttgaaatacataattttgaatttttcaaatgatctcaaatggagacatggcctatatcaaagtcaaagggtttgatgagatctacaactttctaattgaaaatattttcatttaagattgttttcttctccgaataagtgttacaagtgatgtgatctatttcaaaaatattttaatttaatgtgtttttcaaacaaccttggatggagatataccctacactaaagctgtagagctcgacgagatatgcaactttgtagttcaaagcattgtcatttgaagtcacctagcatttcaattttgtgttttatatttggatataaatagttaaaaaataacatctgattaccaatcaacatgtggtatgtaggtgggatggtaagattggtttgcatgtgttgagaggtcttaggtttgaatctcatgtatgacatgtatgcatttaccacttgaaaaataaataatttctaagtagtgatatgtgaccattgttagaatatccatgcaatattttaaaaaaaaataggatcttttaggtttgaatctcatggatgactctcattggtgacggatcaaaactaccacctgtcacggatgagcgtgacggtcttttatttaggtccgataaagatgattgtcatctgtgacggtggccgatccgacacatatgacatttcacaccacttacctttgttttgtgacggtacccctcaccgacataggtgagccttcccgcccgttatagatgagctatcccgtgctattaaaaaaaaagttttctagaagtgtgttgtcctcgctgtacaactaaacttaaaatctgcttctaaaaagtcaaaaaaaaaataaattgaaaatgttctggtatatgaaacactatgagtcatatagtagcacacaaaaaataaactcaaaatttgatctacacatattgaggagaaaaaaaaagataaatctcttgtgaatagtaatgtgaactatttgaaaatcttctttcttctggtttacataaaatttgagatgatttttagtgtggtacatatatgtaatagtgtttcgcatctgagaatgttttttcaccattttttgtggctttttggggtgcgcaccttttaaatttggtagatataccacagcactgtttgggttctctcgatcaacctcaccctcccgttgagcacacgtacgatttgcagaaagtgtttcgaaatggccctctacattgtttgccttcacacgcaaataacttccatcgcagctttcgtgcttgactacgggtgtgttttagttcatttcaaaattagaactttggttgaaatttaaatgatgtgatagaaaagttgaaaatttgtgtgtgtagaaaagttttgatgtgatggaaaagttggaagtttgaagaaatattttgcaactaaatattttgaagaaataacttcatttcacaagttagggcatgtttaggtcatgcatgaaaattttggcgtgtcacatcggatatacacatatatatttgaaatattaaacatggactaataacaaaacaaattacagattccgcctagaaactgcgaggtgaatttattaagcccaaataatctgtcattagcaaatactgtagcatcacgttgttaaatcatggcacaattgcttaaaagattcgtttcgcaatttacacgcaatttgtgtaattagtttttttttccatatttaatactctatacatgtgttcaaatattcgatgtgacatattaaaaaattattg

SEQ ID NO: 3024 - DNA, 6484 bp, Oryza sativa
  unsure (1)..(6484): unsure at all n locations
ctgtggactgattgcacctacgagatggcacagnagttcatcattttagacgcaacgtcttttcccaagctttctcctcaatatcaagagatgttgttaactccttaacgaagtactctgtctattgcttttaactacattacccgaacttctatatgaagaaggtagctttacaataaaacgcacatccacaaataattcacttgtagttcaacgagacaattttaaattgatggtaaaacaacagatgtatatactacttagctagctatagcgataagtacttggaagagagaattccttatatactattggaatttggcctgatccctgatatgccacacaaaattggctcttcccttatatgccattgggtcaaatttgagcaccctcttatgtcacttccatgagttgaccgtgttgactgttaacttgatagtaaaaagacgtatttacccctgagttgttagacatgcagtaccaatatatgacatttttttttaatttggttgacatgtacatgtatatacaacatttcagcatgcattacattgaatatatgaataaatttcagcattatattgattatatgaataattttcagcattatattcattatatgaatactgtatatacaagatttcctgtgttgccacaatctagggttttctatcattgatgaggagaaatattgggcttggccatttgggccatattctcaagtttgggccagaggttattttggtcatttatgcaaaaaaaaaaaaactgacagatcaataggtgctaacatcagtcaacacacggtcaactcacgagagtggcaagaaggtgctcaaatttgactcaattgcatataagggaagagccaattttgtatggcatattagggatcataccaaattccaatggcatataagggattctctctacttgaaaatagatttgaaatagatagagtagttcatttttgccatggaaatattgaccgtcactcgcctattgacctctttcttaaatcatcaactccctgcagcaaagagagcaggatcatatatatcaatatttgacgtatcattggatatatatagatgagaacatatcatatacacctaatcttctagtgcatactctgtacacatcaattagcaaatgtcatgtaaaatgccgtcatctcctgcacccgggctgttaattgccttgcgtgaggccctcagatcccgctgggttctttcctgatgaaagggtgttagtgcattacggtccggattggttgctgttaattctagacagaatgaatgacgacgagcggctccagtttctcctgctcatttggcgtgcatcatggcacctgaggaatgatagtctgttcggctcaggtaagagtccaatccaagcttcggtggtctttctgcagggtctgtgggagtctgttgttcagatcagaagcaatggagctgtggatagtaaaggtaaacggcctgccctgatacacaacagtacattccaagggaaatagatctgtgcaagcagtctgaaaccaaatggcaggctcctccgtcgggttgggccaaaataaacgtcgatggagccttcgtttcacagaccagcaaaggtagtgtggggattgttattcgagaccatgaatgcaatgtccttctctctgcttggagcgtcatgagatattgcacgtcggcagaggaagtggaagctacagcttgccgtgacgtgatggtgttaattaagctggcgaatgaatggatcaagatgccgctgatcctcgaaacggactgtgcaaatgttagcagtgtcctgaaggcgacagaagaagatagatcccagctctggaatatttttcaggaagcaagattagctttagctttgtctcacaagtatcagattgtctccgtaccaattcgtccacggtatggcgtgcccaggccccagggagtgtgtctgagctgctggctctggattgtaatcatgttaacttgaattaataaagctccctgttttccttgaaaaaaaaaagtattacacctatgtgaaatcttatcttcaaatccattatattttagccataacaagaaaaagacaaaaattgtaatagatatttaccttaaaactgtcatattttttgactttttttacgactaaaatataacgaatttgaatatgaaactttgtaaatatgtgtaatcctattaggagtaaatgtccattttttaaagaatttttcgtgacatttgctagttaatgtgcacggagtgtgcacgagatgtttgtgtacataggatatgtactctatgggcctgttcattttgatgtcattttcaaccttaccaaattttggtaaagttgccaaaaaagtggctacatttagtttactaccaaattttggtaactatataagaaatcctgtcaaaattttggccaaaattttggcaactataccaaaatttggcaatgccaaaatttggtaaggttttttttggcatcaaactgaacaggccctatattgattgactggtagtcgtgtacttcacgcgtatgatttccaactgttaaatggtaatgttttttttgtttttttaagaaagttttttaaaaaataatattaaattattttttaaacttttaaagctaatacttaattaatcatacattaattagtagctttgttttgtgtgcctacggaaaacttcccatcaccacctacccaacacaccctttgtgtatactttaaaatagagagagaagatccaacaatgcgatctataaatagccccatccaaagaaagccaacccaaccggccgtttgctgagcacacggttcacctacacatggagggagtacagctactactccctgtggcacaaggggcgaacccttgcattgcacttgttactgccggcatggccgtgttagcaactgcctgctggttggtgatccgtttggtctttgtgaaagggaacaccgatcgtcgcccatgcgaagcagacgggatgaggatggtgccggggtccaggggcctccctatcatcggcgagacgctcgagttcctcgccctgagcccctcccttcagatccccgccttcttccaacgccgttttgatatgtaataaatctatatctatctatatctatatctatacctaattaaaaaataagtaacgcttccggttaattttttcgtccatcattaagagtgggcccacacgctaatccacgatccgaaagcgtggccacgatctcttacgcctgcaaataaaggagaaaagaaaaataaaaagagaaaaccttgtttatggagcagcccatccaaagcagcccagattggattagtgacgaggcagcccatccaaagcagctgcagaccggcccagatagcagccgcagcctaccagcgagcccacagagcggaggagaagcagcccaccagcccagcacagtactgcgcaacactgtagcaaccgaacacgaataaagtttggactcacgccaagcaggaaaaagaagagatcttattacttaaaacatgtagtcaccaatgaattatttaccgacaaaataaattcttttttaaaaataaaaataatcacatgtgtctttctttttttttggaaaaaggaatcaccaacaaattgaatcatgtttatatttggatttttttcgctcatcaattgctcattcgccacaggacacctaatcacatcacttttttttattcattgtataatttcttctattatttagagtgaaagttattctgcgatataccacatttttttctttccttctgattatttaagtgagtggttatgcaattggagtgcagtgaggttgatatgatagctagcaaaaaaatatttcttatattatggctactctttacaatatgaaaaaaagtgcttatcaatatcgagtaccaaaaaaaataacaaagtactgcaattgactcataataatacatgacaaaaaagtaaatattttttgtggtttcaaagtttagtatccatgtcagtggatttagagcaacaaataattatatcatgttagcgtcttatttgcactagaaagattcgattcgactataaagaccccaatgaacctggtgggttttatactcccacacactaattactatttttttcttcccccaatgcaacgcatgggcattttgctagtaaaggaaaacaggtagcacggtatatttataaacgaaaaatattttttgataaatcttttatatatgtgttcttatcaatttaaaagtaaaggctgaaaaatgaactttgataaaaaaaacacctcaatatcaactacaaatttaagcttgaaattcaaattttgggtaataaaaataagcgaaaagatgaggctctaaatatagctatacatgtgtactccattcaaaaatctcaggtgtactttttatcaagattaatgagaaattaacttaccacgtatgtaatgaaaaccaatgattttatggatctacataaccaacgcagatatataaggtgtcataaatgctcgagtggattgataagccttataccgattttaattttgaaccaacaaatatgaggcgttacatattttgtgttctgtactagtgaggacctacggctcaatctgtaattttggtgcaaaataatgaaccatgagatacaatggagtcaccctatccgaaataatccatttttatcccttttatgctagggaaaaatcgttgttccatctattaagggcatcaccaatgtatatggcaaagtgtagtttttacctatggcaatcttcacaatgtatatggatacaaggtatcattaggagaagagagaagagtagagatatataatataatttatttcatatgggtagtccatatccatatggataccttttgttattttttctatatggactagttgcacaatggcaataggtggctgaatggaatattctattgcttatggactacttttacaacacattgtggatacccttagtacgttttatgtcagtaactgactcgatacatcccaaactataaatttttaacatttctataagtgattaagaataaagtgaaaaccaatatgagaaaattaaatgaggggtgtttatattttggtaatgttggattaatttaaatgaaggtgtggtgggagatggatggagtagcttaaattaatgtgggaatttctaaatattttttggaatttatagatttttattttaaaattgggatatgagagcctactatatatataaatattactaaagacaggttaataaggggcatcatatatcactcaacaataccatataatatacaatccctcagtttcaatttagttgccattcgagcattcaattttgtttttcaaaaataattattgttctgatcttcctacccttcataaaaatagtcatacttcctcataacgagttttaaaacatgcttttgggaaagataatgagtacggagtatatagttaatcagggtagcagcgtgtgtaatccaagatggcaggaatgtaatttgctgaacctatctcctaattaatttagtgattgctagaacgataattaaattgaaacagagagagtaatccaaaacatatgcatattaacatccaaatacgctactttctggtatggtccacttttcaaaactaacatgattatggaagacctgattgtttccctcgatccggaggtgaccaactttgtgttccaacaagaagaaaggcttttccagatgtggtatccggactcgttcatcaggatcattggcaccgacagtctgatcaggacacacgggttgttacacaggcatatcaagaacctggccctccggcttttcggccctgaaaatctcaggcgagaaattatccatgatgtgcagaaaacggtggaggctagcctttcctcatggcttaatcagccaagcatcgagctcaaggaggcagtctcaagcgtatgtttgatctgttaatcctaaaatactactacttcaatgtttgaaaatatggtgctgctcattttatttggtcaaaaatttaaaaattgaactatcaacgcctctcaaaatacatagattatttctatagtatattttatttataagtaattttagaatattataattttgtaacatattatcattatattctaatagaaaattaacagtcccaattacaccaaagattcaacagggtgatatatatatagagagagagataactacaaaggtaattatttagctaatacagaacaactcacctcatctataattacctcagcggaaaaaaaatcaaaatcctagctataaagctacctagataagaatatttgcagatccaataccatgatttgatttattttggagacccgaggtatattcaattcaaggtttaatttcacctactatttatttggggatgatattccaggggttccggcaaggatgttaat

SEQ ID NO: 3025 - DNA, 2107 bp, Oryza sativa
acatgttgtttccctccgacatactagctcactggatacgatttttgagtactttatactaagcattccatcttaccattaaagagggaaagcataaagtgtttaccttatcaacttaccctgaacttaccatataaaggacagggaaatgaaacccctaatctttggatccctagatcttctttttggcggcgcacatgtgctccccctgtggatgatcacttttggctcgtgccattgccaggggtttaggctagctactttgggctagagattcctaggtcacaagtcacaacccacaccgtccacatggcaaaaactataatcatcacggcacaattctgcatagactagaggatgatcattcctggtacgttgcagtgttgctgaaagattttgtgtcgtgtgcaatggatctgtgctctaccacactcttggagaaatgcaggattacctaactggcagaggaggagttaccatgtaccgataggaagaccgataactgcggtaatcgcgcggttaccacagtgaagtgataaaacgaagcggaattgataaaaaaattgaattgttatttaaatttctttaattaaattggtagcgttgtggggcacttgtttttaccagtaacggacggtaaggcagaccctatagataaatgatgttggacaactaatataaaaaaaagtctctattgatattttcatagattagagtcattactttcagtcatgtaaaattccatttaaattttgttgcatggcttggtcagacataggcacttttttattagattttcagcggcatgtgaaacgagttaagccattagcacatgattaaatcgatttctaccttagaatgtatttatttatttattgattagaatggatttatttattgattgattaaacttattgtcagtatcatgagtatgggatgcctaatatattaagcttagcgggacgcaccatataccaagctttatacaaaatttaacctcatatacaaaatggtttcggataagaaaagataaatagagttctagttggacaccacaatgtctactcgaattgtattcatacttgactctctaattctccttaaacaagaggacactcgagggtaaaaatacaagactctctaagaggagatgggccacaacaacataggttaaggcaaactaacacaaatcagcacaagccaagccaagcttatagcgccacagaagccatggcaataaaagacatctccaatctctccaagttcatatttgagtaagtcgaccatcactaaccatcgacgggccaccgctaagccaacaacggagctacaacgggatcacccaaaaccctatcctaacaaccaacacttactacactctatccacatctttgagatttagggagagagagtgagggagaaggatggaaccgctctcctgtaggctccccgacatggccaacttttataagttagggcgccgacacaagatgaccgaaatctagagcgagcttgcaccgcttgtcagggaggtttcaataagggggttgctagacgacatctccagagagaggagcgacgaaagcactgtcgtcgccgtttgtcgaggtctcaaggagatcgagactgggttttcacccggcaaccccactagaggagatgagatcacatccctcaaaagggaaatgacgtttggaaacatcatcgttgccggcccagtcgagactggtctaggttttcacccgctgtttgtatatctgcagctgatgtactattgctccaccacggttagccctcgttggcgcatgggcaaggctgcaccggtgccccccgccggctagcctccgcatgccttcatgcggccaccctcatgtcgaccactggatctagccaaggggtgacctcctgcacgactgggttgaccccaagcctctgcagcagccgcttcaccacgtggataagcagcacccgcgcctctcgagcactagcaccgggctctccacatagccctcagcaccttcgccgcttcctgctgttgctgttgtcgttgcgctgccaccgctgcgaccccaccacctacatccttctctttggcggcgccgcgtgt

SEQ ID NO: 3026 - DNA, 4791 bp, Oryza sativa
ctgtcacctaaaggctcaattaccctcttatatgcattcctaaacatctgcacagtgtagtacctatcaacaaaatcttcaatgtgcacatctctgctttgctgtgaagtaatcaaggccagtgcatgctggcagggcttccctgtatgctgccactcctcacaagagcaatattgcaggcatgctttcacaatgtacttcccatgtatgctgctgttatcaacaacttcagcagtgaaactatcagctttaacaactgagaggtgacctaatccccttgtcattgctaccagttgcttgttgacagcaggtaaaattttccctgtcatcctctctgctatcctccttctcttattccatagcaccatcactttttctctatacttgtcagctaactcacagacaggcaggtccttataatccttaatccagttattgaagctctctgcaaggttgttggtgacataatcacacttgatttcagggttgaatgcacttctcatccacattaaaggatggtaggtctcaagccactctagcacaccaggacatgatattacatgtttcatgtgttcttgccacactgttttcctataggttctagcagttgggtacatatgggagtggccatcactaccaaatcttttaacaaaatttttcattaggtgccaaaaacactccctctgctcagctttttcaaatacattatgcacagctttctctagccctttacatgcatcagtacaaattgctaagggatcaacatctcctatagctgtcttcaattgttccatgaaccatacccagttatcctcagtctcagcatctatgaaaccaaatgctaaggggtacatctaattgtgtccatctatacctgttgcagcagccatatgaccattccaacttccattgagagcagtggaatctatactaatatatggtctgcaaccctccaagaaaccatctatgcaaggcttaagggcacaaaaaaattctgtggaagtgcacatggccatcaacctccttggtgccaatctctacaacactaccaggacaagtccttaagacctgtgctctccacctatacaacatgtggaagctttcttcccatgacccatacaactctaacaaagccctctgtctacccttgcaaactgtgtcatacttaattgtacacttgtgatcttcttgcaaccttatcatcaagcttttagggcccatacctggattagtctttaagatcttcacagcctttgaagcaacccatttggtagttggtgtagtggtcctccttctgctgctagatgtacaggtatgaaaatctgttaacacagtcacctgccaattaattgaacaaatacattataaaccaaaccataaaagtaatataaataacaaaattcaaattaaccttaattgtcttcaagtcagcctgcctacttccaacaatatgccaaacacaaccatccactttacaacctcctatatatcttgttgggtcagtcttcaccacatccaattcaaattcgttgttaatagcaaactgtctcattgccaatctaaactcctccatgctggggtatgcagttccaagatccatgcaagggttgtcagggtcatatgccatcacattttcaccaggaattgaatcatccactggaagtgcagcatccatgtcatctgggcctcctactccagcaacattgacatcagggtctcctccttcaacattttgagctgcatttggggctgcttctccaccagcagcctgcctattcctatcagcttgctcatcctcagccctcaatcccaacaactcataaaacttgtcatcatccactatttctagcctcccttcttcctcattctgggccaaaacctctaggctatcccaatccacagcaggaggtgcatcaacagctggcccatgaggtggcgctggttcgacaactccatcagatgcgacatagaaaatggtttcaactcctgcatcagcatctaccgctcccgcatcaccaactacaacatctaaactacgttcaggctcctcctcgagcctggtaagatagaaaaaaatacgcaagttaaatgatgcgcaaactacaacgaactcgcccacactcgcaacatcaacaacattcaaatcgccaaaggtttgagaatggattcacttatccggcgacgagttcatgccaagtacactccatattcgccaccctcaccaccccgggatgcagtgcgacggcggcgcctacatgcggtgtgtcgacggtgagctccttccgcgacgagccgtcttcatgaccagatcgatttcttcgccgacgagcagacaggatggagcggcggaggaagagagagacggccaagaacccacctctggatctcaatcccctttctacccgaccgcaggggcaatttcgtcaggtcaactcgcatagaagggaaaatcatttcgaaaatgagcaaaaggaggaaaatggcaaagtggcgagtgcggcgcgcttcatcctggcattttagcgaatcccgttttcgggatggcattctggcgaagcccagttttgaacgtggcttaatgtccattttctcatttacccgccaaacagctcaaagaaacccaaccattcgcgcgctttctgaaacaccccgcgaggccgcgacctttcgtcttcccctttcaccgcgaagagcaatccgccgcgagcacgatccgctgcttccgcggccaccgtcgccaccaccgccggcgttcgtggcaatggcgaggcctactgaatcctctgcctccatcgctagcggcgggctcgccgcaccggctcccccaaccaatcctcgcaacgctatccccgctgcgaacccggcggcgaatcccatctccggcgcggctcactccgctccggcgaacgctcctcacccgcgaccgagtgtcagtcccgccgccgccgcctctccccaggtggtccgaggtcgacgaggagaggatcctcgagatcctctgcgaccacctccgccgccacgacgacctgccgcaaggcgtcgacctcctcatggccgtctacggcctcctcactcgtacggactacagcctcgcggagctcgaggggctcgtcaccgtgctccggcggcgtttcgaggagaacgacgcggtgctctgcagcgggagcggcggccctgctccggggcaccagctccggctctacaccctctccctcgaggtgtggggcgccgctccgacggccgtcgcgccgcccaaacccgccgccgcggccacacccaccacggcgcccgccaagaacgcgccggggacaagctatccggcccggcaggcgggccgcccccgccaagcggcggcgccgccggctaagaaggtgcggtacgaggagatgcgcgtgcagtacccgaggctggcggcgaaggtggacgagatggcgaggaaggcactcgagggcgtcagcgacatgacggcgtggtcgctggagctgaggctgcagaaccagcagctcgccggtggcacgccggaggcgcgcaccgatgaccgggcgaaggagctgacaggcttgatctcaaccctgatttgatttgagactcatcgaatctcttgcttgctactgttagaactccagtttcgtggcgtcaatggtgtcagacatgtgctgctgatgttcatgtgggatttgttcttgattagaacagtactgcctacatcattttgcaatgtcattttcttttgttgtgtttccttgttgtcccgtcctgaactcagtcttttcatcagatatctcttttttctctaatcctctgcctgccaaatattgtcattgttttcacaggcataatttacactacgattgtacgacacaaggttttaggtgtattgtatcatcagatatttttactaaatcagatatttgtcaggttttgttttgtttttttgtttttctgtatataactcttcttttttaatatatataactactgggcaaagccctggtagtaatttgcataaaaaaaattctcttggatttcattctttgttatcatttcactcatttccaagaatgctaacttccactagttccgacaatacctttgtatttcgctttggtagattggcactttgatgtaaccctgtattggtaactgtcgaccagaatggtcagaaaacacgttgagagtttggacatctttttaaatattttgtcacagatgaccccatgtattctggataaatcataacatttctcacggattatagcatttggttagtcttacattaactgatgtaataaataggccgtaaaactgaagttctttatttcttggtgtgaatggcaaagcgttttaattatcaggttaattcacaataatctttttcaggttaattctccacatctagatttgatacggcgtggttattagaaagcttctgtgggttggatgctaaacaaattgaccatttcttggattttgttagggcatgcccaagtcttctttttttttttctcagattcaagttatagcaattgctatggtttggatgataaaaacaactagtcaattgttggatttataaaaacatacccaatttattatttttttgatgggaacatacccaaattattgaaaataaattgtccaagacctagaaaatataggacttagttaaatttttagctgatcctaagcattgcaaaaattttgatcttacataggaccgaaagttcggatatgtcgaaataattttgtctgaaatctctagtacagaaaccgccaaaggtgccagttgga

SEQ ID NO: 3027 - DNA, 1439 bp, Oryza sativa
gttactaatatacagagtagtggtggtaactgcaaaggtcccataaaatcattgcagcaaatgatcaaatcacatctgctttccacacaaagcacctacctagattaagatcaagtttaataaataatgataaaggataacaacatggagaaaacattaccatcaatttcatacttttcgcttcctttaactgccttcaatgcacttgatctttcagcaaaatgaacaaacccaaaatctctcttattcccagccttagcaggcggtaaaacgacttttgtgacctctccatgaatttcaaagatctccttaatcttctctttagaagcattctctggtaagttcttcacatatatagtcttcacctgtaaaagaaaaggccaatcagacaaatgttcctagggctcaacaaaacaaaattatatgacatttccaagctaattatctctatgaatataaaaaaatcaacaagctaagggtgccttgtacgaataggacaatccatccataacagaaacaaccttgcacaggttgagccagcgggcagtggtattgaatgagtagaataacttccaagtcaaacactcaatctaactagtatttcagattgctttaatctacatacaacaaagtgtcagattgctttaatctacatacaacaaagtgttgtcagttatacaatccttaaagtgccatgtagaaactaaaatcatgatgcagctgcatcctggaaatacatcaataaaatgatggttattttggttcaacaatggtaatcagtagttccagataacaaaaactaatgtgaatgagaaatgattaacataagaattacaaaatatttcatgtttctttgatcatttgccagttcctttagcaaattatggcacaaaagaaacaaatccaattcctcttttacaagtgagttaccccaataaaatagcaatataaacagttttttttcccaagggaccctagttcaatttgcagagctgcagtgcatccgttgagcatagaaagcgctgacttttcatttacagtgtatacctgggcagctgcagaagaagaatctgatgatgatgaacccttaggttcagcccagctgacggtcaactggctaccatcaaccttaaagtttggtgctgacaatttctgcttggcatagtctgcacaagcatggttataatactcaacaaagaggaacccacggttacggcttggatcatgtaaatcctgcaggaccaaaacaaggtctcaattagcaaattcggggccttcttagtgcaaagtacaaccatgaaatcacagacacgccttgaacatctcaatgttcacaacacctgggcccttcccctggattatgtttctcagctcgtcctcactcaaccccttgggtacattgccaacaaatagcctgtgctttgcctgtgacaatgagc

SEQ ID NO: 3028 - DNA, 1786 bp, Oryza sativa
aaatattttatatttctatacattggcccgtttggcttatctcaaactcctaaatttaacttcaggagttggatctagagtggagttgtggagtagcccgaaaccagctcctcttctctagtttattttacaaaagcactctagttagctccgatccctttttgtgtaaagctgaaactgtttggttgggctccagctccaagatgagctggagcgagagatagagaaagaggtggtgacgtgccaaacaggcccacacaccagcaaaaatgcccgtgcattacaatgtatcaagtcaacccttcgctcattcatcttctcatacattgcaacaagaaaaactaatattataataaaaatcacatgattaggttatgatatcgatgtcaatatagttttgaagatgatgcggtgaatttgtttggacaatggattaaattcctgcctttacttcaaataagctacaaccacttattataaaattctttcaaagagagcaaacatgcagaccacttcatagcgacgggcgtgtccagcaagaacagatccaatatacatcgtcaccacggagaccaacaccatgtaaacttctcacagcatgactgccagcaggcaccacatgtaggcgtaagcgttaacgaaggaacgttaacatagagatcaaactaagaaggcaggtagatcgccactacccaccttgcagcacgggatgacttattgttgacttccccgaccatgatgggcgttgaacggttggagtccgatgaccattattggtggcactagcattatactccctctaatgttttaacttttttctaagttaaacttctgtatatttgatcaaatctatgaaaaaatatagtaacattttcaatacaaaataaaccaatttaataaaaccaattatattcaatgctagatttaataaaagcattttggtgttgtaggtgttgctatatttcgttataaatttaattaaaattaaataagcttaacataggaaaaaaaatcaaagtgtataatatggtacagcagcagccgccgcagtctccgtgcatcttcatatgtgatttcctttgccttcaacggagggcggcccgaggggtggcgaagatggatgtgaagtgtcactcgaactcctagaagtggtaagagtcgaagcgctagaacatatgcgcaagtatatagtgggtacttcggtgacctaccacaaaaagcttcgaatcgtttaagcctaattgtgccataatttgacaatgtggtgctacagtaaatatttgctaatgatggattaattaggcttaataaattcgtctcgcagttttctggcggaatctgtaatttgttttgttattagactacgtttaatacttcaaatatatgtccgtatatccgattcgacaaccaaacccaaaatttttcccttatttggggctgatggatggtgtactctagtgatgtacaggatccggcatgcaatttggatgaactacagttattacattcaagaatcaagatggaaattgctgttctttttccgaatacatcgcaccatgtcgtctgaagaagctgatgcttgttcagtcttacagccacttgtttaatgcttcagttcagtaaaagaatactgacctcctaactaacttgatcttaagggtcaacactttccagatttccagttaattagatcatctgatctttacaaaataagtacttactccctccgtattttaatgtatgacgccgttgactttttgattaacgtttgaccattcgtcttatt

SEQ ID NO: 3029 - DNA, 1233 bp, Oryza sativa
tgtcatccactttaagagttctcgatttgtgtttcacgaagtttcggtggtcaaccggcgacataccgacggttagacaagtgccatcgcgccggtcgaattgcggaaggacgcgggtcagatcggcgcgggcgacaggcgcggcaggcgacatcgatgttcagaccgggtgatctataccggtcagaccgacggcatccacttggtcagaccggtagatcaatctcggtcagaccgatctccatcgaattcgagggtaacttttattttcgctaaaagttttcggtttttgggtataccaaccattcactcccctcttgttggcttagttcttgctatttgatcctacaagtggtatcagagccaggctaggttaacatctctggcccgatggacacgtgtgaaggcctgatggaccttgggtgcctgcggggcccgcatacctgatggaccgtgggccggtggggcccggatacggtgaaggggcggtgaagggctaagggacactaatgtgtgaagcggagattgttgaatagtcccacattggttgtggaagggcaaagaacctaagatataagtgggggagcccctcacctcaatggctagcttttggggtgggaaaggccctttacgatcctacaattggtatcagagccatgttttcttctttggatttttatcgatctagagtttttgccatggctactcccgctcgtttttcaactaagcctcatgttttcgatggaacggatttttctcattggtgtagtaggatgcaatcttacatcatggctgaagattatgatatttggagaaaagtttctcatgcttatgtgattcctgaagctattaatactgctgctgaaaaaactgcttttgaacaaaattgcaaagctcacaacattcttttgagtggtatttctcgttcggattatgatcgtgttgctcatcttcaaactgctaatgagatttgggttgctttaagtaattttcatcaaggaacaaataacattaaagagcttcgtcgagatgtttttaaaaaggagtacattaaatttgagatgaaacctggagaagctttggatgactatctttctaggtttaacaaaattttgagtgatcttagatctgttgattcttcttatgatgctaattatccacaatctgagatttctcgtcactttttgaatggtctcgatatgtctatttgggagatgaaagttacatctattc

SEQ ID NO: 3030 - DNA, 594 bp, Oryza sativa
attcctggacgaggattttatgcacaaataagttcggttaattactagtgaatttccgggcgtgacattatgtcgtgggcttagcctaaggggatgtgtgccctagggcaaccctaggatgtccctaatcatatttattcagtagctgtcatagtttagagtcgagttttgtttagattgatctgtcaagaacagttttgccgctaaatcagtttgtgaaaccccaaattcgagtgcttaatcattcatatgctattgtgttgcaatctatcttgtttttacttgtgttcttcaatttgtatacaggaattagccttctcggcgaggtcaaccgggttttggcacggctgataaccagaggagacgttgtgctgcgattgcggggctcaagagcgtgttcgttcagaagccggatcgagttgtgtcacaacaccactaaatcgactgtttatcaatacctatcagaagatcgggacctaacatcctcatcagttggtatcaaagcgccagattgatcattaggtaatttatctacccataaccagacaattgccacacaaaaatattgcatccattacctagccaatttgagtt

SEQ ID NO: 3031 - DNA, 770 bp, Oryza sativa
gcacagtcccgcaagaaaaattatgcagaataccggtcgccgtgacttggaattcccagtgggtgattttgtaaacctcggggtccccccattgcagggtgtacacaggtttcagacgaaaggaaagcttgcacctcggtatgtgggtcctttccgtatccttgctcggcgcggagaggtcacttaccagctggagctgcccgcctccttgggcaacgtgcatgatgtgttccatgtgtcgcaacttaagaaatgtcttcgagtgccatccgagcaggccgactcagagcaaattgaagttcgcgaagatttgacctacgtggagaggccagtgaaaatcctggacaccatggagcgctggaccaggaaccgggtaatccgtttttgcaaggtccagtggagcaaccacgctgaagaagaagctacctgggagcgtgaagacgagctgaaggcagcccatcccgatctcttcgccagttcttccgaatctcggggtcgagattccgtttaaggggggtaggtttgtcgcgtcccaaaacgactctaaaattcatcctcgaaattgtgcaaagaataattaaaattcatgtgaaagcctccaacaattaaaatgtgcaaagataaaagtcaaatgaggcttggaggatttttgtatatttcctaaaagcctaaaatgtgtaaataaattttagtggaattttcagagcacaaataataattgaaaagaaataaacaaagttgaaatggttttataaaaagaaaaatcccaa

SEQ ID NO: 3032 - DNA, 676 bp, Oryza sativa
ttcaatgcacttgaccacaatgtctcttattccctgccttagcaagcggtcaaacgacttttgtgaccagtccatgaatataaaagatctgcttaatcttctctttataagcaatgggtgggaagttcttcacatatatagttatcacctgtaacagaaaaggccattcaaacaaatgttcctagggaacaacaaaacaaagctaaatgatatgaaatgtccaagctaattatctctatgaatataaaaaatatcaacaagcgaagggtgccttgtacgaataggacaatacatccataacagaaacaaccttgcacaggttgagccagtggacagtggtattgaatcattagactaacttccacacagcagagtgtagtgtgggatacattccctaacgtgccatgtagaaactaaaataatgatgcagctgcatctttgaaatacatcaataaaatgatggttatttcggttcaacaatggtaatcagtagttctggataataaaaactttaatgtgaatgagacatgattaataaaaaatgcatgatgtttcatgtttctcagatcatttgccagttccattagcaaattatggcccgaaagaaatactctttctgtcccataatataagagattgtagggtgatgtgacacattctaatataatgaatctga

SEQ ID NO: 3033 - DNA, 813 bp, Oryza sativa
ccttctggaacgctgccaactatttggccagctccggattcaaggccatgtaagtcgtgtcaatatgcccagctgccacctgagaatcggtgttaacgacaagccggggagcaccatagcccttgccttgcggagcacctgtaggatagctttgtgttcagtcgtgttattagtggccgagaactccaagcgcgccgcaaatgacgttgtgcggccggtgggcgaagtgattatcgcggctgcaccagtcctagacgcgttgcaggctctgtcagtgcgcgctgtccagatctcctccgtgggggcttcgactgctcggtgcaatgcctagtccattctacaataaaatccgctaggactagcgaatttatggtggaccgcgcgacaaagcagatggtgaaggaggctatctccacggcccacttgctgatacgccctgtggcttcccaattctagaacatgtcccctaacgggtacgacgtaggcacggtgatatcgtgagccaaaaagtaatgcctcagtttgcggtaagccattacaagggcataagctatcttctcgagttccgtaaactgcgtctttggccctgcgagggcctccgacacgtagtacaatgacttcgagctggagttgtcctccaacaccatcactgctgacactgccgctggtgaggcggacagaaaaaagagcagccccttacccagagcggtgttgctagggccgtcagcttggacagatgctctttgaggctctcgaaggcctggtggcactcctccgtccatcacaagggagacgccccccgaagcatagcga

SEQ ID NO: 3034 - DNA, 1071 bp, Oryza sativa
tgcacaggttcatcatgcctttgtctaattgctcttagatcggacaatttcatctcatgaaccccactacagaggtgactatgaaattgttctccaaatcggcccaactgttaattgaattgtatggcaaagaagaaaacctagtaaaagccattccggataaagacaaagaaaacaacctgaccctcaaagcgtcaacagtcgatgcctcaccacactgagctaagaatcggctgacacgttcataggttgaaacactgtcttgccttgagaattttgaaaaatctggaactttgtatcggttaggcaattgaaccgtctcgaaccactcagggtacggatgccgatacaagtttcgagtatcctttggcttaagcccaaactgctctctcatcacatctgcaaacatatcggcccaaggtctctggtgaggcaccccttgtgcttgttgaggtataggctcaaattgattgtactgaggagcaaactgaggctgagctgatcctccttgctgatactgaacctgttgcgacgaaggctgatattggtaattcaaattgcccccctgataattctgaaagtttggctgtatgttgcgcaccaaatgctaaggaataacttggggtatcaccgattgatctggctgcacattatgaaccaaatgctcagggagaacttgagtcgtgacatgctgccggcgcaacgcttgacgacgctttcgggttgagttgcatcggtttcgatcttcaacaagaggtaaaacatgagtttgacaagtttatgaaggatccatgttaagattgcaagtgctgtgagttgtgtacgttttgttgttgattaaggagacctagagtctcatttccgtgagctcctactctattatgaatcaaataacctagttgtagatagaaaagaaaatcaactgatcaaccaaagagacatttgtttggactaagagtttcagacgtgtcttcttcggatcaaaggcaacaatcgtcagtctagcttttgacaaactacttcaaagtttctctgaaagacagcatgcccaaggacctcattgccccagaa

SEQ ID NO: 3035 - DNA, 620 bp, Oryza sativa
catgttattcacattgctagcgagaataaagagcttaaattgctatcttctttaaatacttggggctatattcaatttgatgatgtttgtccactcaactgcttacagaagaaattatttgctagatttgaattgccatgcccttctgatgtgatttttcatgttattggcaattatgatagtaaaggagaatataatgtgcatgaagtatatgtttgttcgaatttgactatacctccttttcatgatgaaatgtattgtctagaggaccgcatgcgtataagtaattctctatctagttcctctagttgtttaaatgagctacaggttggtttgcaagaagaggagtgttgtggtttttcgactacaaagattttaggatccaaccaaatggccatcaagaaatgttcctcaccagatgttgtgatagataaagataagttcaatacgctccatgacaaggcgaaatcgaggacgatgaggatgatgaggacacaactagcttagatataaccatgaataccttatgtattaatcaaccaaaggtacatatgttctatgttgcaggtacgtcataagggccttcggccgacctgccgaaaccatccaaaatagcaaac

SEQ ID NO: 3036 - DNA, 899 bp, Oryza sativa
ccggccagcccgcggtatgaccggccgacgctgtgtcggtgtcggtttcgggttgtttatttggatatccgtgattatttcatgattatggcttctagatggatactatacgtatgtaatactattgtttgctgataatgagtcaagttgtagatagcttggtctcggaatatggtttctttgtttgctccacgtgtaggtgacttgatgtctcgggagagtatttgcggtgatggaccgggagtcggcttggggataagacgacgtccgtggtggtcagagatcatgcgggatactaaggctagagttgatgcacatggttgatggagattccatatggcatacgatggagttattgtgtgcgtatgggatgtggagtcgaatttggaaggagtccaaatttggtacgattggttctgtaaagtttctttcttgtactagagggtttcctaaggtgtttaggactcctagtatgagtttggttcgtggctttgggctgcctacctcatgtataaatagagggggagcgtgaggcttcccggtatcgctttagagagcaattgagttgagttttgaattagggtttcgagtttagtcgaaatttttgtaaggagtgttgttggtgcactttataaacacagagagaagaaataaagttgtcatccactttaagagttcttcgatttgtgtttcaccgagtttcggtggtccaaccggcgacataccgacggttagaccagtggcatcgcggcggtccgattggcggaaggacggcggtcagatcggcggcggcgacaggcgccgcaggcgacatcgatggtcagaccgggtgatctataccggtcagaccgacggcatacacttggtcagacccgtagatcaatctgggtcagaccgat

SEQ ID NO: 3037 - DNA, 596 bp, Oryza sativa
cttacttcggctgcggcttgatcaacatcttcttcaatctcttcttcacgcaaagcttgctcaatggatggtgtcgacgggggatacccgtagaccggatatagagagtattggggtacgccggtataaggatctacgtagtacgacatcgagcaatcaaaagacaagaattatactggttcaggccccttgacaggtaatagccctaatccagttgatatgggattatatggtggaaaacacagattacaaaggaaaagacttaactcgggagattcgacgagatcgtagtcgagatgatccgactagctctcgtcgacttggctctttgtaggctctgacttcgtaggctgtgttggttgtctaggctttgagattcgatgagctatggcctccgcggggggtcccttttataccgtaggttgggcgatatctgagtaggactcggatgtaccaaacctgatacgatacgtaggtaacccaattcttgttcgagaaggtttctccttgtttgttgtctttacgaagaatttccttaagtgctagaggatttatccatatacacgtggatataccttgtcgatacgtgacgtata

SEQ ID NO: 3038 - DNA, 2138 bp, Oryza sativa
aaataaaacagtggtaacacggaaatttgaataaagtagtaatgcaataattcaaatcaaaatagttttataaactaggattcaatgtgctcaaggatgatgcgacttgccttgctcagagagaacggccttccgaaccttggcgacgaccgtgaaccacgcttcgggaacctccggaacgacaggagctacgcgaagcacacaagcagagctaaaccctataaagaagcaataacaatacataaaaagaaagcacagggttctttaggttataacaaacattaggagacttgaacgggtcaattcagagttcgtatgaccaatgtatggtcatccgaagtttaatgctgttatatggagatttgcggattataataattaggttttgcaactacaaaacatgtgtaagcgctagcctggaaaagacaggaaggctgcgccgttgacatgcggactccacatgtcaacctaaaggaccgcggtaggccgagtacatagacacggtccacgggttgacggaagcggaccccgtgtgtcaaccgaggcgagtggccgacaagcggactccactagacaccacgcgggctgcacacatgaaaccacgcggctaccgagcgggcacactaacacgatcaccacacgcacaaacgaacgactaccgacaccggtacatgggtaccggggtcgacaaccacacgacgggtacggggcaacaccgaaaggacgaggacgggagcagcgagaggagagatccttaccaccacgcgacgaggcgtgggaacgacaacgacgaacgagcgcggcggagacggctcggggacgacggaggcaaacggcgagggaatgacttcggcggtgatccttgcacgaaggcgagacgtggccggcgcaacgcttgacgacgcggaggcgaggacgaagacgacgacggggctgcggcacttgacggagcgaggacgacaaacgagaacggcttgacggagggacgaacgccacgacgaccgggaacgacgagaggacgacaacgacgatgaccagggccggcgaggagacggcgatggcagccggcagcagctgcacagatgcgaggacggcgtggaacatgccgctgtgatgatgacgatggtggtggcgcagcgagacgatgtgccgggcgaccgacaggacgtcgacgtcgaggacgaacggtgacgacgacgacggacagcggaggggttcggatggagggaaggcgatgccgaggacgtcgtcgccggctcgccgctgcgatgccggaggagacggcgacgtcggccggcgcacgggaacggtggaaggggttgccgaaagaactccggcgaggcggagggcgagaccggagcgggcgacggcgttccggcgaaaccgagggtaggccggggtggagggcgacgcggcgatgtcgagggaggatggcgacgacgacagtcgctacaccggcgagcgggcacaagcgtcttgaggcggtggagtggtggcgacaccactggtcgtcgacgaggacgtggctccgataatttccccgcgaaacggaggcgacgccggggaagaggaggcggctacgaggccgctgggggtgacggcacgaccggacggcactccggcgaggagggagaggcggctggaggcgaccggcggcacgggagaaagaggaggacggcggggagaggtggtgaggccacgggatcgaacgcgggagggggctaaaactggagaacggatcgagggggttccattttataggggaggagagggagctggccaagggagaggcggggaacggtggcgaaattcgtggccggcggccgtggaatgtggccggggttggcgcgggcgttcccgacgattggggtcacgaatcaagggggaaatatgggggaaagacagaggaatcaatagggattaaaaccccctaatcaattttggaaaccctggtttgaatcgcgtggattttggggaggttggcgctagggtttgcacaggagagagagaggaaggaggccgggcgggaggaggacgacgactcggcgcgtgggacccacgcggtcgcgcgatcagcgcgcgtgagggggggtgggcggcttgggaggctggggcggctgggtggggtggcttgggcc

SEQ ID NO: 3039 - DNA, 2136 bp, Oryza sativa
gaatcacagggcaagtgctggaagtatccatggccaagccattgggagacaagaagcctgatcactcgttcaagcctggaggagctccaaattttcctcttcctccttatggtggctacatgggagatccatatggtgcttatggtggtggtggtcctggattcaaccaggtaaaccaaactaaaccaagtggtgcttatggtagggttggtcctagtatacctaaataccaaacacattctgcgagaaaatccacatataaataggtataatacatatgtataatcttgttgggtcaaatgcttcgttctctggctctttttgtccatccactaaaccctcagtccacaaaatgacccattcttgagcatcgccacttcagctacagtctgcctataaggcccagtggcccacaatgcccaacaccaaaccctagttaaccaatatccagcatctctatttctcaattccccatttccagctacccagctggcagcatgggtgcacggtcacccaggcatggcatggttactgcggtcccaagtgccaaagctgacaggtgcccagggtggcagaacgtcgcatttgccaggaggagcagctgagcaagtagtgtgcctgttgcgcactagttgatctctggatcctgtacaaggacatgcaggtagatggaggagctagcatgtgcgtcttgattctaaatcctaatcttctctgtaatatgtgcatcttgattcgaaattcgaagtttctttgttgatacgtaaatgtgaaatcaaagtatggtacattgtttttttatggaaaactgtggactgtagacaccaaaacaaaaatagaaagatctgtaaccacatcagggcatgttgtaagaacactaacattgacctgtgacggtgtatcaaagcaatccaatagactgttcacttcacatgctcccttgatttgtatgtagatgatgaagttcttagtgttgtctaatgatgataaagcatcatattctgaagttgtgaaaaatgccttgagtctgttgaagattagtcaacatatattgatagtctgttaatgttcttttatacatggatcatgatttttttgcatgaactttccatttagttattagatactacctccgtcccaaaatatatctatttatagcatagtatcttgtcccaaaatgaagctatttctccacctacctcctctcaactaattaatatcattctccttcacccactttcttttttcaatctatcacaaccttcctccaatcattcccatctactttttattacttgtgccaacctaaaaaagcgcacatatgagctgtttgttaattgtggggctaaattatactccctccatcccaaattatagggcgccgctgccccctttttaaggaaaatcaaacttggttgcttttgactaataatcatactaaccatatctatactaagtattatgcatgttatatcactagatttatattttgaagtacttctatgtgatgctaatttcatatttgttgggatcatagaatggaataaaatactagtcaaagtatattattgaagaccgtgtaaaaaaaatataggccttataatttgggacagacggagtagttttctttaatgattttgtaacacctttaaattaaattgcattgtcatctattgtacattgattttggtagttcatatactgtccttttccatgaaatatgctttaagtaactctgaatacccatgctagaaatcctgcatccaccactgcatattgacaatttagtcattgtctctatcaacatttttgttacagcctatgatatatggtagaggaccagcaccagctggaatgaggatggtaccaatggtgctccctgacggtcgtctgggatatgttctgtaagataatgctgtcctagagtcacaactcacaaacaagtcttaccatacatcttcatttcctaacagttctgtttgtaatgtcttgacaggcaacaaccaggtggaatccctcctccgcccccaccgcgtcggggtgaccggagggatggtggcagcagaggtggcgaagggagtcatggccggcgatatcgcccttactagctttttcgttcccttggtcctgccgcca

SEQ ID NO: 3040 - DNA, 538 bp, Oryza sativa
tacgcattttaggcttttaggaaatatacaaaaatcctccaagccttattcgacttttaactttgcacattttaattgttggaggctttcacacggattttaattattctaggcataatttcgaggatgtattttagagtcgttttgggacgcgacaggaggcggcgttcccgcgcccctatggtcgccggcgacggccataggcacggtggagcggcggccaagagaggggaatggaagggggaaaagaggcggcggtccacggctcaccccgggtcgacggcaacggcaaaggaggcggccggagtggagggagacggtggcgcggctcgggtggacgggaacggcggcgttccggcggtcggcgaggtcggcgagatggtggacggggtcggcggcggtgcggcaaagccggaggagacgacgccgaggcgggagatggtcctggcgagtggagagggccggctggaggtcgacggcgacggcggaaagagaagatgacggcgcgagctcgattccggcggggagaaagggcggc

SEQ ID NO: 3041 - DNA, 905 bp, Oryza sativa
actcggagccttgccaccactaccagcagcggcgtcggatgcctcctcgaccaccttctccttcagagaagccgccacctggtgatccgcgagcggtccgatgacgtcagtcaagggaagggcctacgctaagtccgatcacaagctgattccaaatgaaggaggaaaaagacatctaaatagacttacattgatcgcctcgtcgcgttccgcctctcccttttcacaaaggggcacagggatgtcgctcgcggttgtcgcgccgctgatcatcacctgaccaacgcgtcgctccacgccgtcactgctcagagctatcaaagaagaatcattttccgataagtcaaaagcgaacgcgaatacggccatatcaaagtgaatacaagaaacataccccgaggagaaacccgggtcgcgtcatctggcctggaataattatacgccgggtgggctcgagcctgaagcggctggatactcctaccaacgaagtctgcaacgacttcataccccgataagccccgttctcgaagatcatcgatgatgtcgataaacgattggagagagggggtcaaagggggcttggcggtccaaaccggaatcttgtttggctgctcgtcaggaacaatgagggcaggattcgagtccttaatctcgagataaaaccacctgttctgccatttgctgcgagaagaggggcactggaaggggacgtgctgcgagaagaggggcactggaaggggacgtattgcgacttcatcccatcacgaagtcagaacccaacgcagccagacaccttgttgagttccatccacgcaactcgtaataaaagcgaaacaaatctagaaaaggctctactccaatgtaggcctcacaaagatgcacgaaaatgctgagaaatgcgatgg

SEQ ID NO: 3042 - DNA, 781 bp, Oryza sativa
tgacggaatttgatcttcggtatgatctaccgaaggcgatcaaggggcagactatagtcgattttattgttgatcatcgtgatgattcaatcggctcggttgagattgtgccttggactttgtttttcgatggatctgtgtgcactcatggttgtggtatcggcttggttacaatttcccctcgggggcaagttttgagttttcttacactattaaaccctatgcgaccaacaatcaggctgagtatgaagcggttctcaaagggttgcaattactcaaggaagttgaagccgatgctgttgagattatgggtgattccttgctggtgattagccaattggcgggagaatacgagtgcaaaaatgatacattaatggtttacaatgagaagtgccgagagttgatgaacgaatttcggctggtgactttgaagcatgtatctcgagaacagaatgttgaagctaatgatttggcccaaggggcatcgggatataagccgatgatgaaggatgtcaaagtagaagttgccacattaacagccgatgattggaggtatgatgtgcatcattatttgcataatccatctcgatcagcttctcggaaattgcgttataaggctttgaagtgtaccttgttggatgattagctttattatcgacgattgatggggtgcttaaatgtttgagtaacgaacaagccaaggttgcaatcggcgagctgcatgaaggaatttgtggaactcatcaaaaggctcataagatgaagtggttgcttcggcgtg

SEQ ID NO: 3043 - DNA, 1050 bp, Oryza sativa
caagccgatgttgatgaagttgaggaagcttcagctaggttggttttgtcaccagagcaaacagtttttgtgaagccgaaagggacagagaatcggcatcttaagccattgtacattaacggttatgtcaatgggaagccgatgtccaagatgatggttgatggtggggctgctgtgaatttgatgccatatgctacattttggaagctaggcagaaatgctgaagatctcatcaagatgaacatggttctcaaggattttggtagcaatccattagaaataaaaggagttttgaatgtggaactgacagtcagcagcaaaaccgtccctacaacattttttgtcatcgatgggaagggttcctacagcttgctgcttggaagggattggattcatgctaattgttgtattccttcgaccatgcatcaatgcttgattcaatggcaaggcaaaaagattgagattgtgccatccgacaggtcagttaacgttgccagtgccgatttagctctttgggagatggacgatattgattgcttatctggaaaagtttgggatggagatattctaagagtgtccgattgtgatatacagccaattgaagatggagagcccaagttattattttgagggcgtcgtggagggttcaaacgtttacaccaaggacacagtagatgatctcgataacaagcaaggacaggatttcatgtcggccgatgatttggaagaaattgatattggaccaggtgatagaccaaggccgacattcatcagtaagaacttatctccagaatttagaaccaagttgatagagctcttaaaagaatacaaagattgctttgcttgggagtattacgagatgctaggactcagccgatcaattgttgaacatcggctacttatcaaaccgggtgttagactgtaccagcagccaccgagaagatgcaaagccgatatgctcgaacctgttaaggctgagattaaacgattgtatgatgctggttttattcgtccttgtcgatatgtcgagtggggggtaccgagctcgaa

SEQ ID NO: 3044 - DNA, 1524 bp, Oryza sativa
ttcggaggatccgctcttgccggaagttgaagcccacgttagcgaaagcgagctaggcaggtgacatcatctttgaccatattgaatcccagtttataaaattatgtggatttaaattatggcattatcgctttatttaaattcccgcgttatcactgttttatttagccatgcctatttacctttgttatgaccatattattattgttattgttattattattaccttgttcaccctaaaacaaacaaaacctaaactagcggtttaattttatgtatatgcttcgcaatttaattatgtaacattaagtggtttttcaactctcgactttgggaatactcatatcacttggacattatggaatggttggattattgtagaaatggacgcacacctccccctctattcaaaaccctcaaaatggttttaggctgggctcagggtgcatggttttgatagtagcaccttggccacataaggaccggtcttcgggcctctgttgcaaagcactaccgtacttccacatgtctagtgggtaaggcttagtttgtggctcagtctggttataaacaaaggtacatggatggagatggacgaagtcgagggtcgatggacatctctaggacaaatgaaggctacacgagctgcggcccggtagtcgaaatgtcatgtcacaaggctggtgtcctgctgctaggggctcagtcctgcctacctgtcctggaggttccggccgtaggtggggttgggtcggtacccttgtctatggctaggatgggttggaaactatgtgtcacatcctgatttttgtttcaggatttataaattatttaataaattattattagaatttatattaaatgttcattaatttacaagtgaagttaaatgtgggaaataaaatttcctaaatataaagcatggatggatttaattttttttttaaattctccatggttaattatactctctggaatattctcggatttttcagagctcaattcctaattttaatcatacaaagagcatttcagtaattacccacatattaaattaatcattaaatggtctaattataattttgttaagtactttgagtgtgcaagtattttcaaaattttcttggaattatttgagcatcggaagtatttttaacaattcaaagatcatttcattgattaatttaattggaaaaagtaaataaaaatcctcctcctcagcttgggccatttttggcccattccttcctttccttcctctctcttccgccggcccaacccgagccttcatcctctcttcttctctcagccaaagtccggttttgctccctcttctaatcaggctgagaaaagaaaagcccggcaagaagtctattatccttcccccgcgctactgttcatcttccagctccagccgccggctgtagctgagccgagccgccttgccgagtcgccttgccgcgcccgttcctccccaatctctccccttttcttccgattgtttgaggggtttttatcctctcg

SEQ ID NO: 3045 - DNA, 740 bp, Oryza sativa
tctttacccacaagacacgcctttactctgcattccatggcaattggaacccatcataaaaaacgtgacataaccctttacccatcctagccgtgaccaaaagtaccgatccaaccctgcctacggccggtatcccgggacaggcaggccaggattgagcccctagcaataggatctagaccgggtgcgccacacgcataggggtgagaccacccgtgtactagtccagtgccatggcatctcgactagcgggcaccgacccgtgtagccttcatttgcctagacatctcgattaccgagccacagctcgcgtagccttcatttgcctcagagatatccatcgtcgcaacgacttcatccatctctatccgtgtccttttgttcaggactagactgagcaccgagttaagccttacccattagacatacggttagtacggtagtgctttgcaacagaggcccgagcttaatccttatattggccggggtgctacttcccacaactggcatgcacccaaaccccaccggaaaacaggttttaggggttttgaaagaggaagagacgggtatgtccaattccaccataagccaaccatttcatagtatccaagtgatatgagaattcccaaagtctaaagttataaaaccacctaatattgcctaattaatcagcgaagcatctacctaaattcatactagtggaactataaatagagtacccactagttgggttttatttg

SEQ ID NO: 3046 - DNA, 3981 bp, Oryza sativa
atgccgccgttgttgggcgtctacctcttcaccgaccggccgcctcgtccgccgccgactggtgtttccgcctgcacggctggcctattatgccgccgttgttgggcgtctacctcttcaccgaccggcttgcctccgccgccgccgactggtgttttcgcctatacggttgccggactccgccgctgttaatgggcctcatcatcgacaccaccggcttggttccactggcgccaactggtgtttttgtcaccattgatggactacttcgatcccacatcggctacttctgccatcaccaagggaatactaaaaagctaactcatcattttttcttatatgatattttccttttcctctgcctcactacattaactggttcaccgttgactagtgagtcgggggctacagatgttatatcatattttcaacaattttcataatatttatcttgattgcttgcgatataatctgagtacaaatgtgcctatcgagttatggagttttatcttcctatgttctccgtttggtttgtcgatggatagttgcctttgggccgattcctagcacccgggggctcgttggatggaccgagtaacgcaaggtgctaagtattattcggaataaatcaaaagcataaagataagataaatttattttctgctctttacaattgcaaaagtacccgagtagtaaactccgatccgtgaaactttgttccattaatgacgaactcatgtcactcatatgcatgtctgggaagtgctttggccgactcccgatgcttggggactatgactagtcgggcagagtatttaaacgtaaggagtcatccgctcggggaaatcaaaattgacaagaggagaaatacatatttgtaaatattttaaatacttgaatttttctcgagtattatatttatatcagatactactcatccgatatgtttgttctgtaggatccagatccagatatgcatagaagggattcatggctttaagcttatctcctacgcttcaggaatggattagttagaacatcaccaccggcttgccgtcgtcgccaccgactggtgtcctcgcctatacggttaagtggtcacaccaccgttgttgggcgtctacatcttcaccgaccggcttgccttcgccgccgccgactggtattcctgcctgcatggccggcctattatgccgccgtttgttgggcgtctacgtcttcaccgaccggattgccttcgccgccgccgactggtgtctctgcctgcacggctggcctattatgccgccgtttgttgggcgtctacgctttcaccgaccggcttgccttcgctgccgccgactggtgtctccgcctgcagggctggtttattatgccgccgttgtaggacatctacatcttcttcgaccggccacctcgtatgacgccaactggtgctatcgtcttcacgactggccacgtctccgccactgcaaataggcgtcatcaccttcaacgcaagctgtctacgtctgctgccgactgctggtttatactgctaccactactgatggacgtcatcgttttcattgctggccgccttgtctgacgccgactggctcgttcacctccacggctgcgcgacttcgtcatcattgactggcatcatcgtcatcgctgtttgcttctgttgctgctgactcgtgttcacttcatcacggctatccaactttgtcatcatggtggagcaacttcatctttattatcttcggcaccggcaaactctattgctgctacttcgcaagttttgctacttcaccaaccacgacgtctttgtgaacctcgacatctcggcatgcgatgccgtgttattttactacaacaagtggctctccaatattcaggatttctacttggacatcttcaacacatatcttcaatcagcgctgctatacgtacgaattatttcgtacgatggttgtacgatcaaacggatccctcaggccttagttgatcccatatccaagcccaagctcctgacgtcctggcctgctatctggttggcttgcttggacagccaatgagccaaccaaagcaatttttatttcaatcatatcttaagcaatcctcttcctaatatcttactgtatatagtaattgtacttagcacccaacattgaatttatcatgtggcatggttaagcaaattacgcatacaaatatgttcctcgaaccttggacagtgataacattaaccctagtttcagattaaattaaaaataatggcatatgttttgcaaaggaaaattttagattaaatccataataataaagaaagcatttcatggccatgaacattgcctaggaaaaaaaagaaagagagaataatgtaaaaaaaaaaagatgattgtgaagctaaagaaaatcaagtaaataagatgccatacctttgtcttcgatgcgtatgctattggattagtttcacacttgcaggttagatcagaacatgaaagtcagatttagggtttggtgtagtgaacgtaaagtcaggtttagaggtaaattgggctttagggcccataagtacgcttagactgccgcgcgcgccgtgcgtgctgttttgccgttgccgtccgtgccgttgcgtcttatcgtaacaagatcgtactaaaaagatcgtatgtgtagcattttccatcttcaatcaagcaatgactattcgacgacaagaagctaaagttctcgactctatgttcagttgtttcccaactaatcaaagagtcgggggctacacaaatacatggctcaaaattcgacaagctttatgtcaagatgaattaatcaattaatcagccaacgagtcaactctgggagtcatcaattttgtcttcgctttagagcagtaggtcaagattaaatttacatgtctgggagtttggagtcatcaaccaatcaacttagtttcgacaagttggacaacatcatctactttccttcaagtgaagcatctccaacagctacaacattaaattttattgccatcttcataaatcaagaagcgttgcatcagtcttctttatgcatacacgctcgcatcaaggaaactactcgagctttatatcttctcaacagtttgatggattattatcactgacttcatcatcagcacctctacttcatcggccctgacatctctgccgttgctaatggatgactacgtcttcgcctccagttgcttccgtcattgccggcttgttatttcgccttcacggttgacctattataaaaacgctgatgagcgtcttcgtcattatcattggttgctacattgctattgactggatcaccgacatcgtcatcttcatcaatatcctgtcaagcctcttcaacatagcctattctactgctgtttgatgggcaacttcgtcattatatttgatcacctctattgctaccaatcgtcattactgtcggttacgtttgtcgtcgtcaactattttcttcatcttcatgattggtggatttcgtcatcgcctttgatctgcctcgtctgtcaccaactgattattttgctgccatggctacacaactttatcgctgggcgccttcatcttcattgttagttgatctgtctgctgccgactggtttcttcgcctccatggctatgcgacttcattacttttgattggtatcactatcttcactaccaccaatatttttgccacctctagtggacaatattatctctatattggtcatcttgtctatatgccaactgtgtcagctaccatcaatgaacaattgtgactatgacagaaggacaagctatatgctcaggagcttactagatcaaacacaagtatcataccttcaatttggacttgttccggatacatgcaacatgaattcatgatcatggttctattttctatgctcaaagactagactatttattattccccgtaaaggttatcaaccgaatacttgcgtcagtcaggatt

SEQ ID NO: 3047 - DNA, 3835 bp, Oryza sativa
  unsure (1)..(3835): unsure at all n locations
ctcactatcnggcgaattcgagctcggtacccgtttgcctaaacttaagaaagatcgtgatttggtttgtacaccgtgtcgtcatgctaagatggtttctacttcacatgctcctattgtttctgtgatgacggatgcaccgggacagcttttacatatggacactgttggtccagctagagtgcaatctgttcgaggaaagtggtatgtgttggttattgttgacgatttttctcgatattcttgggttttctttatggcaactaaggacgaagcttttcaacactttcgtggtttgtttcttcgattggagcttgaattttctggttctttgaaaagaattcgaagtgataatggtggagagtttaaaaatgcttcatttgaacaattttgcagcgaaagaggtcttgaacatgaattttcttctcctcgtgttcctcaacaaaatggtgttgttgaaaggaaaaatcgtgttttggttgagatggctagaacgatgttggatgaatacaaaactcctagaaaattttggcatgaggcgattaacactgcatgttatatttcaaatcgagttttcttgcaatctaaacttggaaaaacttcttatgaactactatggagattatgggtaccccatacccacacggcatggttatccgactagtcataggggatagcttatatctatggaatatgtaacagattatgacttgggtattacgtttccttttatattatggagcggcctaaagtcctgatttgataatattgtaaaatagatttaggaaaccgatatcgtattggttaaggtttctatcttataatcctgcccccccatcctatataaggtgggcaggaggccctctagggggcatgagacaactagatcatcagatctataatacatccggcggattcaaatccctaaacaggagtagggtattacctctcatcgagagggcctgaacctgtctaaatcctctgtctctgcatccatccacttttaggtcttgtgcgctaccccgtttgccgaattcatgtttcgacacttcgatttggtcatcaacccgaagtttcacatttgcgtgtttttggttgcaaatgttttgtcttaaaatctggaaagttggataagtttgaggaacgctctaccgacggattgtttcttggttaccccgcacatactcgtggctatcgtgtacttattttggggactaacaaaatcgtggagacttgcgaagtttcttttgatgaggctagtccaggtactagacccgatattgcaggtacactgtcacaggttcagggggaggatggtcgtatttttgaagacgagagcgactatgacgacaacgacgaggtcggctcggccggtcagacagggcgccaggccagtcagaccgctggcacacctccggtcagaccgacgcatgacgtgtggtcagaccggcctgggtcgtcggctgagggttctgttgatgctgctcgagatggtcctccagaaattactacttcgaccaatactgatacagaacgtggatcaacttcagaagttactgctcctttgcacattcaacgacgacatccgccggaacaaattattggtaatataggtgagcggactacaaggtctaaggtaacgactcatgatgtttgtgcaaattctgcatttgttgcttcttttgaacccaaagatgtgatgcattaactgatgaatcgtggattaacgccatgcatgaagaacttgaaaattttgagagaaacaaagtttggactttagttgaaccaccttctggacataatattattagaaccaagtgggttttcaaaaataaacaaaatgaagatggtttgattgtgagaaacaaagctagacttgttgctcaaggttttactaaagttgagggtttggattttgatgaaagttttgctcctgttgctagaattgaggcaactagacttttgttggcttttgctgcttcaaaaggttttaaattgtatcaaatggatgtgaaaagtgcttttctaaatggttttatacaggaggaagtttatgtcaaacaaccaccgggttttgaaaatcctgattttcccaaccatgtttttaaattgtctaaagctttgtatggtttgaaacaagctcctagggcatggtatgataggcttaataactttttgcttgcaaaaggttttacaatgggaaaggttgacaaaacgctttttgttcttaagcatggtgataatcaactttttgtttagatttatgtggatgatatcatctttggttgttcgactcacgctttggttgtagattttgctaagattatgcgcagggaatttgagatgagcatgattggtgagttatcgtactttttgggattgcaaattaagcaaacacctcaaggtacttttgtgcatcaaacgaagtatacgaaggatcttttgagactgttcaagatggagaattgcaagccaatttgaacaccaattggttctacagctgtgttggatcctgatgaagatggtgaagctgttgatcaaaaggaatatagaagtatgattggatctttgttgtatctaactgcttctaggccagacatacaatttgctgtgtgtttgtgtgcacgctttcaagcttctcctcgtgcttcacatcgtcaagcggtcaagcgaataatgaggtatttgaatcatacatgtcacgtccagataaattcatcccgaaataaaaatcattttctaaaaggaataatagaattaattaaaattcgaaaagaaattggcaaacactaaaatacgtacaagaaaagaaaaatttgaatgtggcccggagaatttttgttaaattctccttggtctaaaatgagccctcaaattttacttgaattttcagagcaccggaaatattattaagcaacaaaaacagttaacaaagtttattaaaaagaaaaagctaaaaataatccccctcctcactttgggccaagtctggcccaaagtcctccctctctatctctcggcccgaggccaaagtcctctcttcctccccctctttctctacctctcgacctctccctcggtacctgggcctccccttccccctcggcccagctccctcctctccccctcccacctgggccgtgtcccggcccagccgagcctccccaggccgcgccgcacgcgcccgtcacgcgcgctgaccgcgcgaccgcgtgggtcccaacacccggtcatctccttcctcccgcacgggctcttctctctcccgtgcaaaacctagcgccgttcctcctgcaaatccaccccattcgagccggctctttccaaattgattagggggaattaatcccctttccttcctgttcaattccccccaatttcccccttgattcgtgcccccaatcgtcgggaacgcccgcgccaaccccggtcacctttcatggccgccgaccacgaattccgccgccggtccccgtctctcccgtgggcggctccctcttctcccctataaaatggaacccctcgatccgttctccagttatagcccccctcccgcggtctaccgtgggctcaccacctattcccggcgtgcttctttttgttccgcgccgccggccaacttcaggcggctatgccngctcgcccgtgcggcggctgatgtcgccaccgcattccccggcactacgacgccatccttcttctcagcctcaccgtatcctcgccggaaacccaccggaggtgcgcccccgccggcaatcagtggcatcgccgcactgtaccgcctcccgtcggccgttcgccacacctaaagcgttggccgatgctgctgtcccct

SEQ ID NO: 3048 - DNA, 755 bp, Oryza sativa
accagccgctcctgccattccagtaagtcttgtctatgaaaatcttgaatcggctgaataactcattttgataatcacctgtcttcaaatttcttcttgcaggccttaagccgatctgtcttctttcgatatcaaagactatcttgatgaacaaacagaagaagacacccccagcaggccaaccattccacattttagttgttaagaaaattttaagaattaaaacactaacttgggtacattgctaggcttgcccataaccgagggcgtggctattcgaatagattatactctgatcagaggtgtacatctttacccacaagacacgtcttcctcacgtgtaaccacgtcccaacataccaccacggcatacggacgtaagacatgacatagtgtcacgcccggaaattcactagtaatttccgaacttatttgtgcataaaatcctcgtccaggaatcagccgaggtacacaaactgacaattttaatatacaaatccatcttaataataacgttacatacttaaaaagaaaagaaaacagcagcggaattaacggtctagcaatggcttcagctccactcccacaggcagctcaactggggtataagccaaacgtcttctccttctggatcctttatcttcaactgaggtttgatgattattgcaagaatgagcatatgacatactcaacaagccacacagcaaatatgcaagtgcacaaggattccaaaggatggcataatatagtctcat

SEQ ID NO: 3049 - DNA, 1230 bp, Oryza sativa
  unsure (1)..(1230): unsure at all n locations
gctctgacttcgtaggctgtgttggtggtctaggctttgagattcgatgagctatggctccgcggggggtcccttatataccgtaggttgggcgatatctgagtaggactcgnatgtaccaaccctgatacgatacgtaggtacccaattcttgttcgagaaggtttctccttgtttgttgtctttacgaagaatttccttaagtgctagaggatttatccatatacacgtggatataccttgtcgatacgtgacgtatatcgtagggtgaagggtatgcctaacccgtaaccctgacagtagccnccgacttctgctcaaaaatgaactcgtgagaccgtttgcgactccaggtgtcgagaacgttgccattccaggtgcgagaaccaaggagatgacgtgtaatcgagcgcaccgtttgaagtccaacggtcacgaatgaattttgaactgaagtccaaaaaccaccatgcacaacggacatagaaatctccggcggggatttctcctatttccttggaattcgcaccgtcgggagtgcgtctatttaaaggtatttagggcgtgagctttgaggtccgcctacttcattaagtatacactgctcctttgcattcctcgccttcctcgccgccgcaaaaagccctagcctcaccgattcatcgtccgtttccggcgatcttccggcgatctcccgacggccatggatcttgggaagtcgacctccaccgccgcgaccctgaagaaacttcaggaggagggtggcctccctggccacgacaaggcagagagggaagcagggggtactactccccagcccgtcctaggtcgcatggttgcgattgaggattacattgtctgcgggtttcttcctcccccctctgaattccttttgctggtcttaaacttctatgggctttcacttttgcacttgaatcccaactccatcgcatttctcagcattttcgtgcatctttgtgaggcctacattggagtagagccttttctagatttgtttcgcttttattacgagttgcgttggatggaactcaacaaggtgtctggctgcgttgggttctgacttcgtgatgggatgaagtcgcaatacgtccccttccagtgcccctcttctcgcagcacgtccccttccagtgcccctcttctcgcagcaaatggcagaacaggtggttttatctcgagattaaggactcgaatcctgccctcatgggg

SEQ ID NO: 3050 - DNA, 1514 bp, Oryza sativa
aatggactaggcattgcaccgagcagtcgaagcccccacggaggagatctggacagcgcgcactgacagagcctgcaacgcgtctaggactggtgcagccgcgataatcacttcgcccaccggccgcacaacgtcatttgcggcgcgcttggagttctcggccactaataacacgactgaacacaaagctatcctacaggtgctccgcaaggcaagggctatggtgctccccggcttgtcgttaacaccgattctcaggtggcagctgggcatattgacacgacttacatggccttgaatccggagctggccaaatagttggcagcgttccagaaggctgaagcacacttccggggcatcgtggtcaccggagtgccacgagcaacaagagccgatgtagacaccctagccaagatggctgcggccaattcactcatgcccccgcatgttctctacgaggtactgcgctccccggcagtgcagggcggggagcccccgcaccccccccccccgcgcccgatggtgaaggtcgtgataatcaacgcggagcccaattgaagattgccgactgtggatatcttcgctgggcggacggagccatcctccgctgcggagcatcagcgcctccgccatcacgcaagaggctacgtgttcattgaggacgccttatacaagatggggtctgcgcgcctcttttccgatgcattagccggagtcaaggagctgagctccttaaggacatccgcgagaggcactgctgaacccacctcgccccgagcgccttggcagacaaaacgctttcggcagggcctatactggcccacaattgtggcagataggagcacttggttcgccattgccaaggctgccgacatagctcacgccaattccgccagtatagcctttcgtgcgttggggcatcgacatagtcagtcctctaccgcgcgcattaaagcgcaccaagcatccgccaaccacccctgacgccacggctcagccggcaaggcgaagacgggagcatgctattatccgggggatgccggagccaggaaccccggggcgcgccatactgtcaccttaatagtaagagagctagtaaatccagttgattttattccaacaatgccgatttcgaattttagcaagaggttcgtttaggtgacaaactgaacaactactgccacttgttgggtagttctagccggtttttgaaccggtgctaatagcacgatcattttgcatttgtgtgacaccttattttctctagtgccactttcggtgtttatcctacggaaaaagtacacattacccccccttccccccgaactatcacggttgaccaaattacccccctaaccacaaaaccagacattactcaccctgaactttcagtaccgacgaattaacccctcgaccctattcagactggttttttcctacgtggcgtacgcgtggcaatccaatcagtattttcttttttaaaaaatggtgggacccacgtgtcatacctaccc

SEQ ID NO: 3051 - DNA, 3746 bp, Oryza sativa
tttcatacatgaatacatgctattaactagcacttctttctcactaaattattatttttttcaatgctctatccttaagatctttaattttattgggtgcatgcattatactccctccgtattttaatgtatgacgtcgttgaatttttgaccaacgtttgaccattcgttttattcaaaatttatgtgaaaatatgaaaatatttatgtcatgcttaaagaacatttgatgatgaatcaagtcacaataaaataaataataattacgtaatttttttaataagacgaatggtcaaacgttggacgaaaagtcaacggcgtcatatattaaaatatggaggtagcatatttattagggtgatccaaactatgaggtgataataactactctctctgtcccagaatatagggatttttagggccggatacgggtattaagaaagtaggcagaattaaatgggagaaggttgtgattggttgagaagtggaggtaggtgagaaaattgaatggtgaagggttgtgattgattgagaagagaacgttggtgaagaagttattatgttttggggcaaaacttgaatgctagaagtcgttatattttgggatagaaggagtatttcttggcctttatgggttaagtgtggttgcgccttatattttggaatgtagggagtaccataaagtaagacatcatttattacttattcacagctttaatagtacattgtggatatccttagagcgggtacaataagctgactaggcgggctccaaaattatgcactacagcatattcctacgtggagggaagagaactgatgggagagaaggaaatggatgacaaatttgtcgccgggcgatatctctcttctcaacgtgactgcagtccaactcgactattaaaaacacgcttggtaggtcccacacaccacaaccaatccccttccccaccgagcgagatcgatctctctttccccctccaccccagccgagcccgctcgatctccgcccgcccctcccgtgcgatcttgtgcgctcgactcccacgcgtgatttccgcctctccctcgcgcgcacaatctacctcctctctacttactacttcatccacgagcgtgaaaataaatttacatcttcctattttgccggccccaaaaatccggtggattgacgatgccgcctccactatccgccttccctcttctacctcgcttaatcgctcaccgaaaaccctagttctttaccaccaaggcactaacaaccttgtctcgccagaggaagagagaggttgcgccacctccatgtaccatcgcgagcttttcttaaactcccggtgtttcaaaaattgtgatatatgtgcccatatgcaataagtaccttgttttttttaggatatcaatggtatttgagttatgatgtaatagtgccttgtaatttttgtactacagagaatttggtcctggcagaaatggttacaagagtgcaatttactcttgatcatacacacggatatgtacatgttataattaattatttgattataagatataataagtaaataaacaatctattatattagtagtgggctttaacaatgagctattagtgagcaactggctatactattagctttgctagcctatagcccaacaaagcagtttccacgtaagcacatagtgacacgtcatagccacggcagcgacctcgctggctgaactcaactacttgaaaaataccgagctggttcaggttccctccacaactgctccccccctccacctcctcctccgccgccgccgcctccgccgccgccgccgccgcttccgccgccgccgcgccgcccgatgcgcctcctcgccgcggcggcgagagcacaccgttcgtcacaccgccatttcctcctctcctccagcttccacctctcctccgccgccacctccactaccacctcctccacctcctcctacgatcccatcaagcaattcctcctcctcctcccctccaacacccactcccaccaccaccacctctccctgccggcctccctccgccgcgacgccgtcctcgcgctcgcccgcctcatcaaggtctcccctccatgcctcctcgcgctccacgcgctcacctcccccacgtcgtcgtcgtcgtcgccgtcaccgctcccggcccgcttcgccgccgcgctgcgcctcgcctcgtcggcccaggcgctccccaccttcgcgtcgctcctcctcgcggctctgctgccggatgcgacccctgatctgctagcgttctgcgaggggttccgtgggcgtagcgggaggtacgccgcgcgccgcctcgccctccatgccttcctcgccgctggcatggctgacgaggcgctcgacgtgctcgcgcgcgtccgccgcgccggggacacgcccagcctgtctgcattggcggcgctgctgcgcctgctcttccgtggcggggaggtccgggctgcctggaaggtgttcgaggaaatggctgcgaggggaccgaggcctaaccttgccatattcaacgccatgatctttgggttgtgccacaggggtcttgtacgtgtcagcggtggcctgctcggcgtaatggggaggttccacgtcgtcccggatgcgtgcagctataacatcctgatgaaggggcactgcttgtatgggcaggcagaggatgccttcaatctgtttgacgagatgcgtgtgacaggttgttgtcctactatcgtcacgtataacatattgatgaatgagctttgccgtgagggcaggatggtggaggcaaggatgctgtttgatgagatgttgcaggctggagttgaagtgaatacaatcacgttcaatgttttgattgatggttatgcaaaggctggacagatggagaacgctaacatggcctgcgcagagatgaaggccatgggattaatgcctgactgctgcaccttcaacattctttcggctggagcatacaagtttgggaaggctgcgttgtttgtacttgatcagcagcagttgcatgaaatgtttggttcacagttgtcaacagatgggatagatatgttgatctgtagactttgttgggatgggcgattggatgatgcctgggagctcctgtgtagcgctattgagaagggtgttcaagtgagcgtttcaggatttaatgcgctgattgctgcatatagcaaggagggatttgatgaagaagcttttgagctatataaaactatgaacaaattaggtcttgcaccatcatcatcaactttgaattacttgataatgggactgtgtaatcgtgggagacttgatcaggcacggctgttcttagaatatatggttagaatgggatattgtgtgattgcatcttttaccatctacttggactcatccttcagagctggtgatgtattaggtgccttgaagtgttgggatgatatgaaaatagttggtttacagcctgattttgttgccttctcggcatatgtcaatggtctttgcagactagattttctagatgaggcttacaatggttttatcgagatgataagaagagggcttgttccaaataattttacttacaactccctcatatctgcattttgtagggctgggaatgtgtctgaagcattgaaattagagcagaagatgaggcagagtggccttgttcctgatatttttacgaggaacattttaattgatggcttttgcagagaagggggattgaacacagctaataacctttt

SEQ ID NO: 3052 - DNA, 1467 bp, Oryza sativa
ttgaataagacaaacggtcaaacatgtgctaaaaagtcaacggcgtcaaatatttcgaaacggatggagtatatatgtatacgattgagggctggctacaacctaacaattgcagctgacatttaatttgacatgtatccgtccgttcgtctgtatatagtatacgatcgaattgtttagtcgatttgatcacgacgatcgaacaggcgtacagcagcatgcatgcaagatatatagagtatttcttgtgtctttgtcttgttcggattgcactgtatgggttccaatgcttttctagcagtactccctccggtttaattaacgttttagataaggttgaagtcaaacttttataacttagactatcaataactttaaaaatatttagtttaaaggaactagaacaacatatatagatttgtcttttaaaatactataaaaaagtaaacatgcatttatttattatatatattataatagaaaaataaggtcaaagatgtatcttgtagaccgtgtcattgtctaaaacgtcaattaaaatgaaaccggagggagtatatacaaaattaattatactccctccgtttcgaaatgtttgacgccgttgattttttagcacatgtttgaccgtttgtcttattcaaaaaatttaagtaattatattaattattttcctatcatttgattcattgttaaatatatttttatgtaggcatataattttacatattttacaaaagtttttgaataagacgaacggtcaaacatatgctaaaaagtcaatggtatcaaatatttcgaaacgaagggagtatatagcaagatctctatagatatattccttccgttccctatttgacgttgttgacttttttaaatatgtttgaccgtttgtcttatttaaaaatttttgtgaaatatgtaaaactatatgtatacataaaagtatattttatgctgaatcaaatgataggaatagaattaacttagatttttaaaataaaacaaatggtgaaacatgtttcaaaaattaacggcgtcaaatatttagggacggttacgtctctctagctagctcagtagtggcatgcaaaataccataatgtagtgtgcatgcatggcgagagagagagaagctatagctgctggtggtataaattacacggggaatcgtatagtataaaaagaaaatttggcgggggcgcgatacatcccgccatatatacgcgcgcgcgctctcggtggccggccgccggcgtggtctaccacgccgcacgagcgcccggcgaccaccacccacacctctcccgagatagacagagagcttttctcctcgtcttcccttccgactccggcagggcagacgccgcgcctgcaccggcaaggcaaaacccccccccatccctgcatgcaaaccagcataaatatgtgtcatttttctattagtatctgcatcgggggaatatt

SEQ ID NO: 3053 - DNA, 8547 bp, Oryza sativa
tggaccaacggcccaacctgaacacctgggcttgatggagcacaagtttgagccgggcaattcttccttttgaactccaaataaaataaagcaaagaaaggaaaatttcagcatcctgaatgcgtcgacaccaagtagaataaggctgtgttcggtttcaggggttggaaactaatcctttcagcatgaaaaatggagcgatccattagcacgtgattaattaagtattagttttttttaaaaaaatagattaatttgattttttcaagtaacttttgtatagattttttttttaaaaaacgtaccgtttagcagtttgaaaagcgtgcatgaaaaaaacgagtgaggggggttgggaaaaggggcatccgaacacacccttaaaagtgactcgtaaacaccgcaaatacatgtacttcacaactactcccttcatccaagaatatagggtattatttctaaaatagcacaaattaagaaagagaaaatagtatatctgtgtagcttgaaaaaacatccttgacaaagtagtagtagtaccagtacgttctctgtaatctttttggtttttgacacggatggtgtggagtagtggtactactagacgttctctgtattttttagtttctcacagaaatcgattgatggagggcttgcagtccttgtttgttttgggagaagataaatccactatatttctggatatatcaatggggcaaaatcccctgtacttctagacatagtgagtatttctttcgtccctagttttaacataagaatttatcagaaaaaaaatagtttcagagtggtccactacacctctttgaaaccaatagtactctctcctcatcattttctctccatattactaaaagatataattttttttcaacattttccttaatttgttttgcttagctaaaactatactccctccgtcacaaaataagtacagttttacaccgtttatatccaacgtttgaccgtcattttatttgaaatttttttatacttagtatctttattgttattagataataaaatatgaataatattttatgtgtaactatttttttaaaaaaaatatataatttttttaaataagatgggcggtgaaacattgaacatgaatacttacggctgcacttattttagaacggaggtggtacctatttacggatggagagaataggtatgttgtgatattactaaaggtgcatcctgatgaacaaattactattagccaataatgtggagttcgggttcaatgctttagaggtaattaacatgtcgtcaaaactgtcaaatcatggtaagaaacctcagtcaagtggtcaaagagatgaccctgatgtgatcaatcgatgtggcacttcctctcctctctgccctaaactgaagaactgatgaaaggctggttggttgaatcacctgccaagccattctccaagcaacaaaatgtgcagaaatccactgcagcaaaagcatttgggcactggaaaatcagagtactctgcaaacgctcgtagtacctactcctactgcttataaacagacaaggtttttactctgtttcatgcgggagtatttacctgtcactcctcagtcaccaaagtaaaatgtgccggattgactgcgtcacaagttcagtggagtaaataaaaagtcacagggacgaatcaaccctgcactaaaaaaaagagaggaacatacatgagagtaagagaaagatagtgtactagctaggagtttggttgtaggtgtagcatctcctgatgactcagcagtaacattccttttccattttttttttaaatttgatctctcttctttctttctcaaaagcagctccacacaaaaaggacacattacaagacgagagacttgaaacgtgtctctgacatgcataccccaccaccaaacattctcactctcactctctctcagtaaccagaagaagaagaaagaagcaaagcatacaataggattaggaaaagaggcttacttttactaattactagcgctaattaacaatcttgcagtgatgatcaactagctagtagctcgctaaaaactagtgcaataatgcaaacccaacctctgataatcatgatcttgattgatctcgattaattagctagaggccgtggcggtggtgccggtgatggtggtggtgaccaaggacgaaatgcatcggtgccggagccggagcaggagacggcaccggagcggcaaagatgccggcggcggtggagttgaacggcggcagcatcgaggccggcgccggagcgatggcacccggcggcgagagggcggcggcggcggggtgaggcgggcactggtagcacttggcgaagaggccgaaggtgtcgacctggtggacgaagttggtgatgctcgcccacccgccgaagccgaagccgaccaccagcacccacgccaccacgaacgagtttatcacgtacgcccccgtccatcctccggcgaacctcggcggccgctccaccgcgttctgcaatccaatccaatccaatcagttattaattactatcatctcgtgatagcaggtacaatagctgactataagtcagctataagcatatttcaagaagataaaagagtagaggtaagagtagcgggttacagatttgtaagccagctacagcacagactgtaaaatgcatatgtgtatgacaggtgggaccaaatattgattatgtagtatatgtttataggtaactattgtatgaattggctattaattggctattaagttaactatagataatttagagtcagcagttagctatactattaaactgctctaattataattttcagttagattactgttcaagaatccaacagagagcagtatatatgaatgcagggatcagaaagaaaagattatgcaaaagtctaataatattgcacctttacttaattatatatgtttgagttattatactactgttaccgaattatacgaaacagaacatgcaactgtatgtattgtatgtactgtttcagaatcaaacagaacagtatatggatgcagatcaggaagaaattaaagattatgcaaagataagttaagcttgcattgggatgatgtcacaagtaggtcattaggtgaatgatggtattctactgctactagtatactgtgatgatgctgttgctgaaagctttatttttgttgctttctagacatggtatcatgggtgtcgacctagctctctctctaatgcaaatacaatgcaatattgcaatgcagtctgtctgctcggtgccaatggctcccggacagcagatggtacaaaaacattgcagcaggcaagcatgcagcacagcagcagcagcaagcgtcctgattaatctctacaccactttcagtagctttatggtacatatagcttttcttttatcatatcatatcatatcgccacttgctctggtttctagctcagctcaaaggaattgcatgctgtcgctgctcagatttgtcttgcattcagtctcttcttcaccgagaatgacacacttgcaacactcagcagcagcagaaacaataataatagtgtttaattaccagtgttacgttgagttcattggaatttgccacgtcccagcagcagatcaatcaaatagacgccaactagctagtcttgttaatggctagcgctagctttgattaattaagacaaacaattaattaattaattgatctgttctaattatcagtaagcactagaagaagcaagcaaggtgtgatggggaagcatggtgggctcatgctgtctaggctgcattgcaacaaccagctgttccatcaatcaccaaacatttgcttctgtatctagatagctagcatttggcaactatgtatacataggaacagcactgaaactatatcatctctacctaaagcctcagcaaatatggttgcaatggacccccaatgtaggcactcaaagacaaataaattcaagcatgtatatatgtaaaatgcattttgatgatgagaattagaaagataaagaaaattagtactccttccgtgttaggttataaaatgttttggttttgctcaaagtcaaactgtttcaaatttgactacgtttatagacaaatatagtaatatttataatactaaatatagtttcatcaaatcaataatgaatatattttcataataaatttgtcttgaggttaaaaatattactacttttttctacaaacttagtcaaacttaaaacaatttaagtttgaacaaagttaaaacgtcttataacctgaaacggatggagtaagaagaaaagtaagaaggtacctggcgggattgcggggagcggaaggtgaccatgtaggcgagggaggggatgatgtagacggtgaagctgacgaggagggagccgacggcggagttgatggggccgaagaaggggaagatgatggcgaggaaccagatggggaggacgacggggaggcgggcggcggcgcgcttgcagagggaggggcagccgtggaggccgacgagcttctcccagacgaagtagagcggggtgcaggcgaagccgaaggtgatgaactggtggatgagcatgagcaccaccgcggcgtcgcgccacggcgtccgcggcagcagcgccagcgcgttcgagtgcgtcagcagcgcgtccccgaacgcccagtacgccgccgacgccgacggcagcgtcagcgtcagcacgtacaccgtcgccagcaggtagatcgccttgaacttctgcggccgccacatcgcgtgcattatctccctgcatttgcatttcatcccttaattactttcttaattactactactataagttattttgactttggttaaaatcaatctactcccaagttttatagatataaatgtagtaatatttacaacaccaaatcagttcaatcaaatctataattaaatgtttattttggttaaaaatattatttttttcttacaaatttagtcaaacttaaagcagtttgatttcgaccaaaatcaaaataacttataatctaaaacggagggagtacatgtgtgtgctttcagattcgtgcaagagaaacgacgatgcagggcccagatgttggtgggcattgcgcatgtcatgccacgtgtgaccggacggtttaaaatatggcacctataagagtttataggtgtttgttctaggttcataacatcttttttagttataggtgaccgatcgaagttaaatattggttttctaacctgtaccaaagtgattttcctgtagtagcatgtatacagtgtggtcttgtcttgtcttggtttggtacataaagacacaaactatactccctccgtcccataatattaaggaattttgagtttttgtttgtaacgtttgaccactcgtcttatttaaatttttttaaaattattaattattttatttttgactttctttattatctacaatactttaagcataacttttcgttttttatatttgcaaaaaaaatttaaataagacgagtggtcaaacgttaaaagcaaaaacttaaaatctcttatattgtgggacggagggagtacaaagtagctagagatgatggatgcatgctagctgctatagactgagcttacaccaaagggcccagttagcttgtgttggcatttggcattacattgctataagactagcttgatccattaaacatggcaaaaatgactggttagaccacaaatacatgagtcaccaacgagatgtgatcgatgttcattcttcatttgctagcatatatatcaccctcttaatcaacttagacgaaaccaacagcatattatagccaactgccaaattgatatgagctatatttcgtaaaacaactacagaaatacattccatggctaatattacgagttttttcgacggttgcttagactcgacggtagcactggctcaacagaggggatttgcaattataacactgcaaacattaacttttgttataatgacactggacccatattttatagacacagatggacccatttatcatccactcgaagtgttaaaacagcgaagccctcatgtttacagtcccaatattacaattttctcctccatggacagatgaacgggacacgtgtacttggatgttaggaggaaccacatccacgtctcatcacgtggtaccccgtgtgttcctatatgtgcaagtggtggtccctaagtttaatgggaccacatgtcagtaagtacttcaagccatgcgtgcatggcacgtgaccatgcatgccattatgcctcgcatggtgcgcactcacgctccattagcagtgagccgttacactactgctaagctagcttaattagtggaaagaagtaaactaactaacaataggcaggcagcaagccagctataagtggatacagtactaatcgttcgtactttagagtaattaaactaaactaaacttagtaaaattaagtaggcactaatgaccaatcaaatggttaatcgagccatagctaatcaagagagaggatggtcggcttacacggtgacagcgtggcccccgaaggtgtagaggatgttggtggcccccgtgaagtagagcacgatgcttgtgggcccagagtgcgccacaccctccacctgcattattcccaatatatgcactattacaattactatctatcactattactatcattttgttatcataaataagtgacgtttgggactttgatcttatattaaaaaaagatgagtaattttacagttcttgaagatgtatcgtgaggtactattttttatattataaatttgatacattttggtacctaaatactatgaggtaccaaattttatattaaatttttggtacatcatgatacctcctcaagaactataaaactgctatgaatattatgtaagatatatatgtacctgtccgtggatgagggaggcgacggcgatgtaccaggcggtgtaggtggtcatgaggaggccgaggaaggaccaaatgcggtagttgtggaatgacgggatgaagacggtggtggcgcagcaggcgccgaagatgtacgtccatgtccgcttgtccagatggtcgttgatgtagtagatgttgctggcacacccgatcagttggatcaccgacccgaacagcaaaaacgtgcagttgaaggccagtcccacattcctccagtgcctccccagtagcccatccagcaccttaaaccactggttcaaaaacatgtatcaccatatcacgtactgatttatatatcgttaacgatattagagcaggtataatagtacggctatataaagccagccataaacatactttaagaagataaaaaaaaagagagacatgtatcatcatatcacatattgatttatatatgtgagagatcgattttatagtccttgagaaggtaagtaggtacctggatgacgtggttgcggaagtcgaccttgtcgcgctccttgcgggtgcggtactcgaggtagaggatgctgatgaggtaggcggtccagctgccgaggaggccgtagaagagctggaagaggaggccgctggccatgcccagctgcgcgaacgagtagggcagcgtcagcagcacctgcgccacctggttcgacgcgcagctgaaccacgcgtcgtacgccgaccccccgtgccacagcagccccgacagccgcgtcctcgccgccgtcttctcccccatctccgacgactcctcttccacctctccgccgccgccgtgctgctgctgcagccccagcgcctgcatcgtcgccgcccccggccccttctcgtccgcgtagccgccgccgctgctcccggacgccatgtttgttaattagctctgctgctgatgctagctttgagctgaactactcactgtgtgtgtgtgtgtctcagctgagctagctatgtgtatgagctgctgccagtgtgggtgtgtgtggtgtgttaagctaaggggaggagtgaggtggtatatatggagatggtagaggccggcagggctccagcagctggggcataaagaaatcagtgaccctcttttcctgtcccttttcctaacctttctttgcacctccctccctcttttcgcttcaaaattaaaaacaaaacaaaacaatgcgagagaaagaggagagaagagagcgtatgaagaggcacatgtgtcattttacgtacctctaacgtggtcattgacatgtgggtctagaagtagtgggctcgcatatcagtgaccaagtctcttctgactttaaatcggagattgttaatccgtgtgctactggggcttttctaacgaaatcctggggaaagaagaggcctgcaacctggggcattcatgccagggagagagatagagcctagtgtgagacataaagtagtgtacaaatctaagaaaaaaaaaattcaacttttcagcaaataaaatggtagatggatcgaggtgctactgctgcctgtgtgctggtgctgcgatgcaacacaactggaaggatgaggtgagtgac

SEQ ID NO: 3054 - DNA, 5924 bp, Oryza sativa
ccagcttacaggagaagccagcttacggcgtaagccggcttacgacacaagccagaaggtccaaggcttacgacgtaagcctccaccctcctccgcctataaatagggcccagaaggtccaaggcgaggacaaccgatcttcggtctcctgcttctcctcttgtagcttgtactcaaatccagaagaaataaagcttccactcactcatactttctgtgttccacaactctgtgtttggtttgcttgtgtgctgataagtagaatcgactggtttctcaacatgtcatcagcacgagactcttccgagctaaaaaggtaaacaggtgagaaatcagtttctactgatcatcttgctctttatatgcaaatcattcttctactatagttgaaataagcagaagaacatggtacctgaagtaccatcctccgatatcctctcagcaatacacgataacatgatggcggctctcccgccgttatcgtccaattgctagagttgatacatcctctcagcaacgctcggtaacatgatggcggctctgccgccgttaccgtccaaaggcttgagatggtacataatcttagcactattcgataacacaatggcggctctgccgccgttatcgcccaaattctagaggtgatgtaggtgcctgaagcaccggcatggcaacttaatggacggctctgccgccgttgccgccaaatatcggaggcaaacgaaccttctgcacaaccctgaagtgtcgttatggatgccctttgttttatggacaccacccatatgggcccttgatgccactaaggtcggctctatcgccatgaagcgtgggctcatagtggggaaagtactatatggtttatcttactttttacagtctgcacaatatacatgaagtgcccatgtatgctcttcattttgttttacatgcttactttgctgtttgcatgactttcataacattttttttgttatgaaattgattttctagcatgattgataatatttaatcaagcaatctgtaatcctgaagattacttaagttaatttgctaggaaagattctatgggaaactgtgtgataatcctgaagattacacacgatagtaatcctgaagattacgcatgaccaatttatgtcgaccccgcacatcgtatttacctgtcgtaaatactaatgatgttgcagaacatgtcggacatagcaaagaaggaattcaccgagcttgccttggatggtagtaactacctcacttgggcattggacgttgagattaaactcgactccatgggtctcgatcatactattgtgttgcccgaagttggcactgtggagtctacgaaggccgagaaagcaaaggcattgcatttcttgcgccaccatctccacccaaatctgaagtctgagtatatgaccgagaaagatccactggtattatggcaatccctgaaggatcgctttgaccagcaagggtcaattgtgctcccacaggcacaacatgactggatcaccctacgcttccaagactacaagtctgtggtgacgtataactctgccctccataggatcatttctcagttgcgtttatgtggcctgaagatcactgacgctgagatgatcgagaaaaccttatctacctttcatcccaacaacatagtgctgcaacagcaatacaggaactcaaagtacccgaagtactctgatcttatctcagtcctgttagttgcagaaaggcagaattaggttcttctaaagaatcattctgcccgacccactgggtctattgtaacgccccgattttcgttcgggaataaaaatcaattaataatacattttctagaaattaaataaaagttaaatcaatttaatcaagtgaaataatgggagaatttgaaattttcctttaaaaatcattggccgggaatattttgtaatattctttgtgccctaatgtactctccggaattttccgtgaattttcggagctcgagaaatagttttaatagcacaaagatcattgcatcaattaaaataaaaagaaaaaaaaataaaatcctccctcctctctttgggcccctttcggcccaattccccccctctctccctctcgggccggccttctccctcagcccgctcgcctctctctctctccctcaagtctgttttgcctccccagccggcctctccctccctccctctccgacagatgggacccgtggaccccacctgtcatccccaacctcaggccggcagctgccgttgctgccatggccgcccgagccgccccacgacgcggccgtttccgcccacctcctccaccccgcgcgcgcgcgctcgtccgtgggacctcgccgcccacgtccgcgccgtttccccccacctctcccctccaaaaccgccacccacaccccacgatgccgcccacgccaccggcggttgccgccccgactccgcctctcccgggctcgatcccgcctcccctcccctataaaaacaatcccccggccatcctctcccttttccccaactttcccgcactccccgcgctctctcccgctctccccacacgagcccaagcgccgccgatcgccggcgaccctccagccggccgctgccgccactgtcgacgtccccgcgccgcgccgcttgcaccaccggcttcgccgtgccttgccgcacctcggccccactccgttttcccatttcatcgccggaaccacctccccaccgcgctccctctctccaccactcaccgacgagctccggccgccgctcctcgccgctccagccactgccaagccgcgccctaccaccgtcggcttcgctgcatcgcgtggtaccccggccgctcttccaccttcgttggagaccgccgaatcaccgccgtcgtcttcgccccgtggagtgctgccgcctccctctgctcgagcctcatcagccgcctccttcgccgccatgcccctcggtgagctccgccgcctcccttttcgcctcctccgctcgttttcgccgctccccggccgccccctcgctcgtcgggccgacgccgccatcaccgttgtcgtcgtcgtccttcccgcgtcggtgagcatctccctcctcctcccctccctttctttttctctctttgcccgccggccgccgcatgcgtgtcgccgtcgcgccgcgccgcgccgccgccggtgtcgccgccggtggccgtccggccgcgcgccgccgtctggtcgggttggtcggcgagccaacccacccctccgccttgcacctctaccgtggactcggtccacggtgggctagatccttttgcccgctgacgcgtggggcccgctcatttggtggacccggtccaagcccgcacctccttgacccgctgacgtgttgggcccacctgtcggcgtcggcgccccttgctgacgtcagcgaatgccatttcctttgagaaaatatttaataattgcgcaataaatcgtgtttaattctagaaattcatttaaatggcccaaaacttctaaaattcatatctaattcattcgaactacgaattgagccattcaacttgcaaaattcatctaaaattgagctctacatgttggtttactttttatgtactgttttcttggtttttattagagtttttcctcgttttgcatgccagcgtgtagttcccgtcgtttcggaagatcgcgttcgcaaggataagagttcagaagatccaagtgaagaagcaaggcaagtcacacattccccttgagcatgttgatcccaatttacaaatgttttactgtttgcaaacaaatatgcatgttttgctaattacatggggtcagggttttacctatctgctcgcttgtgccatgtttacttgatatctgttctttgtcaaccttgggtaatgaatcgactagctcatgttacttatgtgacctagctagaactatatgcttagccatgcttaattaccactagctcagttgatgggataattgcagtattagacctttttagtatcagagtgagctgcgtgctcgagacacctggccatgcttcatggtcgtaattatccaactaaaatgcgactgaatggtgggctgtgggtgcatggttttgctggtcgcacccatggcagttaaggaccggttcgcgggatgccctggaagaacttatcgtacttaccacaagccagcgtgggcaacggctgggcttgtagtgtagcttttctctagccgacgtacccaggcgagggtgggcgtgatggagttgggtcggccggggtgtccggttgatcggcttccggattcaccgcggcacgaaaggggggctgcccgttgcctgctggggacgggggcgaaccctaaggtgtggtgcgatcggttagagggggttatgcgaagggtcctgtcacggcctctttccggtatgtcgtggtggcatgtcggcgcacgggaacgtgtcgtggggctgtcttgtgggtacagttgtacacctctgatcagagtaaaactattcgaatagctgtgcccgcggttatgggcggtcgaccagattcaccgtgattagtctcacacttaataaatcgacctaatacactgtagtttaggtgggttggttgggcctgttcaacgtggtgtagcgttgatcagtggagatttaatgttactttaattactcaacaattttactgttttgctcaataaaatgttttacaaccgcctttatgcaaatagccacaaaccgtccttgtgttccccttgcacgtctgcatcgttggtgtggcttgctgagtacggtggttgtactcagtcttgctattattcccccttttcagaagtgtagtgcttctgagctgaagacgaagttagaggaccaaggctcagaccccagttgagttttgcctgtggagtggagctgaagccccgctaggatcgcctttttccgctgctgccgcttttgtttcggtgtgaggactaagtgcctcttttgtaagtattttacgctttatttacgtttggaactgtatattacttgtcgttttgtgtaccctggctggtcctggacagggatttaatacacaaaatagtctggaaatttgggctaaatttctgggcgtgacatctatggcagtgcctgaagcacacgccaatgttgttggaaactcacatggccgtaaaagaggccatggtgaaaagaaagggaaaggtaagggaagtatcatattcaagggcaagagcaagggtaaacccagaggtaaaggcaaactcaagaaggttacaggtgaatcatctggggtaaagcaggataactgctatagatgtggaggcagagggcattggtcctgtaactgccatgtccccaagcacctggttgagctctaccaacaaagcatgaatgagaaaaagagccaacatgagtcccacttcaccattgagcctgaagctcagattgaaaagcatgatgacatgcttatcaatgttaaggatggtggggacgtccgtatggacgatgattgggacaaccttcttgaaaaagatgatgacatatttggagatctgaagtaatctcctatatgtcagtcatatgcagtgttccgcatgagtagcacatgtagaactttggtcatgaataatgctcctgaagagcacgcttagtcttttattgggcctgaagtccttgtaatgtttcccttaatagaatcaacttacttcatgtttaatttcatttctgtttatgttccataaacatacttgggtgggaatcccatggcagaagaggatatatgtctagtagacagtgccaccactaacacaatcttaagggaaactagatatttccacaccttaactaagaaaactggaaatattatgaccattgccggaagcaatgctcatatagtaggcaccggaagtgctactctagttctcccta

SEQ ID NO: 3055 - DNA, 4517 bp, Oryza sativa
tagaaacatacggtggtggcgtagtctgcagtctgcaggcgcaaaatacctgctttgtcttgagtgcaagctagcatgcatgctggcatgtagaaatggagagaaaaaatgtgtagtgcccatgatatcttaggtgcttttgctcacttgtcaaccatgtccaaggtcacactggctattactccctccgttccaaaatataagtgattttggatggatgggacatttcctaatactacaaatctggatagcgatctctatccagattcatagtactaggtctcatccgttcaaaatcccttatattttaggacggggggagtctcatccgttcaaaatcccatatattttgggacggagggagtactatatagacgtcgtcgtacgtactctcatatatgtgcatatatggtttttaataatcttgaatatatactgagttagtcaatttatttaatctcatactaggcatttgttagatatatattatttttctccaaggcttcaaaatcttgggatccaataatcacgcaaagtataaaattcaattgaatatggccagtgtgagaaattcaaattataattaatttgaagttgtaactataacttgaagaaattcaattcatgttaatatattacctccgtacataaatataaatataaagatatttggctataaacctatttgtagacagaggtcgtggtcgtatactgtagaacttctgaccagttcaaaaactaatatagatagtgttacccaagataatgagatctgttgagatattgccgagaaaaatgatttataggaatcacatgactggaaaggttgaaaaaatggaacttggatataacatggaaaacccttgcaggagaaaatagacgtactaaggcctaatcactactttgagaaagtagacattataagtaaaggtgggtacttctatgatgcattgtctacttaattcatttctccctttcaacttgggcgtgttgactttcaatttgatgtttttttttctttcaacttctcgctaatccattttagacttaactggttgtaaactaggacaacttagggtgagctcggctgcaagggctgcagcgctgctgcaacctgtacgaacagtgaagcaagaaaaaaaaaggcagctgctggctgcagccagctgctacacctgcttgccgtacaggcccttatacaatagcataggaactaactaaatagcataggaactaactaaacataaatattttcaacgaattagttcaactcatgtaaaaatatgtaaactaaaagtatattttagttctcgtatacattgaaatggtatgccatatataatcctcatcaaggtctcaaaacccatctagatacaatataatggagaggaatagataaaaaaaaaacttagctagtgaaatctatatatcagtgtgatataggtgtacatgtacatgttttttattactttaatatacattaaatgttagtatcggtagtgatggtggttctatctgcagtcagccactacaactgtcatgtggggccccaaacaaaatttgttggtggatcatatttgtcaagctaaccactggaaaatatatagcatgaatgattttataaaatgtatgtcaagctaacatataatgttcgactgatttaagtagtattatctgataattagataatagaaaatagtctaatatcgaaaccatcacacgaggtcttttttaaaaggaaaaagtacgaattaccccttcaaactatcgcggtcgtctgaattaccccctgaatcacaaaaccggacattcttcacccccaactatgcaaaccgaatgaattacccccctcgacccaatccacggtggttttggtctacgtggcagtccagttaggaattctatttataaaatagttgtgggacccacctgccatacttctattctcactcttcctctctctctctcacgggtggcaggcgagggacagagcagcggcggcagcgcgagacgcggagacggcggcggcaggcgggggacagggcggcggcgggttgccgggagagatggagctgtgcctccaccggtggacggctgcatggaaggcggccaccgccgtttctccctttcccctctccttttcctgcaatatagcagcggaggtggtctgggcggagaaggccgtggcagggagggccaccacctttgcgcgagcgctctctgctgctaggagcagtggtcgtcgctgcagggaggaagaatggacgagaaggcagctcagtcgtgtcgtcagccgtttgctcccccttctcttccgctaggtccgccttctcctccgccaccggccgccaggtctgccttcgcctctgccactagccgcctgggcgcctagtccgcctctacgtccacccatcaccgcctcgagatcccccttcgcctcacctcagcggatgggtggatgggccaccatgctgccgccgcgtgacgacaccacacgccgccacccggagtacgagctggtgccgaacgccggcagggacatggtcacaggtctcccccacgacgcactcgtccaccgtcccttagcctctgcgctcgccgccacactcgtccaccgtccctcagccaccgcgccgccgccgccgcctcgcctcctcagccaccgcttgcatagttgacagtgagagaagagagagaggaagaatgagagaagagagagaggaagagtgagaggagtatgacaggtgggtcccacaactattttataaatagtattgctgactggactaccacatagaccaaaaccaccgcagattgggtcgaggggggtaattcgtccggtttgcatagttgggggtgaagaatatccggttttatggttcaggaggtaattcggacgaccgcgatagttcggacgggggagggaggggggtaatccgtactttttcctttttaaaattccgttgtaacgcacggtgcaaaggagaaggccggcacgaacatgtagccatgattggtgattctgatgagtcatgagcgaggagtccccgtcatgtgtagtctcactacatcttgactggtcagtggtcactacataaccttaacaaatgccttgtccttacttaggggtacctaataggccatgcgtgcctcttcaataagatgcaggttttctaaccttgttggctgtgcttttgatgtttctatatccttaattctctgtagcacataggatcggtattgttgttgtagtagctagctggcatgatcatatatctgtaggctccaaattatgcatccaacagtgaacaatgaaaacttatcccagaaattatggtttgctactcctgataatggtgtgatcatgccgtcaacatgtaatctgattcgtatacataaatgttgtacactctagctaggcagctgctagaaatgttgttcctccgcttccaatgcaaaacatggaatcagatagaatttgaatttggaccggaatgtgatatttaatttccttcttatatatcttaatctagtgatatgaaaacagggttttgtgtggactgaaatctccaaaatcagtaagatttggagaatttcagtaccctgacagagtgcattctcaataacaccaactactcccttcattccataataaaatcatttccagatacattttattctgtaactgaaggagattgaattttgccttttttttccactgaaatttctcgaaattcttcacatacctgtatgaaaaattaagacatctatatatattacagggaaaacataagatctatttagtaggagcaaaaataaaaagaaatcccttggaattcccaagatctattatatgtcactggtggacaaaccctttttaatcccggttcacaacccccctatagtcccggttatgcaaccgggactacgaatccgggactaaaaatacctatttttagtcccggttgaaataaccgggactaaaaaaggatctttagtcccggttggagttaccaaccgggactaaagatttagtcccggttggagttccgaaccgggactaatgctcttttttctttttttttttggtttcctgctgcttgcatgatttcgagccccacgaatctccacaaatctttcgaacaccacgtatcattcaaaaaatccctaaatacatcaagctgcattttctatccccaaatacatcacaaatcattcacaaaatcacaaaatcatctccacaaattcattcacacatcacatatcacacagatcagaaaaagaaatccacatcgcacagatcggccgcacagatcagaaaaagaaaccacatcacacagatcgaccgcacacatcacatagatcaggaaaaaaccacatcgcagagatcgggcgccggccgtccgccgcctcgccggcctcccgcccggctgcctcgggctccgccgccgcctagggagcgtcgccgcccgctgccagccgcctatgcggccggtgcccgcctgctgccgcctcgg

SEQ ID NO: 3056 - DNA, 4534 bp, Oryza sativa
catttgattcaagtagcaggaagttatagaaaagctagattcagtcatggtatgccacatcaccgttagtaagtttgtaacaattattttgtacgtgtagccttttcctttgctgaattacttcaaactatttaagaaggtttacagtttacaccagttgggatagtatttcatggacaggtttcacctttagattataaacagtggttacctttgttctgttgtggttgaaattttacctgccaaacactttgtgagcatcagaacaaaaatttatatctcgatttgctcatatgattctgtacatgttcacaatgtttctgaatatttatccggtgcaatagatgaatttattcatgtacggtactcaataatatctggataccacactgttgaatacttgaatggcctaggaatttgaactggtaagatcaaattatggcaaatgctctgatgcactatggttatcatagatggattatcgttagtcatcttgcttcatcaggcaaaagcatccatagtctgagttgtttctgaaattttttttgaagggtgtgtagttgatttcccacttctgttcttgtatgattattataccatttctgatctggctcaaaactatcgaaatttcctctgttctgtttgtcttgtggttgaaattttagctattcatgactcgtgagtagcagagaaaaaaaaatacttcaacttactcatataattctgtacatgttcccaatgtttgtgagtacttatttgaatataatagttgaatttagtaatagacagaacttggtaatgtttggataccacaatttgttgaatgacctagctttttaaactgctaataggaccagtaaattgtggcgaatgatctagaagttcatttcttcttttgcttctgcaagtattttttttatacatgttttcttagatggcttcccccatatatgttccatatttggcacagtgtttcatagatttctagttatgattttaacttaatattggagtcaatcatctgctttattgtatgtatctgatggttagtttgtttctttatgctttgaatgcaaagtgcttcaagatcgtaagatgggtatgcactgatcttaggtttagaatttctacttgtggcataacaatatttgattgctgcatcctgatagttcctgtgattggctttgctcaaaccactgatcttatgtttaacattgttgtatgagtgcctttggtactattcatatctgtgctcagtattgatgttctcctcgatgtcacttcttttgcatatgactttcacaaacagtggaaagcctaaggactatgatgtctgtgaaggaaccaacggatggccatgcggtagatccggaaaaatcctctgaatcaagtgtaggagtttgttcaaaggagctatctgacagttccagtatttcctgttgtagagagaaccaacgggacttaaactgcaaagaagtcctacacgaatcatcaatcaatagctcccctaaccccaccgtttctctcatttttttggattatttttgggctccttgtttaatttacacgttgtcttttactgttttgggctcctcatgcagattagcttgacgctttgccttgttgtgtccggtaccatcaaccgggtgttggatgtttatgccgagcatgtatgctctatgcgttttttcaaaaaaagaaaaactctcaggaaacaacgaagtagtcctccttattctaatttttacgaaaaaggacttacctttatatgaaatacaatgtaatcccaaaaagtacgagggcattctcaaaaaaacagatcctaatccaatccctcctcttactctgctgccaacccatccccaacacgcaacatctctctgcccaatccgccatccccatccatcaggctaatccatgcggcctcctcccggccgggggcaaggacggcgccggcgtttacaaagacgacggagcaaggggacgacatgcctcctgtgctgacctcctctaccgtgatggcctcctcgaccttgtggttgcgtccacggggggagggaggaggcggcacccgcccgagctgccgccggtgctcccctcctccttctccatccacttgtggtgacggcggcggtggcggcggggggagggcagatccggcgcccgacgccggcggatccgccgtcgtgccccctcccttcccttgtggcggcagtggcgaaggtacctacgttggcggcagagccggccgcgcgtctgccgccgatgcccttccctcatggcggcgtcggaccggccgccggcgcaggactgccatacgtcttcccccgtcgccgcgttgcctctccgtcctctcctccgcagcttcccaactgttcccctctcaactctcgacctctcctctctacgcggaacaccatgaccgtcgccgccgaggtcgacgcatcccctgacggagaggagaggaggaggcaagcttgcaatcgcacaaccatctatcgatttctcccttccttctctttcttctttctttctttctttcgtttccccctctcacatgtcaggttattttttctcctcatcctctccggatgatttcacttttgctcgaaatctctcatgttgttgtgttgaaggcggcgaagggggaaactttggtggtggtggtggccggagaggaggatggcggcagcggcagtgacggcggcgggtacgacaaggccgggatggactccggcaagtacgtgcagtacacgccggatcaggtggaggcgctggagcgggtgtacgccgagtgccccaagcccagcttctgtcgccgccagcagtcgccaacatcgagcccaagcagaagatcaaggtctggttcccaaaacagaaggtgagcaaaagcatgcagggatatactatcaaactggtttgccttctgtgtgtctggctgtgaaatgttctggacaaattggttgacaatggagcaatagcaatagtagtgttcaattgtttgccttggttgtgcatactctgcttcaactatatttaggaattgcaagtctatgtatttatttgttttgcttcctttcttgcataatggaacaacctttatataatcaaggaagtatactgtacttatcagagtatgtgccagattaagccatccattaattagatgctgaagtaaactatatgactatattgcgatgtattctaattccactacttacaaaactgtagggtataagatttgcttatttttagaagataggctaaacgaggatcctttaggtgatatggccaaactaagacacatatacataacgtattatcatgcatctgatagtaatgcaaaacaatgcagtcctatttactttcactgcaggtatttaggctcatcttttatttttctcaagaggcacttaacatgatatacaaaatttgaagagttacattctttaaaaaacttctatgagttctgcctaaatgattgttatccatagtgtgcctaaataattgttcgatctagaggtgatccaaagattcgtctatattagacgtaacaataatgcagtgttttttttgtttattttttagcctacaaatgtttgacaagaagaggatgaaagagtgacataggcgagctctgtagcatatatagaatgtttgctatccactggtacatctttaacccgagcctacctactgtatagatgtgtttagtacgtgcttactatgcttaattttggggataatatagtgcgacgtgtaagaaaattcagaactatgttgtatgctctagctgaatttgtttacttcctacaaaaaaaatggatgaactactgatccagttcatgttgtgatcctcctccaaggagtttgttttgtttctttgctatctgaaagattccttttttttttttttgctttgttgaagtggaaggagctcattggtgtacctttgttgaaatggctccttttaatcctcattgtttcacatgtctgtttcattttcgtttttaaggggctggccttattaaaggttgtttaaaagcttaaacaagacttctgtttgattgatctttagtccctattttacctaccaggtgaattgtcgcctcgggtaagatattgctaacagggaattaactctatttcattgccttgtaattaacttgttatactaaatcagaagattctccggaggaggggatcaggggagaagaaaccaaagaaatggcagcaaccctcttttttccggaggcgatacattgatactacttcgatagtagtagcggtagtagtcgtcgtctatatggatatagaacgctacagagttcactactgctttagctattgatactacttcaatagtagtagcagtagtaatattttggaactaaacacggtcatatatatatatatatataagcaactgcaacgaggctatagggtcgtaaacaattcactgacacgtaccgggcctctccatgtttcatgagacacacgtcatacgtgcagtatgaattatcacggtaacagt

SEQ ID NO: 3057 - DNA, 1465 bp, Oryza sativa
gattttagcccaattcaatttaaaaatcaattctaaattttgtaggttgtttgtatgatagaaattggatgagattagaatttggaaggaatttgaatagggaattttgaaaggaaattatatttggatataatttccaaaagagatattttctagtttgagtgcaatattttgagagataaaatataaggaaatttatttgatgcactccaatgagagggagagaaaataaatggaggaagatagataggatttttagcctcaaaatatatggcatgggtttcaaaaaatggttgaggctaataggagatttggatgacaaggatataatctattatcttagcacaagaacaattattcacaatgtttgtagtaatattattcttgtgccgagaaggaaatcaagccacaggaattagatcagcagctagatcaaaaggaagaatttggatcaagaatcaaaggatatgtttaagatcaaaggatgggctaacaaataatcccactaaaattggaattactttggtttaggttcaatggcaaaattgggaaggtttcttggaccataatccataaaaatagaaaggggtttttcaaactaaatttgaataaaagagttttagtcgaaagaaggttttaaattaaaaccaaatcaagaaatacctcaatttaaccaaatatatttttaaatgaaaaatacaaaagaaataaaataccagagaaggattttatgcaagttagttttagaaggtccctctaattatattttcctaggtttaggatgctattaaaaatataagactcggcatgatgcacaattagaaaacggttaattttcggtatgttacataatacctctcctgttgctgcttatcatacttcctctgatacttattaataattctagccgaattcatctgaaaacctcgagtttttcctccatcggctgttcggccagctgtatgtaccatattgacaggaaaaggattgccattgaccttcatcggcttcttggaatcatcaaacttgatttttcctccctcaatagctgcctgaatctgctatctgaatattttgcaatcattagtagaatgagacccagagttatgccacttgcaataccttctcttgcccaattcctcagccgatgggattgtgtgaccagcaagaagttgaatctgcttctcccgaagtaacagatcgaaaatcttatcagccttggtgatgtcaaaagtcatacctctcctcttttccagaactatttacccattggcatggtataaccttcttgcttctgacccactcggctgttgctacctcggaatcatcatcatcatcatcggatccatacatgtaaggatagacatgattgatctttttgaagttcttcttggcttctgcaaacctttattcatgtagggttaccttctatgcaagatgtgatagactatcaaactcctgagac

SEQ ID NO: 3058 - DNA, 562 bp, Oryza sativa
aacacatatttttccctaacttctgcaaatcaattgtaacaattgtacctggagacctcttctcaatctctgccttccagtcgaacaacagctgaaaactatcttcataagtgccatgaatctggttctcagcaagcctccttcctgcccaagcctttgaatacttcagcttgatctcatatcgctcttcaagtttctcttttgctgccttagctcccttgttagggtttttctttaaccaatccttcagtctatctgcaatccagtcttgagtggccatcttcccttccatgagcttggttgtgggacactcatgtgcaaatggtagcttctttatctgcacacacattttaaatagtgctataagtcacaactttcaagcaaaatggatacaaatgtgcaaattgacatagaaacctgaatagttttgccattagacaaccttgatgcatgaatgccgccatttacacccctcatgcttgcagtgggcaatgaatcttgttggatctgtttgcaaattagagagttcaaatcctgtaacaaccgcaaagtgcctaatagc

SEQ ID NO: 3059 - DNA, 509 bp, Oryza sativa
agtgacaaattttctaaagcagagcaagatgaaccaatagcttctaaagcttcatcgccgacaccaagccataccatctttaaggatttcaaatattggcatccttttgcaacagagatcattcctttgttttcattaacatgcttggactccacggataggacttccaagttatggcagtaggtaccaattgcatacagggatctgtatgttatgcaaccattgcagaaagaaatatcaagagagaccaatgatttactacgtatctttacaaattcaaccagtccttcgtccgtcaactcttgaacaccacacagctttaattcactaagattgcatccctctgccagagtaatcaacccatggttttgaacatagccaccctgtaagaaatgttgtcaataaaaaatgaaactcaggggaatacaacactaaatatcagcatgaaatgaaacctcaatgcgaagcttacaacgcgaactgctgacttggacatgataacctcaaaa

SEQ ID NO: 3060 - DNA, 619 bp, Oryza sativa
aagacacccaacactatattcaagacacatgatcaacatacaagccctcatacgccaagacatgatgccggatttccattccagggataagcacggctcgtcccctacggagtctgcagatactgacgggagagacgactgcgctatctttgatctcgccgggcgcgaactctacgaggaaggctaccctgttgccaactacgagtcagaccttcacaccgccctatcagcaacagttagatagactaccccaaatattgtactagtgtgaacatgatgaacaagagcaatgaccgggatcagccaacacgatgtactggttataacctgacaattcaggcgccctaacctgtataaaaatgcctatatccatctctattacctcagtctcgtgtatatactactcccaatgatccccataccatgcgaataccggaatcgcgacatcaaacgtcgacaggagggcacgatccagcgggggtcaagctgccaagttgtatgctctatcaccagcactaatatctaggttgcagtcaaggaagcctcgacaaaatctcgctcatcaacgacctgaccgtcaaaaataccagaagcttgtggtatacatacaactgcaact

SEQ ID NO: 3061 - DNA, 502 bp, Oryza sativa
atgcaagcttatagcactgcagattacaagagattaatgtttggtgagtgctatacatgattaaagtattcaataattatacattacatgttgataaggtgtcactaggaggcggcaatgagagtgatattaaccacataatactaagtactaacctcatcactgtttacttgaatatatcgtgcaactgctccaaacgcgaagttatcaactgatacaaaattgggcccagcaaaatccaaaattacaccatcttctctgcagatgccaatgtgaccgataaaggggatcaaccatgagattaacggtaatggtgtccatactatacaacaaggaaagcgagctcttcttgggtcaattggagcaggctggcttctgtcggtttccatcaggacagtataagcacaagctgttggaaaagagaaacgggttaacattaaataaaagtgtcacaagcatgttgataggggtgccggcaaatacacatcaaagcatgctagga

SEQ ID NO: 3062 - DNA, 686 bp, Oryza sativa
tgcagttggtccgaagattacaaggtcaagatggtgatgtaataggggaggaagttcctgcaacgcctaagaaaatatttcagatcttgcatcaggtccccacccccttcccctggctaatttctttttagatgtgttttggagtttcacttaaaaactctgataaaatatcacaattttttacacactatcaactttgaaactgttggaaaaagatataatattgttaataattgtatgctggatacataagtgtgaactgttttatccaacttcctctagcacagaaactctccctggcttgatttacttgcttgcataaggatgagggctataaatctgttgatggggatattgttctccctcatcaatgttctcatcatttttttcatccgcagaccattgaagctctctcatgtgttccttctcctgaactggctctcagattatatctgcagtgtgcagaggtattgctgtaacaattgatttatgctttccataactctgcatatcatgtaactacctttcatattacaggcggccaatgattgtgatctggaaccggttgcttatgagttctttactcaagcattcatcttatatgaagaagaaattgcggtataagccctgcgttgcccttccttgtgcacatccattttgtcacattacttcagggctgcaggaat

SEQ ID NO: 3063 - DNA, 835 bp, Oryza sativa
tgttggtagaaacacacatgatcgatatatctctctcacttgacaaaaacttgaagatgaacagtaagctaaagagcaatgaacacagaaagttttgtggtgcttaaatcttgccgcaccgttttcacgttttcttcttccttttattgaagggaaaatgcacactacggcctaacaaattgaccggattactcgctctaccatccggattacgagcgctatcccactcgtcagatcgtgcagcgagagactcgcatactaccgcctcgacgtgaactcgcacgcctcaggtctacagacgcgctcaactctgactagagcgagcccagaaaaacagggaataaaaaacaaacacataacgtgcatgaaaggaaactatcctaactgaataaaacagcttttgcaggcacaagtttaacgtaatatgcaacaaatctccccctaaaccttgtgctcgcgacttacttccaaaaccccgatccgcgagcgtagctcctcaaaccgcactcgaccaagggacttcgtcagtatatcagtgacttgatatgcagtcccagtgaattccaactgaactcgaccttcttccacacactcccggatataatgataccgagtagctatgtgttttctgcggtcgtgaaacaccggatttttgctcaatgcaatcgccgacttgttgtcaaccatcagcttgaaaacatctggttgagcttgattaatttctcccagcaactgtgccatctagacaccctgacatgctaccgtcgtcgccgcaatatactctgcctcgcaagacgaaagagcgacaaccttttgcttctgggattgccaactc

SEQ ID NO: 3064 - DNA, 789 bp, Oryza sativa
tgctcccttgatgaagagctggtgggctgctttacaaggacatcaacattctgtaccaactgtgagcccgatcccccacttgggccacttagcatgttttgaactggagtagcattgcctgatatgtgcccatgttccaaacagagcatagtataagccaggcatgaaatatcagaagtcaaaagtagcattcctgttttgtcgacatttcactacaggacaaatcatgataacaacagctatttaagtactactcaattctaaagctaagtgcccatctttgcaagatcctaaggattcaaggtgcattaatcaaaatatgttttcttgtgagcactcagaacaggaagttctccattcatggtcaaggcaacaacaaatgctcctgccagctggcagtcagcaatgaaatgatttaagggaactccaaacaaacataaccctatccacttaagcataacaattctaacgttcaaagaatcactaacaaatgcggaacttatttattcatagcttcagaactatttgatgacgtgacagcaatacaactctacttctatttcaaagaaactaaaatttaatcccatgcaattgtgcaggatatttgggtagtttcataacaatctgaaaatgtaaccagataagataagtacctccgatggaattaggagcgcctatgtgtgaaacatctgcattcagcaaggatgaaccagctccaggacgctcaggtggaactgtgccagaggcctgaagatgaaaatgacatgagctagcatgataaaatgaaca

SEQ ID NO: 3065 - DNA, 756 bp, Oryza sativa
aacatcaatacacactgcagttccactttcaaatcctgcatttgccaagtagcgagcaaccaacttccttgtcataagcattgcttgttcttggcttagagattttccttctactctggatccatctttccctcgatatttgttccctttcttataatactcaggcatcattccaaatctttcaagcattgcagtgttgcgactaacaggcgccggtaaattatcaagaaccccatgaacttctattttgtagatcctagacgtctcacttgttctaggaattgcgctttccgggacacagtcagctggaaacctaatttctggaatgaaagtatcatctgttaaattactatagtccccagcattctttgaggaagggccattttccgacattgggactgagatgttgtgaccctgatcatccataaacacagccctcttccttttatgcacactgcaaaccttcaggtaattggacattccctctgatgttctttttggtatatctttgtcacctgaacggaacttgccatgccatgtcctgaatttttcagcatattgtttgtaccatgtgtcaggtaactcttcgtatcgattatgtctttgagataacatagtgttctccctgcttggactaaatgaggttctagattgcatctgcagcagcaaggacaaatataaccatcagcatagcatatgaatcacatcaacattagttagtatgcaccaactgcagctgaatgctatacataatta

SEQ ID NO: 3066 - DNA, 530 bp, Oryza sativa
agattctttgttatccgtattagctatacttttatttttccagggtaatttagttttaagtgttcaaatcggaagcactgaggctgagagaaatgctgactagtttatgtacttacatacctaaaaagccttctgtgtatgtgcaatattagataatctgtgtgggcatcaacttttgtactatttaggttacaagccttatttttgcaggaatgcactaaatgctcctgttctgtagttattgtttctgcatgacctgagtactttagtgtttctatatattgtgtagttgcttgcatgctatttgtggtgaataacttatgaggttgtacttttgttataattgtggttaatgtactttaatccttgcagtccaatggtgaaagaggctgtggaaatgtccacagacgaagaatcagacggtgtcggtatatgtccaccagatggcaacaatgatgatcgagaggaagccattagtagtaatatcatgataattgccagaaaggcgaagtacctgtgttaaagacccg

SEQ ID NO: 3067 - DNA, 578 bp, Oryza sativa
tcgttttgacagttaacgtactgttcttgtttttttatgactctggtcagcatcagtaaatcacacagagattaaaaggaatcaaacagctgggaggaaattaaaatgaccaaacttccaagtttctctttcttcagctctcagatttcttcagtgacacaacagaagctagaaaaaaaaaagctttaaaaaaaaggcatgtgtacacaaatctgcagaactagcagttgccatttccaacaaccaaaatctcagctagattattctgtacataggagtactgcagctctgctcgatcgatcatatcctcctcctcaccaactccgatccaactgaatcctgaacttttttagaattcagatccttggatatctcatctacacatctacgtagaacaaaaacaagatgcatccacgtgtaagtgtccttcttggccagccgtccgatcgccatgcatgacgatgtccacggatagatctcatctttttcatgcatgaagccttttttctgggagatgtctacttcatgcatgcatcggcgaaaaatttttctttagctcgacgcctttcgatttcgat

SEQ ID NO: 3068 - DNA, 604 bp, Oryza sativa
atttcaagaaaggttcttgaaaatttgatcaagtcatctgagaggggtgaaccatctggcaatgagggttctgatattgatacagacacagaaccagaacaagatacatcagaaaagaaacagaagcagacccatttacctacatctgtacctgcagctgacaagttagaaaattctaaacgtgtggcacaggaggaaaacacccttcctgccacaaaattcaagaaacaagacgctgggctggataggacattattcataagcaaccttccttttgatctaagtaatgaggaggtacagagcgcttctcagcatttgggaaggttgaatctttcttcccagttcttcacaaactcacaaagtatgtttcaccatctgttagaacatcatatttcctttatttcctgctgttgtatcaaccagaggtcgtttgcatgtacactcattaatgcatgtttttgtgctatctacacaggagacctagaggaactggttttgagaagttctacacaccagaggcagatgatgcagcagtttctgctgccaatgctgctcgtggattgggaatttttataaagagcagggctcttaagataatgaaagc

SEQ ID NO: 3069 - DNA, 663 bp, Oryza sativa
aacttatttattcatagcttcagaactatttgatgacgtgacagcaatacaactctacttctatttcaaagaaactaaaatttaatcccatgcaattgtgcaggatatttgggtagtttcataacaatctgaaaatgtaaccagataagataagtacctccgatggaattaggagcgcctatgtgtgaaacatctgcattcagcaaggatgaaccagctccaggacgctcaggtggaactgtgccagaggcctgaagatgaaaatgacatgagctagcatgataaaatgaacagaactacataaatgattataggataaaccaatcagtgcatgttgctctagttgtccattttaagtccaatgtaacaaaaaattgaattgcaaataataaattataggcacaaaacgaggcatagccacacattgcaacaacataagctgggaaaaaactgaaggcaaccaacaaataggctaatttcagcaaatgaaggccagtgaccatcaaattctggagcacataaataggctatttttcgtttcttagaaaatcgatgacgacatagaaaagacaaattaagctgacatcacccaactaagcacaagcacctagaaatggctgtgacagcttatacgcatgccagggcggattcaacgtgggtgca

SEQ ID NO: 3070 - DNA, 946 bp, Oryza sativa
ctttttcttccgatgtctcattttgcgacgtggttatgagcatcagaatttgaactcaggttgctgttatgatctcaaggctgatttgctgctctcctatttttgaaagtgccaccacttgtgctatttgaagtattgcttaagctggataacacgtgtttcacccctggtctagttctatttggtgctaatgaacgaggtggtggcataagaactcgagcatctctctgacgctgaaaagcaaaacagacgggattaaatgtagggaagcataccaaagcaacctactggaaatttgaagaagtttgtaaattgaaataccagtatagagagaacaacctgattcttttcatcgcttgacatgccagacgctgccttacctgaagcactggaagctggttctctgcattaaactaacaaaatcaggaaagatgccttttctgcagaatgtctatgcagttttagactaagtacaacattaacataagagactgaaaaggacaaactacaagcctatgatccaggcgcacaaaacagctatgatctcaaaaggtgctatctttaacaaataatcgagtatttcatggattacttccagattttgtattatccagagataatttttagataaccctacagtaactaaacatagacaagcttaggaaaattactgtaaacagtgagtagtcaccaattctaaagctatattgctatctgagcagcaaagcataaatttattggttatatacatttatctgagcaaatggaataattgcaatatagtagcttaacacatgatatatcagatggaacgtaacaaggaagatgcaacaaacatgagggagcatcatacttggcacttttgtcagtccattcatcatcagcctcttcatcacttgaactccccgacatgaagaagtcgtcatcactcacatccacagtatca

SEQ ID NO: 3071 - DNA, 3891 bp, Oryza sativa
ccaaatggcacacaacgccggtggggggatggcgtatggcgtacggcgacggcgagggtaggcggcggcatacgggactacggcggaggccggatccgctggccaggagggcggcgcccggtggtatgacgataggggggaggcggcgacggcgggaaaagggcggtcgttgaaggtgatggcggtgggatggcgcacggcaatgatggggggagaacgtaaggccgtgtctaggggaggtcggatggcggcgaagggagggcggacgacggcatagacagggctacgccgccggggattgggatcctcaaacgtgaagtcagagggacgtggtgactgatatgtgggccccaccgctcgtgggcccacctatcagtgaccacgtcatggggcagttcacgtcagagggaccctctccgtgccgtcgatgcgtggcgtgggtggggcgctgttgggaggaggtgggaccgtgggagacggcgggtagagttcgggaggggatatattgggttctttttcgagaaaaatcatgtgttttttctattttacagcgctacctaggaatgcaagcagatcaatccgcaaacccgcttatataccaatttgatatataaatgagtttatgggtagatccacttgtttctctacaatgtggcaagccaagttaatacgtgaaaacccacatattaccctttatttaacatataagtaagttcgtgggtcgacccgcttacatcccttgagccgctaccgctagaaacggaattttctctttttcgtgttgtatttctgtgaaacacgagggaattttcagataaaacacaacggagcatcagtccattcgaggacataaaatacaaccacacaaaatttgcgtggcagacatgcacgctgccagtcacaaccaggagggcgggaggggggggtgaaacggtcaccacatgcatggctgcacagggatttgactgagcatttgctccctgccagagttcgtagcctaatcgagaagcttttgcgcctgcaaactacttcctctgtaaaaaaaccaacttagaagaggatgtcacctccttacaataaatatggagtatgtgccacaagtaccgtggagaaaaacaattaaaaaaatgagaaaaaccgtatccctagacctgttatttattgatgatgaccagtacgactctacaaggatattccaaaaaaaaaaaagtctatagaaaccatcatgatcccccgattcacatagctgcggtacgtccaaaaaaccctagccgcattgtacatgaaatccgaaatccaactattttaccttccgtttgtattggaagttggtggacgtaaacatgttcagattagaaatcgagtcgctgtaactattggcagggtaggcctaaaatggagacatgcaccatatgttttttttttacaaactaaactgttattagtactgggattaaggcaaattaagaggagagcagctgacaggtcttacaagagaagctagggctgacacaaattaaagaaaaagtgtgggtggagatatgagaggatgtgcgcgaattaagtcttttgtcctactaacttcattttaaaatgtgtgtgttataaaatgattgctacagatagttcaacaaaaaaattataactcttataaaaaaagggagagtgacatttgtcatgaatatggtggttgttatacactataaatattaccaaaaacaacactatctttaaacacatatattatatgttaaatagtttataactgatgataagagtatgagtatttatatttctaagtaataatgtagagtacaacaatgacatgtctttatgcaatttcattaattaaaaatattaaaataaattatatatatatatatattattttgtaaataaatatttttatcaagctgttattaaaaatctaagtttgctactcattattagtctcttattagatgaatgtataatacaatttatccatatgtataaattaattatttatagtaatcaaatattctttcagtatccaatataaatgatattcatctgtcgtataaatcaatttttacacaaaacaataagaatatctaagtgtgaggtcttttttttcgtccatcttattaatctaatttgtgttagctcgatttagttaacatccttaaggattgaaggagtttaaataaagttaggtaatttttaaactatcattttgtattgtatcataaaacaaataatgttactatacaactattaataattatttataattttacttatatagaaaggaatatcgtattttatatattccaaatttatattacttacaaataagtggatatatatatatgatacaaaaaagtaatttatatttaagatgaattaatataaatatttttatttaaaaaataatattcttttttacttaacaaacatattaatttagtgtattcaaaaataagaaatttaataaatatgaatttattattgttaacgaaaaacacagtggcttcgaaaatttacttaattacaatgtaggtccaaagttttggtttaagaccaataaacaagatatattagatgcggaacccaatcatgtacaatatgactaccaagaatggtacttaatatgagtacgaccacattcaaccttactctcaacgtaatacatctcacaaccactatcaacaatactgcagctgttcaatgctaattattctttcgttaattattttattattcttaatatatgtactgggattatttacggagttaattttaggaaggacagatacaccctttcctagtaattagcatgagagagacgtcttcttccatagtttaaattagtgagtaaaaatatatttttaattgaacaaactatatacactgcagtgcatcaatatatgcaagtgatgaagtgaagccataccagcttttttttatctcgtttaaacaatgtacttttgcagtcatttaaagattttagagattattgtcttatcttgttgaggaagagctggatctaatcgagatagccgttaggggaaaagttgatcgggtgggcaggaaatataaagtgttaccatgttacttttgctagtaatttaaagattttagagattattgtcttattttgctgaggaagatctggatctaatcgagatgaccgttaggggtaaagttgatcgggtgggcaggaaatgtaaagtgttgccatgtttgagttgtcaataggttgtataagggcaatatcaatgcacgtggaaaaactacaacggaagactaatttattccattgaggaagagagactaataattcaccggaaagaagaggggaaagtaccacatgtttcaattggttgatccacctaacttacattttcattttgttatcgtcatgcgaactggaccccctctgcctgcatgcttcgtcaatctgactctcaagtctctagcctcgtggatccacaagcaaaaagaactgcctgcatgcttcgtcaatctgactctcaagtctctagcctcgtggatccacaagcaaaagaactattcagattttagagctatgtacacagaattatagaagggcgtcgtgattgaaattcggtattcgttcgcaattccctgtaattatcaagctgtcttttaacaaattcatgtgttaaaagaatggtttctgcgagtgacaactgctttcataagtattattttagagaagatatatattccctccgtcccattttaagtatagttatggtttttcgcgaccaactttgcccgtctgtcttatttgaaaattttttgaacttatatttgcacttaaaatgggacataatgagtagattggagtaggttgcttacaaacttgcaatgtttcttggacag

SEQ ID NO: 3072 - DNA, 4581 bp, Oryza sativa
tgcatgaaaggaaactatcctaactgaataaaacagcttttgcaggcacaagtttaacgtaatatgcaacaaatctccccctaaaccttgtgctcgcgacttacttccaaaaccccgatccgcgagcgtagctcctcaaaccgcactcgaccaagggacttcgtcagtatatcagtgacttgatatgcagtcccagtgaattccaactgaactcgaccttcttccacacactcccggatataatgataccgagtagctatgtgttttctgcggtcgtgaaacaccggatttttgctcaatgcaatcgccgacttgttgtcaaccatcagcttgaaaacatctggttgagcttgattaatttctcccagcaactgtgccatctagacaccctgacatgctaccgtcgtcgccgcaatatactctgcctcgcaagacgaaagagcgacaaccttttgcttctgggattgccaactcaccggactggatccaaggaagaacatgacaccgctggttctttttcgtgtatccacatcaccggccatatctgcatcagaaaacccaactagagtagccggcgtctccgatctccggtagatgatcccgtaatcaattgtgccagcaatgtatcttagtatccgcttcaccgctgcctcatgctcggcagtgggcgcctccatgaagcgactgacataacccaccgcgaacgcgatgtccagtcttgtgtgaaccaagtaccgcaaacttccgacgatgctgcgatagccagtagaatccaccagtggtgcatcactatgtttgctgagcttgagccgctgctccattggcgtcacacaggcattgcagtcctgcatccctgccttctccaaaatacgacgcgcgaaggccgactgagtcagccgtgtgctgcccgccacctgtttgacctcaatccccaggtagaagcagaggagaccaagatcgctcatcctgaaaagagacatcatctccgccttgaatcgatcaatctccacagcatcacttcctgtaatgattagatcatccacataaacaccaacaagcaagtggtgtgttccctgaccttgagcatacacggcgtgctcaaagtcacagcgcctgaaaccaagtgacgttaggcttgtgtccagcttggcattccacactcggggggcttggcgaagtccatagagcgccttgtccagcttcagcacttgatgttcatgcccctcgaccacgaagccaggcggttgcacaacatacacctcctcagtgagctccccattgagaaaagcggacttcacatccatgtgatggacaaaccacccggcctgtgcagctaaagcgagcagcatgcggactgattccagccttgccatcggagcgaacacctcgttgaagtccaccccaggctgctgcacatatcctttcgccaccaaacgcgccttgaacttggtcacctcacctcgggcatcctttttcaccttgaagacccacttcagtccaatggcatggtgtccacgagggaggtcgaccagtcgccacgtcttgttttcttcaatggttgcgatctcctccaacatggtgctacgccagcgctggtgttgttcggcctcgttaaatgaagccggttcctcagcctcctgaagatacaactgttctggagcgagtgcacgctcggcgaggcccggcgccgccgcgtcgcccaagagatcccctagggggcgataccttggcgggcagtcatcgtgatcagcatcaaggtgctcgtctcccctcgacggaggcgaaatgaacactggacttgtcccatgcaaagacgctcgtggtcccaagcttggcgacggcgtgcgcggctcctcaggcgtggtcgatgcagcgcgtcgcgagcttggcgatgagttttcctcctgtgcgccgcgaccaccaccgctcacctgtgtcagcacatactcgatggaaaactccgtctgttcaaggccggactcggccgcttcagcgccccagtcccagctcgcgccttcgtcgaagatgacatcgcgtgacacctgcacgcgcccggtcacagggtcgaacaccttgtaccccttggtgcccgctgcataccctatgaacaccatgggcgtgctgcgatcttcaagcttggagaggtgtgggcgcatgttcttgacgtacgccaggcagccgaatgtgcgcagatgtcccaccgctggcttcttgccgaaccaggcttcgtagggagttcggttctccaagcttttcgtcggggcgcgatttaggagaaatacggccatggtgaccgcctccccccaaaaccgcgccggcatccccttcgccttgagaaggctgcaagcggtggcgaggatcgtctggttcctgcgctccaccaccccgttttgctggggcgagtacggggcggagaagtgcctgccaacaccatgatctgcacagtactttgcgaattcaacagatgtgaactcactaccattgtcgatcctgaatttacgcagcttccggtctgattctgcctcagctgatgcctggaaatgcatgatcgccttcaccgcgtcccccttcctcgcgagcaggaccagccacatgtagcggctgtggtcatccaccagcaggaggaagtaactcttgccgccgggcgtcgccggcgagattggaccgcagagatccccatggaccagatcaagtcgatcagtcgcacggtagaccgcgcgcgttgggaacggcgaacgccggtgcttggagatgatgcagccgtcgcacagttgctcaacgtgctcgatgcggggcagcccgcgcaccatgtccttgtcagcgagcttgcgcagagcatcaaaatgaaggtggccgaaacgagcgtgccacaaccaggccgtgtctgaggtgcacgcggacaaacagaccggatgacccgtcatcagtttaagcaaatacagacgattggcattgcagcgtaccttggcgagcagcttcttcgctgggtcgcgaattgtgcacacaccatggtaaatgcgcacatcacaaccatgctcatcgagttggcccagcgagatcaggttggcgttcaacttggggatgaagtagacttcggtgagggcacggtgctctccattgttgcacataatcagaattttacctcacccttcgatgccgacaacggagccgtcgccgaaacggacggaaccacgcaccgccaggtcgagctccacgaacgcggagcgcactcccgtcatgtgattcgtcgcatcggtgtcgagatgccacacgcacgcatccatgttttcctcctgatggaggtatgcaaacaccttcagctcgtcgagcatgatggtctgtagcggcggcgccggcgcgagagggcgtggcatgggtgaggcccctgaaattgcacaaacatgggccatcagtagcgctggctccacatcgtcctccttggcgtgagcttggtgggcctccgtgttcttcctgggctgacggcagtctttcgcccagtggcctgcacaaccacagttgcgacagcgattgcggcccccgtcttgcgtatcgcaggcattttggtttccgcgatcaccgtcacggccaccggtgtcagagcgcttgcgaccccctcagcgccggcggttgccgttgcctttcttgccggaggatgcctccccagcctgcttctctttcagcctagccgcccattggtcctccgtgagcatgagcttgccagtttctgtggtgagccgcttcgccgtgagcttatcctcggcgttgcgccgacgaccggtgacctcctccagagagagctcctcaacatcgagcagcgtctcgatcgagagggcgatttgctgcagatgctcaggaaccgcattaaggaatttctgaactaccttgctttcctcgatcggagcgcccagagtgaccagcgtggtgaccaggttgttgaggcgtagcgagaagtcctcgacggactccccctccttgaactcgatggcgtcgtactgccgtagaaacagttgcgccttggacttgcgcactcgatcaacgccgactcgcataaccctgatggagtcccacgcctcctttgccgtctccttcacagcgagcgtcaacagcatctcctgcggcactgcacggaggatggcctccagcgccattctgtcttcctgaaagtctgcgtcgccgtgctagacggcttcccacagaccacgggcttggagcataactttcatcatcagggaccagtcaccatagtttgtcttcgtgagggtaggatagtttgctgagccgcccacctccttgacgacgcgccggaccggaacgatgtccctgtcttcgccggcacggcggcgaccacggcgcggaggcggtgagcgggattgacgacgcatgcgcggcactggcgaacgcgagacgcgcggcgtcggagccgacatggctctgataccacttgttggtagaaacacacaggatcgatatatctctctcacttgataaaaacttgaagatgaatagtaagctaaagagcaatgaacacagaaagttttgtggtgcttaaatcttgccgcaccgttttcacgttttcttctt

SEQ ID NO: 3073 - DNA, 6934 bp, Oryza sativa
acccatcggacccatggatacccccctgagtccccccttcaattttttcaccatggttgataagataagaggtgctaaaggtctcttaatagcattttagcatagtttaatactgagatgatgtgtttatgccagtgtactcggtatgttgaatccccccaactttttgttcctggatccgcccaatcaaatacttgcataaagtcacatattgccaatctaaaaaggcaatgtacagtttaagcagccccatacaaaaatattgcaattgcaaacaaaccactgtctcgcagtttagtaagaatatgactgattacattgccaattcgccaggttgcatcgatatcgcaatctcaataccgaggtctatgaagcttccgtttgtacacaaccctacatactttgagtcgaaccaaccaccgacactcaacagagcgcattgcaagaccatggacgccattggtctatagaaatgcccgatctaaatacctataaacattcgatgcaaacagtagctagcattgccgatctcagtaagctctcgagtactagaggggggggggggagaatggctgtaccctccacatggcgaccgcggcgaggtccttctccagcttctgcttcagcatcgcgttgtactccacggggtccaccaccgcgctcgtcgtcgccgccgccgccgccgccgccgagagctgcggctgcttaacatcgaccggcaccacccctcctgcgcccctgatccctcccgcttcggccctcgggctagggttcgggacggggctatcgagcaccgcctcctccagaaacttctggaagtaccactccgacgggcaccggttcatcgcgttcccgccgccgccgccccccgctacaccaccaccacctcccgaagccacgccgccgccgccctgctgctgggccgccgccgccgactgcggcggcggaggcgggacccagaatgggtcggagatctcctccacggagaacacccgctccatcgcggaatcggaatccgctctcgccgacgcggatcgcggggctaccctccgatggattcgcgagggggggattcgagggtttgatcggagaaaacctcgcgcgaattgccgcttggagaagaggagaggattgggaaggcggctgcgtgctgctaattttttgtgtttgggtgtaaattaatgactcggatgctcctggttacgacaaatactacgcggtttttgttccgaggttggggttgggaaaattttggattactactaatcttctttaccggataataattaactaacggcaaaatatgcgtttgtaactactgggtgagggtagtttggtgtgcagtgcgctgatagtaggatatactgctggtagtaattgttatccagaatttatccataaaagggatcaagtggaatttagatatatcgtggataaatggtataccgtatattatgtctttatttttgtcgcgacgaatatctaatatcaattttatggatataattgtgcattcgtatactacacaatgctagaaaactatagggacttcatccgtttcatattataaaactttttagcattgtccacacacgcatatacatacatatatatatatacacgcatatacatatatatatatatatatatatacatatatatatatatatatatatatatatatatatatgtgtgtgtgtgtgtatatacgtatatatacatatacgtgtatatacgtatatgtgtatatacgtgtatatgtatatacgtatattaaacggagggagtagctcggttggtgaattagacacctcaagttcgatttctcccttgtacaaaattataaattgtttgggagatctcctttttcatatactacacaataccgtgaacatgaattgccctagtctaacttggcaatcctataaaacctgcgaaaacccctcgttttcacggctggggctattcaagtaccctaactgcaacaacacaacagatgctatcgaagaattccaattcaagtaccgtagcggtagcgatagtcatacgtagctttacctaagtaccgaattgccccgttatttactaaaatccgataaaaaatatagcctcccataaaaataaataattgcattatccattctctctcttgttattaatgtattagatgggtaccacaaacgaatttgccatttgctttcctgttattgtcgccaaagtgaaaaagaaaaaaaaaaaggaagtaaaacggcatctagtttttaggtcaagactcaagaccgaacacgcacgttgcgatcgaacagaaaaatgtcacgagaatgtcgcggctgatcgatcgatttgacgacgatcgcaacgtgatctccccatgcttatccctctttccgcagcagcagcagcagcatcgacgactcgacgtgacaaaaggaaaaaaagcgagagggacacacacagattctggttgaatgcctttcccatctgcctattgtggattggattgggttcccttctttttagcctcatccaaaaagggcaagccgatggtggtatatgcaaatttatttatttatttttacttatttatttattcctttcatctgataatgactcgtgtcaacattttgtgaatctggccttacgtttcatcatcaatcagagatgataagaatgtttactgcttgagaaattgaaagtgtactgtttgaaaagaatcagagatgatacgagtgtttaggttgtgtttagttcacgctaaaattgaaagtttagttgaaattggaacgatttaacggaaaagttggaagtttatgtgtataggaaagctttggtgtgataaaaaagttgaaagtttgaagaaaaacttcgaaactaaacacggcattactgcttgaggaattgagagtgtacactgtttaaaaggatgagactgatttgtttcgccatgtaggaaaggtatacgaactgtttgcaaaagtggtttgatttgagctcctttgatgttgagattgttttttttctttctctttaatcattgcaaaagtggtttgatttgagctcttttgatgttgagattgtttttttttctctctctctcttaaatcttaattctttttctcgggggatttccaggaaagcgagattgcgcggatgatgcgtgttggtgcaagcaattgactttttccatggctacagaacatcactttttcatggctaattccagttattacagatcatgccatcagggagtaacatgcaaattagtatagctgtttgctcgctaatgcacagctgctaaattgacaagaccaattcaactatacttgcttatgttacactgcttgttccaatgttacactgtccctggaattcagatatgcttaatctctttcattctgacttgacaaggtagcccgccaaccaaccacttggttcattttgattccagatttccagtcaagaacatgtcatagctagatgatgatgataagcatagaagaagtgtatccctttcccctcgaaaaagcatagaagaagtgtatgaatatatatgggtttaattcgttatggagaactggaagaaaagtgtcagcatctgggaccatggggatcattttgaaagacaagtgacccctgcaaattgcagtcttcctggagaacttgggcaattaggggaggaaatctgaaggcaaagtcgctttcagcgcagccgttgtgctgcctcatccatggacaagagatgatggattcagacggcataatctccagtcagccatggaaatcatccaggccttatccgtccttgatgtgttgcctcctatccccacaggaataggaatatgggataactcattccaatcgctgtcttttcagcctgcaaaaggattaacacgatgtttcccagaattgatggcatgacacaactcctgattggatcttacaaaaagagcctaatatgttctgcatattaatttctcctgatatactactactccataaatgttcattggattttatttatgaacttacaaaattggagatgcaattctgggacagctatttcagacagtttctgagctaccttctttattattcatctgtatgttaacagaaggatagtactagagtgagatacagtcatgattcatgaatcatacaagaaaatactggattaaaatgctatgcaatttaatcagacaaaaaaaaacgatgtactgccttcttgttggcttgcatgggtggaggcatggaaccgctcatctcaaggcatagcagccttcatgttcttggcatactcttctactcttttcaacccttcttcaggtgaagcagcctctcctaactgtctaacaatagcgctgccgatgatcacaccatctgctccccagcctgcaatctgtattgcaaatcacaaagttattaacaaagacaggccaaatacgtagtaacaagaacgttgcattgagtctaattcacctgctttacatgctctggagtcgatatgccaaagccaacagcaacaggtttgtctgtaacctgtaaagtcaggaatataagctatattaagataagcgctcttcaatcacgaatttccgacatagtacccttgcaatagtttactgttttactggtgagagaaaaactaaactctacaaaccttcttgatctcctgaagaaggtactcaacacgcaaatttacatttgagcgtgcacctgtaactccaacagaacttacctgcataatgtacagactagttatcgcacacataattgattgccaccgatcagattcaaaggcaaaggtagaatatgatggtatttaatagatgagagatgaccaaaatatggatcatgtgcttgcgatgccataatggttcagtatttgcaatttttagctgtttcaatttcccctcttttttctgttcatgtcagtctgggatgactgatcacatgttgtttcataagcatgcaaaagtgcactacagataatatttcataattgtccctttgtacctgttgaaaacaaatattcaaaatataaagtaggggataaaagaaaggatatcatctatatttagtgacaaacttaaagcaagtgcttggggtctactagatacccacaaagataaataaatccttctgaagcttttgcaatctccttcatcctctctgttggtgtggttggtgttgtaagcagcacctgcaggcaattgtgtaaaatactaaaataagaattgctagatgaatgaaactcaagataactcaatgcataaggtcaactcttgccacagatttaatcgacaaaaggcaatagaactacacaagcagtttttcacttgaacattacatgtcagggaaaaaggtgaggaccaaccagctctatgccatgcatgacagcctcattcctcaacagcgctgtctcttccaaaggaagatcaggtactacaagacctgctcataacaagagtggataaaaaacaatctaaatgcactatacagaactacagatatctcatatctcaatgtaaaatttagaaatatcacttcacaagtagtttgtcaagcagattctgaaaaggtggtatattactgaactaactgccatcttttcactaataataaaagactaacgcagagatagagtcatgcacttcaagagtcaatagaaaataagaagaaatatagcttttctaacaattgagcatatccttatatcttaggcatatacagcagagatatcaacaaagtgaaatccttgattggccacatcttgtgtgatggcattttaaaataaactatggatattcagttcaattcagacagattgactgcaaaagaaactatggtctgctttgatctggtgattaaatcagaaaatttactcgatgccaaattgaacctagaagtgactacagctaacttcaaatcggtcatctcttttcaaagtaaagttttctttcttctcgtgtcttcaaatgccttttccgaacattttttttcctgaaaatctgccactggtaaaaaaattatttgcctatttcctttttctgttctgtgttttgaactccttgattactcaaaactgcaagacattttaagatcattctattaactatgcaggaaaattaccatgtacgccggcttgtttaatgatagccatgaagttactcactccgcgctttaaaattgggttgtagtatgtgaagataactattggacaagacaactcaggtataacccccttgagcatagctatgaccgaatcaaatgtagcgcctttcttaagagcacgcgttgctgcagcctgaaatgaaccgcagccaaaaaaaaaaaacttatgttgcagcccatgagaaacattaaagctgataagttcaaagaagcacatacctgaataaccggcccatcagccaacggatccgagtaaggtacacccagctcaatcacatctgaaccacaggaatcaaggatcttcaacgctttcgatgtggttgccaagtcagggtcactggcggtgatgaatggaatgaatgcagtctgaaaaattccgaggtcagaacactatgctcaaactaaatccctccctgaaagaatatgtgctagtatattttttcttgtcctcaattctgtcacatatagcacacgcagagcaatagcaatatagcattgagcactggagcctgtatgtaaactcacagtctgtctaacgtgttcaaagcaacatcgaacagctgactatcctgatcttagttacactctagtgaaaattgcttcagcagcttacccattcatatactacatagttctccataggcaaattgtcaaattgtcaagtgttacactccaccatagtgctgttttctcaaattgtcaagtgttacagtccatagtgctgttttcttgatgagaaaacttgagaggttttcctgtattg

SEQ ID NO: 3074 - DNA, 2282 bp, Oryza sativa
ctaagtcccttagaagaagagggtactaagaggtgtcccttacaaagaatgcacaatgacgacgacgacgaccaacaatcatcaacctcacagcattagcaatgtctacgcctgtccaatcatcatttcctgctcgcagtgtctttcagaaccgaagcagctctgggtttcggtctcaggacgtcgacccagacgaagccggcccaccgcacatcctcttctggagatgctccaggctcgccacccgctgcagcgaggctgtccggccaatcttgccggcagccagagcgccattgacgaagtcctcgtcctcctgagccgaagaaggtatgtcgggcatgtagttgttgttacctccgatgtcgttgttagtagcgaagtaattgttcgggtcatcttggatgggaacagcagcgtctgacgttgcttcagatggggagctgttgaatggcatgctgagggatgacatatcagaagcggcgggaaacaacgcgttcatgcctgtcacccgcttcaccgagtcctctgccatcttcacctgcgaatttttgatacatttcaatgttcagattgacctgatttaataatcatgtttggactgtccaaatggtgatttatagagtataatggtagcgtggattattcttctaataacagggtacacaagtcagttgaaagtttgaaacaagccaaagtagccaatccatgggatgcatattgcaaaaggcatatatagcatacctttgctctcaaggtctcaacatctgcttttagcactctattgtcaacagcagcatcattgtacttctggttaacatcagcaagacgccttaacagcgaggagttctcgactcttaattgcgatacctgtaacaagtaaatccataactgaagtcagtagccagtaatttaggattttatgtcttatcgaaaataactatgtgaactatcagacctgtgcctccagctcattcaagtgagctgcctttctgcttcttgagcgcctggctgactcccgattggattgcttcctggaacaggtcaacaaaactagcattatatcgagaagtgcttgctcaacatcttcatacaaaatcacccaaaagaacagcctatattattgtctagcacaagtaacataataaacaatacaaggtataatgcaatccaccatatcatcacgtgacgtttgaatattttgattttagtgagcaaatgtggggtgtacacactgtccatatcataactcaccataccttgtatgctgcacatacatgtaccctaccgtgacattattttacagccaactgagactaataccaaacttaaattgagaaaatagctgccaaatgaattctggtaatcatagtcgatagctatcaaatccgtggtttattggggtaattgctttatgaaaggtaaagctctctagggagtataactttgatttgcaaatccaagatgggggtgcatcaaccagatactagatacaatcggtttcagaaacttgtgacataaggaatatgatgtgaactcagatttaattcatcccaaattgcttatgtcaataaacaagtagagagcaaagtgctacgtgtaatggccatacaaattcctctcttgctcgagacactaagcactgagtatggcacacagagaactaatatggtaggtaaaagatcatatatgcgatgcaataggaaactgaaaggctaccggatgaaagtggaaatccaactgaaagggctaaggtgaaaataggacacatgcatgcatgacgaggtaggttaattatgtacagaatctatattacaagcaagcaatgaatgatcaccttcgttgtaatctttgatcagcaggtcttgcagttccagtggtctcagcttctccctccatgtcatcatcatctgactgctcccttgatgaagagctggtgggctgctttacaaggacatcaacattctgtaccaactgtgagcccgatcccccacttgggccacttagcatgttttgaactggagtagcattgcctgatatgtgcccatgttccaaacagagcatagtataagccaggcatgaaatatcagaagtcaaaagtagcattcctgttttgtcgacatttcactacaggacaaatcatgataacaacagctatttaagtactactcaattctaaagctaagtgcccatctttgcaagatcctaaggattcaaggtgcattaatcaaaatatgttttcttgtgagcactcagaacaggaagttctccattcatggtcaagg

SEQ ID NO: 3075 - DNA, 674 bp, Oryza sativa
cgcgtaattatcagcttacatgtcattcttgtattaatcagttccgtcatgcaatgttttatgcagatgggcgatccccattgccgtattattgtctttttggcttctttactggcgatgtttcggtagaagaaaacggggcagccgatcgtcactcctgccactccacaacaagatctcccacaagaactcaacgcgcccgagatcagactaatctgatgctcttttttccctgaaaggacagtacaaagtatcaaacttgtagaagcagaagatagctgtgaatcatctgtcttgtcttccatgccgcgttggagtggattggattggatgggccttcttttggtggttccctgccaatgtatcactgattcgtttcttggccgcggaagacgatgaagtcgctgccatttgagcgcgtgcgcaagcgttgttgtggttggtataccgagttttatgcatttttgtgtagctaggctgcccttacgggatgcgatctcattcattgattattgttcacaccccaccggtggatcttatataaggcttcctttttttttctctaaacgaaaaatttaccattaataactacacttgcttgtatgatgaactgtgatgggattctgggtgaaaatgcatcaacttatttgattatgaaaatgacatgtattagg

SEQ ID NO: 3076 - DNA, 1747 bp, Oryza sativa
catgtaaaaatggttccaagatttgctattccatagtggggctggcggctgctgtatattgcattggacttttgttagaaaaaggcagagcctatacagatggtaacacaacattgtcattggatatagtttataagaacatttacaaaacaattgtgtatattgtaccctgacgatcgaatatatggaaatttagtgatagtagttcttttctgcctatcttatgtaggaaaaactcttttcaagtaggaacaggactgaggtctcgcttggcaagaagttgaagaacaattatcttccagagatggaaaagattcacaaggtatctaaccgtaggtctcagagagttaaaattgctggtcgtagaatataatagaatgttattttatctcaatgttttgctcctcttgtagaagaaggagaggctgctcaaaaagcaacaaagagaagcactcctccttgacaaccgcttgacagtgaatgggttcacctctgtccgctctcgtcgtgaaagaaagcgtgtcacctatacttttggtaagcttgaacctgacgcgtttgagggaaaaactgacataggaagaatattggaccatatctgctccgtgccatggttcttctgtctggaaagacagtactatacttcttttacctgtttcattgaaataattgcccttaatagttccttctggttcagtggcattacccaatgatgtttttggccagttcttagtcttacatcttcacgtagttgttccttcattttagacgttcaatcaacttttgaattctactgtaatgtcagttaacatgtaatataatttactaagcttctatcggttttcattgaggaagctatatataccctgattacctcgtaatttgataaatgccagcaaattactctccgtaacctgttaatatgttctcaagtttgctacatgtaatttttatttaagttgcatagtctggtcattttatgcactgaatggtctcaattggagcaaaatcatatcatatacataagttaccaattctcttaactctgaacatgtttacttatcatgcagatgattatgagcgttcaataaatgaagccataaaaccaacaaagtaggtggattatctctgcttgatagttttcatttaataatttacaagtttggaaacatgatgcttgtctgtactatgtcatgatgcaaatgtctgaattatcattgacaggaaaagtgagaactcttctgagttcattactacttctaacagaagagtacacccaaaacgagagacagcgaccaatggtaggttagctggtccttcgccattatgcaatggattctatggagaatatccactaaggtcacatggctaccaaggaagtgagtgggagaaaaaacctgagactctcgatcgcaggtaacttcctaaatgcttgttatttagttggttccctgctgatgcttaccattgacctatagacatatttatcccattatatctacaggcaaagaaaaagatctcgaaggtacacgcaagattttgttgaggctatctcggacgtcgacccaaacttcgacagtgatgatgatatcattggtgaagcagtctatgatgaggaatatcttagaagtcgaaagcaatataaggccagacttttagaactcgataaagagttccaattggaacaagttgccgatgatggtaatgatgaagtggaatatccttcgagtaccagtgaagatgaaaa

SEQ ID NO: 3077 - DNA, 554 bp, Oryza sativa
ttctcgttcatggcgtggcacttggactgtacttacgcgtcggggtcgaagttgtcggtcttgaagatcttcatcttgtcggcgagaggcaccccaacatcaccgcctccagccaaaacgttcaccggcagcacaccgaactgcccagctgggcgcaacctcattcaacttggcggacaacatcaccgcgcgcaagcgaaccccaccgccgccaacaacaacagctttccctcttcttcctcccaaatgattaaaaaacttctataagtggaaccactactcgattgaaaactccactctcctttgcagctgcaccgattttttttttttttaaaagggggatatttttctttgggtacctagaataatgaggaatttaccttgaccgttgccaaaagaaaaaagacatatagttggtcttggaatatctctcgagactgggaatagacccgttctactcccttcatccatatatacctttaaaaacttttatattatataatgatattatatctctttaaaatcttttatattatactaaccttcttttttaa

SEQ ID NO: 3078 - DNA, 599 bp, Oryza sativa
ctttgaaggagactcagatggggaggtataagctttacttaaagcaaaaaccggtattagtttttttccttataagaaatatgggttttaaattattttttcaaggggattttgtcttactttcttcaaaagaggaggtggatgttgataatgaatgaaacaagtggtggttgtaaaaatttctttttttgtgggtaaggggacaagaatctttttgtgtttttccgggcttcaagggttgcctggaaaaggttgtaacaacattcatgagttttgttcttatagtgggagaagtttatggatttttttgggagcaacctcaattgatcctttaaaagttaggtatcacctgtggaatggttttagagggctatagttagcgatgggtctacccatgcaacactttgtgaggttgggatgaacagattagaatattaatttttgatagtttacttatggagtatgttggtcttgggtacctatcaaaagatataatcatatgtgatacattatcaagggccgtaggtatttgtgagtatggacaaaaagttttgattgacatcatatcaggggatctctagagaggacctgcaggcagg

SEQ ID NO: 3079 - DNA, 797 bp, Oryza sativa
tagagagtgtaaagagagatggaaatttaaaggagataccttacaagacaaaatcatgtagaatggtgttttgttgtaaaacaataattagctggaaatagctacagacaacattcaaatatataaaagctttatactgatgagctattacaaaatataatcttcggtaattcatgcacaaaatcaacttacctgattggctacttctgaaggtaatgcagcattcgacagccctaaaagtatatcaacatagtcagatgtcttgggaacctttggtacaccacatgcctcagtaaagaattcgcaaaggctgggataggctgaagatagcatctttcttgggaacatactaatcttattcttcattgaaatgactttctctgttattatttcagaacagcctgttgggtcatgccaatacagatcttttggggacaagaattttccaggaacaaaatcattagatcgagcacggtttaatggtgtaaatatagaggagcaagacaaaactcccgtttaatgtcaatcgttgcagtggcaaaaccttctgacacaaaggtgtagaatttgcacatctggtccatactgaaaaaagaaggtcaaagcattaccaagtttagaacaaagatatcccattcttaaactgcagtacatacatgatatagatggggactgggaatatttagattagtactccttacatgactgatacgctctaaaattgcagatcacaaaatgctatgattaaaatacagacattgaaatcaagtaccttgcactaaaagaagtctgtgaag

SEQ ID NO: 3080 - DNA, 3937 bp, Oryza sativa
cctactgatgcggcttacagaaacagtcatactgtggctatcagaggaccagagcttttgggaagagattgaagaggggccaagggctctgggtccccttggacttcagcaggtgagttctttttttcttgttttgatcttatgacaccaactattattcttattttcaccttccttttcagttctacctggatatgcaatttgtcatcctttccgggcgaggccgtttcttatctcggcacgtacatcaagtgatactgaaaatcattgatagagcaatggcagcattttctgctacagggatgaaccctgataggtatgttactatctatctgacttgcatctatccttttgcggttaataaatctatttcagtccgactgtatttagtaggaggtgctaatattaatatctatgcatgttatgctgtaatggcaatcggatgcatgcatgtattttgctccatgttacaattgtaatagattcctcacataccagaaactggctggaataggctagtgattatgcaattcctggtttattcattttttagataataattcctggtttattcatagctggaataggctagtgattatgcaattcctggtttattcataaaggttggtaactgaagatgatatacccgtttattctctgcagtgtccttccaagcgacgattggttcatcgacgttgctaatgacactatcagtaggatcagtggcaaccctcgaactgccaatggggatagggaggtgaacagcccgacagcctccgtttcagcgcaatctatatcgtcggtcagatcccatggcagctcctagtgtacatagtagccttagtaaccaggtcttgtataggagtgagtgtgaaatagtttctccatttccctgttgtattctctccttaggtcttgtataggagtgagtatctcctagctttgttccccatctggtgtacatgccagtatatagacctcgtttggatgggcctcaatcccagtccatccatgtgtataggccaggattctgaactaaaatcctggcccaaactcatggatggaatgggattctgcatattccaaaggcggccttaggaaaatatttgaattgaatcggttgttcagagatgtgtctttgtaaatttggtgagaaatgtatgacccagtgtagtttgtcttcttggaaacatactgtaccatcttgatacgcgtagactgactttgtgctgattgttcatctgaaaagagtattgtcttccaaaggctgatgatgaactctgaaaaactgaagattcatctgtaccatagtagcctagcaacaagccaacatgcactgaacacgcgcttgctacctgccaaccaatttgacttgtgcttacctttcttcctacagtgtggtcgctttcgcctttattttttttagtggtgggttcgcccaagtgcacggaattgaggacttcgcttaccattggagaatttggtcttcattgtttttaaaacttaattttgaatttgattattttttatttttcatcatagtttattttgagtttgctaatgatatgcatataaaagttttagtcacaaatgatcttttatttagtactctctccgttttatataaaaaatatcagcatctaaaatatcaaattagttttattaaatatattttaataatatatttgttttgtgtttaatatactactacatttttctatagatttaaaaagaagtttgactagtaaaaaaacaaaatgatttgtatatgaaacggagggagtaataagtgattcgaattaacataagaataagtaaaacaatatgctcatctcgcactccgtgaccaggtctattctaccagaccacatcctgtccacgtcactcgttagtccgtcaacgatgaggacgatttaccaatctccacttatcatgcagccgtctaatcgcgatccgacggccaggatcatccgacgcgctgccccttgacaaatcggacatggttgaaaaagcttctctcacaatctagttttgatcacattttaccaaccacaacttaaatacttaacaactcttgcataaagtaatgatcaaagcttgatgatgattatgcatggaaatcgcccgagggcctgtcaatttctcactctcgctatagttagcattttttcttggataatctttgatatgctactttgattaataatatctataaaaattttaaataaaaagtaactacatgttacgatagtttgtttaatgataaatttagtaacatcaattttatacgattgatctttctacttttcttgttattaatagtaaaaattaaaaatgtttgacttaatagtgtttctattttaggacggaaagagtacttattgatgatcacaatactaacagagccttttatgtatttagtgatttaatgtttgatcccttcaaagctttcacaaagttgtcctttccacacgtcctcctatatgcacttatatagcattgcattggcaccaaaactatcgacctcatgtcctcatcatcatcaatggagtgcaccggaaacatgtcggcggcgccattgctcgtcttgacggtggcggtgctcgccgtgctagcctccacctgcgccgccgacccagagccgatacaagacttctgcgtggccgtgccccgtgccggcggcgaggcgtcgccggcatacccgggcttcccgtgcaagccggcgtccgcggtcgtctccgacgacttcttcttcgccgggctcgccgccgccggcagcacggacaacccgttcggggccagcctgaagccgggcaacgtggaggcgttcccggcgctgaacacgctcggcgtcgccatcaaccgcgtcgacctcgcccccggcggcgtcaacccgttgcacagccacccgcgcgccgccgagctggtgcacgtcatcaccggccggatgctcgtcgggttcgtgagcacggcggggaagtactactccaaggtggtcggcgagggggagacgttcgccatcccgcgcgggctgatgcacttccagtacaaccctgggaacgcctccgcccgcgccatgacggtgttcaacagccagctccccggcgtcgtgcccgccgcgacggcgctgttcggcgccgacccggagatccccgacgccgtcctcgccaagagcttccaggtggacgccgagatcatcaaactgctcaagtccaagttcaagaagtgacactgacgtctcatccgccatggctacagcatatctgttttgctttagctgtcctagatacagtaaatagagttgtttcacgtttgatattttggtccgatatttgcccatttggcacatcaataaagtaaatttgaattgtcctatacatgcagcaaatatcggaaaaaatcacttaaagacatcaaattctcaacaatttagagaagaatttaccaaatgaatttgacgacagcacggcagccacggctaattttgcacccaacccttcacgcatcttcccatcttcctccaccatgacgcggccgcggcggcgccatgcttggttctccgccggtgatcggaatccttcccctgccgcgggcggcggcgagaatcataaactgccttagagtcgcaaacttgcacggcggagagattcgaggaggcggcgaggaatcataaactgccttagagtcgcaaacttgcacggcggagagattcgaggaggaggaaacggaggcgtatcccggcggggatgaggaggccgcccatcagcgcgcggcgaagcagccatcgacgccggcggaaggagaagcatatgacagtaacaaatcgggctgggcctacttttgccagaaagttcaatagtacgctgttcccctaaatgggccgcaacgaaaattccgaaattggtgtgcaagtcagaatatagcctgcgcccatttg

SEQ ID NO: 3081 - DNA, 751 bp, Oryza sativa
ttagtctagcactcgagattgttgagaaatgagaatgaaatcgtgtgccaattcattgctggtatcctgaatcctgatgtttgcaattgacagcgttctacaaaatgtataaagacgggtgggctatttatgtcagactaccactccattgtcttcatcttgtcgttcagctgcatccttcttggccttggcctcgtgcaacgcgttcaccagcctcgcgaggcaggcgccggcgtcgtcccgggggttcttggccgtgaggtgctcgccgacgtcggccggcaccaggtccacctccggcagcagcctctcgacggcggcgaacatctcgtggtcgtcgacgtcgaggtggatcttggccatggacttgaacgtctcgaagtcgcagtaggacatctcgatcttcttgtccatcctccccgtcctgatcagcgccgggtccaggtcctcgacgtggttcgtcgtcagcacgatcagccgctcctccccgaacgccgaccacagcccgtcgatgaagtttagcagcccggacagcgtcaccttgctgtcgccgccgacgccgccgccgccgccgccgcgatcgatcagttgctggagcagtcgacgtcctcgatgacgatgatggacttgctggtggtctggatgagcagcttgcggaggtcggtgttggtgtgcaccgacgtgagctccatgtcgtagacgtcgtagccgaggtagttggccatgggtaccgagctcgaattcgccctat

SEQ ID NO: 3082 - DNA, 684 bp, Oryza sativa
ccgagcgcgggcgcggcagcgcgccggcccggccgttgaagcgtccccaccgggagacgctctcggcggcggggaggtcgtcgaggcggctgcccgggatcgtctccgggctcgacctccgccgcctcaacgcgacccgctccggctcgctccgcaaggtcgccgcggaggccgctgcggccggggctcgcgtcttctccgagctgcaaaccctcgcgggcaccgtgactgagctggatgcgaccggggaggaggagaggagcaagtgccctcactcgatcgtcctcaccggcgacgagttccgggtgaaggggcggaccgtggagctgccgtgcgggctgacgctcgggtcgtacatcacggtggccgccacgccgcgcgcggggcatgccgaccgagatcctaaaatcacgctggtgcgggagggggacgagccgatcatggtgtcgcagttcatgatggagttgcaggggctcaagacggtggacggtgaggacccgccaagaatccttcacttcaatcctccgctccgcggcgactggagtggcaagcctgtgatcgagcagaacacatgttaccggatgcagtggggaactttctccgctgcgagggcctgagggtccgtgctgatgaggagacccgtatgcaccacccttgccctcagatgaaacacgatgaacctat

SEQ ID NO: 3083 - DNA, 2944 bp, Oryza sativa
ctatcttcagcctatcccagcctttgcgaattctttactgaggcatgtggtgtaccaaaggttcccaagacatctgactatgttgatatacttttagggctgtcgaatgctgcattaccttcagaagtagccaatcaggtaagttgattttgtgcatgaattaccgaagattatattttgtaatagctcatcagtataaagcttttatatatttgaatgttgtctgtagctatttccagctaattattgtttttacaacaaaacaccattctacatgattttgtcttgtaaggtatctcctttaaatttccatctctctttacactctctatgtaggtctttcatgtgtttgcgaggtgggctaatgatctccattctgcaaatgacaatatgaatgatatattgttcttggaaggatctcttcaaaagttggagacaacaatactgccaaccttgggtgataaatgggtctctctccatccttcttttggccttgtttgctgggtagatgataatgagttgatgcaacactttgaggactacaatggtgttaacttcatacaatttggagaactttcttatgaagacaagcaactgctgtatggaagaattgctgcattgctaaaaagcctaggcatccctgcactttctaaggtaattaaaatcctgttttgggaacggtcattgaccttttttatctacttttacctggaagaccattcatttttgtcactgagagaaattttaataatttcagtgttctttatttatgaaaaatattctccaaattaatctctattaagagaacaaattttatcattgagagaaaatttaataacttctgagtgttctttacttatggaaaacatgttccaaattaatctctattaatagaacaaaaaaagggcacaaaatagaatgattactgaactggctgtggcaccagtgtgtttttcatgcacttctcagatacctattttctacgatccaccactgctcatcctgagtgggtagtagcaaatcggagaaacttcaaggtggatgaatcttgattattttattttatgtatttatttattttgcaaaatatgtttggatgatgctgactttacacagcttttcttttgcggggaactttagccagctgtcaaaattgactgcctttgatgagacgctcagttcagttgatagcagctgaaaatatgcgttctgtctgaatgctgcacatgctttgatatttaattcttacacatcttttactgattatgtaaataaataaatgcatatttaacaattgcatatatacatcaaattgctcaagcatacgagtaggaacttacatattgaatattcttagcagcaactattgtccattttctgtatgtttctcatccaggattgttgcccttctcataggttatttatcgtgaagcaatattttacggtacagtggataacagagaaaaggttacagtaatttcttggctattaccatatatgcaacgctacatctataagatgcatagagatacatatgtaaactttcaacaaaatgaaatcacgaagcttagcaatctccaagttattgttgttgagaagttattccacaagtataagctgaaagaacgtgagagttcttgtaagagaagattcaaatgcaattgcctattgcaggttagtatctacctttctattaactacctgctcttcatttgtttcttattcttataagaaagagaacttctggagaagccctttttgctagaattccacccacaaacaattgtatttcaagttctgattattttgatttatttttttccacatgtggaggcctgtagggtagcattatttatcgacctccttaccttctaagcttcatgccttttgaactttatgctatgcaaatgcatgcataatgtactcattactcaacagtaaaattttactctgataaagtcagctctgatttcccaaatccatttgttatgttccttatttccagggaaataatctatatgctacgcaagaagctgattcacattcactgtttctggaactgtctagacttttctttgatggatcccctgatctgcactttgcgaactttctgcacatggtcaaaaccatggcagattctggcaccacagctgaacaaatagagtcttttatcgttaataatcagaatgtgcctgatttgcctgagcatgaagctgtttggtccttttcttccttgatcatagcagaccaagatgttgattgccaaagaactgaattccaatctatatgtgacagtcagaaaactgaaatccgatctacatgtgaactcaatatttccaagcatcagagaacgtctggagttgcttcaagttggccaccaaacgactggaaaacagccccagatttcataacatctcacaatagccagtttacacccaatcaagagacaaacttgaacaatgttgtaccttcgttagacttaaccaagactcagtgtgaaaactcagaagatattgtgggtcctgttgatcttgaaggggattggattacagaagatgattttggatcagaaaatacagtacttgcagaacgtataggggcaactggcgatgagcctcatatggtgatgtcgattaactctgccaatttgccggcttatttggatttagaaaccggaagctcagcaaactcagtggtggatattgagctaacagaattcaatgataaactggcaaatgtttcggagaagagggataggctctgcataaaggctccagacagagacaaattattgagaattggcaagcaaggggaagctgcagcccaccaacattttgttgatcattttggatccaataatgtcaggtgggtgaatcaagaaaatgaaacggggttgccttatgacattgttgtcacacacaaatcgggtttcacagaatatgtg

SEQ ID NO: 3084 - DNA, 1140 bp, Oryza sativa
tacgcaccccaagtggatgttccacattcatcaaagataagtgcaatattgatagtgttgtattgctgtgtaagtgggcaatcatgtttagcttttgtctttggttgttgtgatggcagggatttgtgcttgaagatgccactggcttatcattgaatggggatcttgatgtgcaatcggtgtttgcagggactttgcccactgcacaccctagcttttcacctcagaaacacctagagatgttgcctatttggcaggcccctccccttccagacgaaccaattgagattttcattggcatcctgtcagcaggcaaccattttgctgaacgtatggctgtgaggaagacatggatgtctgctgcccagaagtcctcgaatgtcgtggcccgtttttttgttgccctggtaaaatcttgaagatcaaatttgatggcctgtatgtccaagttgcatgcttatgtttgtggacttgagctgatgaattatcttttctgcagaacagcagaaaagaagtcaatgcagaattgaagaaagaggcagagttttttggggacattgttattgtgccattcatggacagctatgacttagttgttctaaagactgtggcaatatgtgaatatggggtatgtctaagattggtacatattttcgaacttgctactttcaagctgctctattaacatctaatgaactgtttgtcaggtgcgtgttgtttccgctcgatatataatgaagtgtgatgacgataattttgttagacttgaatcagtgaaggatgaacttaagaaaataccaagaggtaaaagtctctatgtgggaaacatgaattatcaccacaagccattgcgcactgggaagtgggctgtcacttatgaggtaagcatgtttttattttacaatgaccttatatgtcttatcattgattgaagtgctgtagagaacatttcaataaaagttatttggcctgcctgacgcggtttttgctgattcattgaaatcttaacagaagaatatagtattcatggcaatatggcatgctaatgtacttaactcaatctttcacccttttgaggcatctaacaaataatcacttactgtaaccatacagcgaaacttagcataacaatggtataga

SEQ ID NO: 3085 - DNA, 1111 bp, Oryza sativa
gaattcaatgataaactggcaaatgtttcggagaagagggataggctctgcataaaggctccagacagagacaaattattgagaattggcaagcaaggggaagctgcagcccaccaacattttgttgatcattttggatccaataatgtcaggtgggtgaatcaagaaaatgaaacggggttgccttatgacattgttgtcacacacaaatcgggtttcacagaatatgtggaggtgaaggcaacaacaaattcatacaaaaattggttctacattacattgagggaatggcagtttgcattagaaaaaggcaatgcctttaccattgctcgtgttgttctgaaggattcaaagaaagcaaatgacaaatcaaatgttctcattttgaagaatccatacaaactttgcctgaacaaatcagtgtatcttgccctcataataccacagcaatatcaaacaaaacgccgttactttgaaggtaactcggatttgcaaagtgaggtaaaccattgagatctgcaactttggctaagcctttactcaataggaagggaggttgtggggattttgccactgcacctttacttcaataggtacaatctgacatacgctatatcagttttgtttggctccatatttaccaacatagggttttccatagtaagctcattctatgctttctggatatactacttgtcgcgatggttctcggccatgtcataggacatcacctcgtctaacttgtaattttagctgttgtaactattcatccaactttgtggcctcggttttcagttcgaggttcttgatacatgaacgtgcctgatcataatgaaaagtcccattgcaattgtacaaatatctcaattttaattaccatgtgttatttactttccagtaatacgttaccagaatcctccaatttcacatatacaaagaggtgtgtgccaattccatactggagtactcctatatttttaagtcacatactaagggtgtgtttagattccaaaataaattttggtcaaaaatgtcgcatcaaatatttggacatatgcatggagcattaaacatgggaaaaaaaatcaattgcacagtttgcatgtaaatt

SEQ ID NO: 3086 - DNA, 817 bp, Oryza sativa
gggccacgacatcgagaacttctggcaacaagacatccatgtcttcctcacagccatacgttcagcaaaatggttgcctgctgacaggatgccaataaaaatctcaattggttcgtctggaaggggaggggcctgccaaataggcaacatctctaggtgtttctgaggtgaaaagctagggtgtgcagtgggcaaagtccctgcaaacaccgattgcacatcaagatccccattcaatgataagccagtggcatcttcaagcacaaatccctgccatcacaacaaccaaagacaaaagctaaacatgattgcccacttacacagcaatacaacactatcaatattgcacttatctctgatgaatgtggaacatccacttacagtgcggtacggaaatgatgtgacgtgtcgtccatcaacgttcacgtggtaaccctccaacccggcggtaagagtaagaacgaacatgcagtcctccacaaacgggtatggccaatcaacagagaccttctttgttcggccaatgaggcggttgagccaccatgacgtctttgattgttctgacctctcctcgtcatctcgaatccatttctcacacttcaccatcccatccactgtacaacattgtaaacaaaatcattaatcttcaggcattgcaaactaaatctaatgtttggacaaaacattgtataagttcatcgtgtttcatctgatggcaaggtggtgcataccggtctcctcatcagcacgggacctccagccctcgcagcggagagaagttccccactgcattcggtaacatgtgttctgctcgatc

SEQ ID NO: 3087 - DNA, 1781 bp, Oryza sativa
tgaatattgcctgatgatcactgattaatattagaatctggccggttgtctgtgatgactgtaaagtcctgtctgatgttgctttctcttgtagtgaaactcttcaatcaatctatcagtggcgtagctaatattctgtctggttttgttaagttcctaggaatgcggtggtatcagatagttcctttgaacttcttctgatgtgaaattaaccagtaacagttagcccatgaaccatatgaactttggatagtattggagcaaactaatgcccatcgcatagaaacgactcctaaaatcagtgtccacaattcatgaatcacatcatagatcactgattggccacctgattgagcttcagatagagaattgggttggtagtaaaatgatttgtgaagcagggcgtttaatatctggttttcagcagtgaacattaatgaatacctatatgtgtacaactttttattagccagaccgttcaaagcaaatggttgctggatttcatttttgtcaagcatgatatagccactgcctacatatgtatgctcagtcgagttgctgaaatatttttcttcatttgattattgaattgattcataattacatatgcaccactggcagctttcgaggcaatttgcaccccaaatgggaattaatacacagaatttgacaccacagcagcagcagcaactgctgcagcaacagtggttgaggcgcaatcaactggccagcccccgtggtcctcttacgatggcggacaaaaaccaggctatggtaaatgtgaagattgagaatacggtggactcacagattgatagcccctacggatcacttaccagacaacaattgcagcagctaaggcaccatcagcttctacagcagcagcagcagcagtttcagcagcaacagcaagttcaacagcagcagcaacaacaacaacaacaatttcaacaccagcagcaacaacagcagcagcaatttcaacaacagcatcagcagcagcaacaatcacagcaattgcaacaacagcatcagcagcagcaacaaccacaacaattgcagcagcagcatcagcagcaattggccatgtcaggaggccagaatgcccaactagcgcagcagctagcaatgtcaggaggccagaatgcacaactagcgcagcaattagccatgtcaggaggccagaatgcgcaactagctcagcaattagccatgtcaggaggccagaacccccaattagcacagcaatacaaacaaatgccatcgatgtaagtacctgtacctcctcaactctattgatctgtttaaaatctatgcttccatcttgttaacccctctgatctgattgcaggagtgcgtacggcatgaggatgccgccggtgaaagtggaagcgttccacgagctggtgagtggagattcgtctctgaaacccgatagcgactcaaacaaactcatgtctcccaagtaggtcagtcttacaccgagggaaaatcgcgtagccagcggttagctgtagtgtacaaaggactacatttgtgatctctcactgttgtttcccaagaactgaagcctttgtagttttcatcaaatccagcaaggcaagcagtgtattgtaattgtagatgtataagtggttactaactgaggtgataagatcgatgtggtaatttatcagaaacttgagattccttcatctgcctgtcctgctagttcgattatcttcaagaaaatctgagctccttgtttctgtgaaatcagctggttttgatttaccaatcca

SEQ ID NO: 3088 - DNA, 1399 bp, Oryza sativa
gcatggcaagttccgttcaggtgacaaagatataccaaaaagaacatcagagggaatgtccaattacctgaaggtttgcagtgtgcataaaaggaagagggctgtgtttatggatgatcagggtcacaacatctcagtcccaatgtcggaaaatggcccttcctcaaagaatgctggggactatagtaatttaacagatgatactttcattccagaaattaggtttccagctgactgtgtcccggaaagcgcaattcctagaacaagtgagacgtctaggatctacaaaatagaagttcatggggttcttgataatttaccggcgcctgttagtcgcaacactgcaatgcttgaaagatttggaatgatgcctgagtattataagaaagggaacaaatatcgagggaaagatggatccagagtagaaggaaaatctctaagccaagaacaagcaatgcttatgacaaggaagttggttgctcgctacttggcaaatgcaggatttgaaagtggaactgcagtgtgtattgatgttctttcagaaataataattaagcacatctctaagctggggcgtaacttgaagcttctaactgacagctacaggaagcaattttcatccattgaactccttaagatgttcctacagactgttggctacaggtactttaacctattttatatacgcgcctctttacttttttcccttttgttttccctgtgttctttttggtattaggtgcagggagatgccttctgtgttactatatatactaacacatcagttcttgcctaaaggagctagtaataaaattgagtcatgttgatggcagagcatgtgtatttaatgcatttttttttctataaaattacatgccaaagttctgatagtgattttctgctgtaacatttagtaacattggccccttgatggaaatcactaaaacgacaaatagaggggccaactaccctatgcagcaagatgcacaagtgcaaaatcaaaatgctcttcttcatgcacaacaggtaggaaactgctgctggctcaccatacttgtattatgtatatcttaatatttctatattctaaagcatatatgcttccttgctgaggaaatggtttagttagactcttaagaatttctacccatcaactgtgcaaggaggggtggttttagccaactaaaagaggcataaggctgtttgattcagaataatttatacacttagccatccaaggatagatcactgattaaacaagccttcggtgtcttccacttgatttggtttatgggagtgaatattgcctgatgatcactgattaatattagaatctggccggttgtctgtgatgactgtaaagtcctgtctgatggtgctttctcttgtagtgaaactc

SEQ ID NO: 3089 - DNA, 595 bp, Oryza sativa
gatgtgagatacataccagggatggcgagaaatctcatctctctcagcacacttgatgcagaaggatacaaatactccggtttaggtggagttgtaaaggtatcgaaaggttctcttgtttacatgattagtgatatgaattctgcaaacttatatgtccttagaggaagtacattacatggttctgttaccgctgctgctgtttctaaagatgaacctagtaagactaacctgtggcacatgcgtcttggacatatgagtgaacttggtatggcagaattgatgaaaaggaacctgctggatggctacactcagggtaacatgaagttctgtgagcactgtgtttttggtaagcacaagagggtaaaattcaatacctcagttcatcgcaccaaaggtatacttgattatgtacatgctgatttgtgggggccttctcgtaagccctctcttggtggtgctcgttatatgcttaccattattgatgattactctacaaaagtgtggccttatttcctgaaacataaagatgatacatttgctacttttaaggagtggaaagttatgatagaaaggcatgatagactactgtaca

SEQ ID NO: 3090 - DNA, 745 bp, Oryza sativa
ttctgatatacttggtggaacatcgtgcaacatgtaaaaataattcaataataagctaagaaatttttgcgtcagaatatatccatgcgtggtcttgttttaacgatttaattgcaacgaatttaatggtgcactcggatcatgatttggataaataatttaagagaaaaaatagtttaaagtggttttgcacgcatgcgtggcattggtgtcatgctgtcagcgcccgatttcccccccacaccatagggcgctcgacgcgtagatggttccagatttttgaggtgtcctgggtcagtaaagtcaatattaatttgaaacattttactaataattaaactaaaaatatcagtctttagtgtcatgcacgtagttatcatcagatttgtatttgaaaatatatttatatgatattgattcgttagtagctaataatatgttgtaaagaaattcaatggctaaaatataaacttgccatttaaaaagccaatacatcgtaaattttagaattgaagtatttttttttaaaattacacagtacaacgcagatactcacaacgcacgtacactcacccctatgaacgcacacacataaaccctacccctatgagcatctttgaagactgagccggcaaaacccaaattatactcagctagtcgatctctattaaatatttgtcataatacaataaaatctattaaatataacttggtctggactatatgcatggctagatttacgagg

SEQ ID NO: 3091 - DNA, 1193 bp, Oryza sativa
cccaaactagccaaatcttcaccagatgaactgataacttcacatgagattggcagcgaaaacaatgcagcaaacatcacaaactagtagcaataatcccctcctttatcagacacaaaacggattccaaataaaatctctcctatagacaaaacatcaaacggttcgtgggcgctgtcaaaagctgaaaaattcttccgcagaacgcactgaacaagtgaaccccatcccaatccccgtcgtttcgacagtgaattcgtgatcaatcaactcactactcacctcgagaagaaatcgagccctccggtaatacccgagccccgcccacatctcgttcacctcctgcaacaatcggcggcaaccacaaatcaagaactcgattaccactctcccacacacagcatcaaactttacatttccttttccagcgatggtggaggagagataatttctcttgtctcacctcctgcgtggcagcggcgaggctgtccacggtgggccagcgggccatccaccgggagtagtagtcgaccaccacgggcacccgcgtatgctgcagcatcacctccgacacccacaccgcgtacgccctcttctcctcgccgcgcccgctcccgctcccgctccccgccggctccgcggcgcgccgccatggcaggtcgcgccggttggcgtcgtaccaccgcagcagctccgcgcgcaccgccgcggcggccgtggtgagccccactgctgccctgcacccggacggcggcgccaggtcctcgatgtccgcggaggcggaggcggtggcggcggcggcggcggcgcgaggtctccgcgtcgtggggcggcggttcttggccgccttggggttcttggccatggatgcgaaagggcggattttttatttttgaattttttgaattgacgagcttggcgccagcgagaaaaaaaaaacttatcgaggaaagaaatgaaataagtatttcgggagggcctacttacgatgggtgtttgcaagttttttttttttcgaaatataggcttcgtttagttagggaaaagttttaggtttggttgtcacatcggatatacggatatacatttatacatttgaagtattaaacgtagtctaataatcaaaccaattatagatatcgctagaaaattgcgagacgaatttattaagcctaattaatctatcattagtg

SEQ ID NO: 3092 - DNA, 1314 bp, Oryza sativa
ctttatgcctcctttatgctttattcagtttggatgccctctaggacagcatcccattcaaagttcagattttagactaggagggtgcagcaataggctagcagccagctatggctatatatatatgtatccaacctccctcgggtaggtatggcttttgtgtttagtgaatgaagaaaaccacaaaatcgccccatctcgagtgccatcctcttctcaatgagagtaaccattgaaattctaacagcactacgatttacaagctcaatttacagttccctgatccccattcaagtgcaaaccttatctgtaaatggctgtattttgaacttccatatgataccgttttcccatacagctttttcagaattagaagctttatattgatctgaaaacttccaaattgcatagactttgaacatcatttccttgatcacaggcagctcactggtgaactggtcgacccttctaggccaggagacttcaaccaagcaattatggaactaggagcaacactctgcagaaagacgaagcccggttgctcccagtgccctgtctccaaccactgccaagcactcacactttccaaccaaagtgcttccgtaaaagttacagactacccacgagtggttccaaaagccaagccacggtctgattttgctgctgtttgtgttgttcaaatcaatgataatctctttctattgatcaagaggccagaagagggcctgctcgctgggctctgggagttcccatctgttcttgtgagcgaagagaagactgatgtgctgaataggagaaaagagatggacaaatatttgaagcaggtccttagcatagatgttaaaaggagatccagtgtgatcctcagggaagatgttggccaacatgttcacattttctctcacattcgcctgacgatgtttgttgagctgatgattttgaacctcaaaggtaatcatttgttgtccatactagcagttattcatttttgtttagatacactctattattcattcaggcaaaattgcctaatttcttcactgtagatgatggggataaattatgcatggagggacaagataacagcaaactgagattcattgacgaaaatgcagtcgactcaataggattgatatcagggatccggaaggtacgcacaaattcaatgtggtaaaaatatttcctcagagtttggttaaaattgtaagatgaatgctcacttcaggtgtacaacatggtcaaggccttcaaggagaagaggccgaaagagcagagccaagtaccatcgaggaaaaggagtagacggctgaatgc

SEQ ID NO: 3093 - DNA, 621 bp, Oryza sativa
agttttacagtgatcgataaagatagttgctgaccagaatctcttcacagttgaggattcttttgggttatcaggaatagcgtaaagcctgctgataactcggacatttccatccacaacagggacaacctatattagcaagaagttgtgttatcaacttatcatgtgaggatgtaaaggatcatagccatggtgatttcaataggatataaattatgtggaacacaacctcattgaaggctatggaagcaatggctcctgctgtgtaatccccaatgccacgaacttcacggagtgctgatgctgtgcgagggaactcgcctttttcaacaatttgctttgctccctactttgcaacaaaaagcaaaatcttactgagctacaaagagattcaactaaaatacatgcccaaaataatgcattgctccctaccaacaatttctattagttgcccaacactgtgtacatagatgcagaggtacttattcattcatttcatctttcaaggaaaaacattgcatgcacataacagtgcttcagcaagaaagattgaaacgaactgtgtgctgcataaacgataaaagtaaaacattttaacatcattaagtattgagtaaagtc

SEQ ID NO: 3094 - DNA, 881 bp, Oryza sativa
agtgatcatgaactaacaaaaataagccttttgtttgctctaatttaatgccgactcctcgtaaagatcggcaaagtaaggttaagtatagttttgacgtggccaaatgtgatatgatttttttttatcttttgcaagaaaaacaaattagattacctaaaggccatgtcataccctctcaagtagaattgaagcgtcaagcttattgtaaatggcatgattctcactctcattctactaatgattgcaatgtgtttcgacgacaggtttaatcggccatagatgaagggcgattgaaatttaccgatggttccaagatgaagcttgatcatgatcctttcccggtgaatacaattaatttcaacaataagaaggtgttgattggtcaaggagtggtcattggagagcctaggccaaagatgatggtgccaaagaatccggaggttggtgtttggaaggagaataggagcgaagtttcaagttctaaagctcctaagaggactaaggtgaccttcgatatgcttttgaataagtatgagaagcaaggtggtgagaaagctcgcaacaaaaggaaaagaccaagatcacctcctagggagcgatttggtcattcaccaagacagtcggaatcacctacatatcatcgttctcaaaacatgtcatgggggccttatccaatgctgccgtcgggttatccttttccttactacatgccatggggggcaacaccatcaatgttcaatcatatgcctccaatgcaatacaaccggggccagctcgttagcgtttatctttaccaaacaatggccagttttatgctaagaaccgggccaatgaggagaaaagggaaggaaagcgtgtcaaagtgcatagactactgt

SEQ ID NO: 3095 - DNA, 519 bp, Oryza sativa
atttaggtagatgcttcgctgattaataggacaacattaggtggtttttataactttagactttgggaatattcatatctcttggatactatggaatggttggcttatggtggaattggacatacccctttcttcctctttcaaaacccctaaaacctgttgtccggtggggtttgggtgcatgccagttgtgggaagtagcaccccggccaatataaggattaagctcgggcctctgttgcaaagcactaccgtacttccacatgtctagtgggtaaggcttcgtttgtggctcagtctggttataaacaaaagtacacggatggagatggacgaagtcgggggtcgatggacatctctaggacaaatgaaggctacacgagctgcggcccggtagtcgagatgtcatggcacagggccggtgtcctgctgctaggggctcagtcctccctacctgtctcggggtttccggccgtaggtggggttgggttggtactcttgtctatggttaggatgggt

SEQ ID NO: 3096 - DNA, 1001 bp, Oryza sativa
ttgctcctaagcattatcaacaaggcatgtcaaatgggactgatatgcaaacctatcaatgagcctgatggaggcggattaccaattagtcaatatactcgtgatactataatcctgatgagggcttcacataatgaactttttttttgccttaaagctttgttgaatattttgctcagcccactggcctcaaactgaattttcataagtcaaagtgtaatacctcgtaatgtactagaagtaaaaggtggaacaactagctggtacttttgggcgtgtagtaggaactattccatttacatatctatacccttaccttgtactacaaggtcaaggggattaaaatcatctaacctatttctctctaacctgtgttactgacatatgggccctctacccagtagacctttatgtcagtgacttaaagtctgagggaagtaagtcaaaggatcatcttcccaaggtcatgggtagtggatcatgctcatttgacagacagcatggagagaaggctcataacaagtgttattttcttgaattatggaggaagaacaaccttagtattttctttagggacaagctgacgctactggctgaggatttatatgtaaagaaccttggggtacaaccagttttacataaaagcccagtgaagatgggtaagttacatataggcccagaattatgcaaagaaggatttaacaagaaataggaaaagcaaccaggccgtcgatgcacacaatgacggtgaaagcagggatatcatggcaagttgtagaagatcatgccttggcacgaacccaaacagggcctcacaaggggggttgaggcctcagcaagaaaagaaaaaaaccagccatatcttgtatgtctaccaccggagtcaacgaggaagatcgatgcagaagcagatccatggccagcacaacctgttcctggggagatttggcgcactcccatagaaggcatcgaagtaatacctaatagtgatgagctactgt

SEQ ID NO: 3097 - DNA, 1333 bp, Oryza sativa
cagtagctcatgcattggggaagtggcatacaaattgcaggcttcctggagattcatttatccaccctgtctttcatgtctctcagctcaagcagtttgtgccagctcatgttccgatctttttcaattgccctctccatttcaacagcacattagagaactggaaccatctgcaattctgaattgctgtcttgttaaaaagggtaacactgttcacactcaagtgttggtgcaatggggagaaatgccatcggcttgtgctacttggaagattaccatgatatgtaagcttgttttttgtcatcgcctcaagggggtggcaatgtcacaccacagggtgtgttacaggtggaagaatcaaggcctggagctagaggtagaagacgatgggaaggtgggaaatggaaatgcatatcctgaagaaggcatcgtctagtgatgtgaatgtcatgtgtatgctgtgcggggacagtttttgtgaggatattgatctgtttaaatagacagttacagtaactaatgaaacgttgtcgggataatgaaaagaattcatccccactgttctggcggctcgacggtgaatcctttgactgcaagcagggcgtaacaatcttggccataccttcagttctgttgttgtccctacaccaatgtctgctaagtcaccatcacttggaatcccttcacctccagttggaattttcgctcaggtaatctgttatgctcttttgtacatagtcattgatgctgtttcttgtttacgtatagcatgaaaaataagatgttatttttcaaatactttgaagtattaatatatttctgttccatgttaagttcttatttacatctaagcaatctttgcaaattattaactaaaaatgcatggaaaaaattgtggcacctgattcatatggaagatgctagtcactaacttataaggtaataatcatgtgtaattgcatatgtggaacctgaggtgatggggaaattattagagggtaaaaatgtatgtgagtttgtaaatattttatttctcatgcttggagaaaatttagcttttaacacttctagttatgaactttttcaatatgtcaactttgtatttcttgtttgattcttcccttctttctgtgagtttctcatttttcatgagaatgttcctttttgaaggcctaaatacctcattgtttgactaactttaagggaaaggctcctgcattacatgttgatactgctcaaagaaatccagcaaggtgcttttgtggaaatatttgatcagttgtaaaacctcccagatctaaccagcttgaggatctaaatggtagatcccatc

SEQ ID NO: 3098 - DNA, 1235 bp, Oryza sativa
tccttgcaattgaggcaacgttgcaagttcgaatatatgaactaaaggatggctgtggcagcctaaacttgactataacttgtcgtgttagtcatatgaccccacaaattaagctctttcaaggtcccattgataagctacgtgaccaaaataggtttgtggttgttgcaacactgaacactttgatgattacagagttcaagctaacacatcagcatggctcaatcagtcggagatttgagtccagggttgtaccacatggaagtatgtctcattgcgccaagtttgcggatttagccactataggtgtggagatcttttggtcaatcttacccacttcgctacaagaaggcttttgagccttctactttgttacattctatttattttcaggcaaaaaatcacctacctgtaaatagtaagagcaatgcaagttttttattaggatttgtgccatatatattgccatatgaaccagaaccaaccaaggcttcatgtgtatgtcaattgttgggcaaaccttgccatatgagcaaaaaatatttttttttctttcaattgattttgtggctgttgatttgcacggagattgggatatcaaccacaacaagcacttttagcagtgattacgactccttccagggcaccagtaagttgatgatgtgatatacctaccttttttgttcttctctttgctttggatttcttgttctaacttcactcaatcagctaggaagaatatttatgcaaatttatattttcctgcctctaccctactccatattgctactagataatactatctccatattttaatgtatgacgccgttgactttttgtccaacgtttgaccattcgtcttattcaaaaaatttatataattatcatttattttattatgacttgattcgtcatcaaatattctttaagtatgacataaatatttttatatttacacaaaaaatttgaataaaatgaatggtcaaacgtttgtcgaaaagtcaacggcatcatacattaaaatacggagggagtagtattttctatctttgtgctcgaatactggctggctcatgttctattgacacatggacctaaaagagtaatatttgacaagaggctggctaaatacctggtggctgaactatgcaacacatttagcatgtcacacaagtggtgtgtttcctaatacactcaagcctgtacaacaaattctgcttcaacaagtaactaga

SEQ ID NO: 3099 - DNA, 1543 bp, Oryza sativa
tctgctattgtacctgctctgagacagccgtgcaggaggagctgcagcattggtagtagtttggtaatacttccttcattataaaataaagaaatttactccggtccaacaaaaagtatttcgaggtattgttatctcacggtatcaaatcgtttctgaccattggatctagctaggcatgataggtattgttagatccaacaatcggaaacgatttgataccatgatgtactggtatctcgagatagtttttgttggaccaaagcaaatccctaaaaataaaataagtttatttttcattacatataaatttgtgaaagtaaatacattgagagtacataaaaagataaataattacaataaatacattgagtagtatatgataaagtaagagtattaaaagtcttttggtttatattaattattaagatgtatgagatgtgaaaaaatgaacttatttgaaacaaatgaagtactatgtatgtagttctccctccgtcccaagttataatgcgtcttttttttagaaaaatcaaaatcgataattttgactaataatcatactaatcatatttatattaagtattatacatgttatatcactaaatttagacaatgttcagttcccttcaaacttccaataaatccgtcacatcaaatgtttggacacattgtccatgagcattaaatgtggacgaaaaaaaattaattgcatagtttgcatataaattacgagatgaatcttttgagcctaattacgccatgatttgacaatgtgatgttacagtaaacatttactaatgacgaattaattaggcttaataaattcatctcgtagtttacagacgaaatctataatttattttgttattagtctacgtttaatacttcaaatatgtgtccttatacttaaaaaaaattgcacacaaactaaacacggcctaatattttaaaatgctttcatgtgacttttttcgcgaggaaaagggaaaatatattactcctcagaaagattacattcgccaggtaggagctcagatacacacagagaagcttggaatcgccaaaccacacattgtttcgttctcagggcaggttgcgccaactcatgagcaacactatacctcctctatatctactttatagttcaacaaatggtttcactcatctttcattccttcattcatcatggaacggtccagattatctcgctgagatctaacactcatgatcgtctccacctcccacctcagtatacgccgcttttcctccagacgcgttctccttcccccaatcgctctccctctcggctcccgactcccgactcgactcccagtctcccacctgtcgcccctccttcccccaacctctctccgagcaaaccctaatcgtcgccgccaccttctcctctctcccctgacgccatcaccgccgtggatctcttcccctctctccctctgatgccgcagttgcatcctcctcctcctcctcacccgccacgccgcccgattctacgcggtgacgagccaaccctacgcagtgg

SEQ ID NO: 3100 - DNA, 1797 bp, Oryza sativa
gccaagtgagcaaaagagattgtttaacagaacgcataaaacgcaacaataactacccttaatcagcatgagaatcatcaagccttcaagttaaacatgcattgctttacataagtaaagctgattaccttaagctttacaagttgtttctctaacattccaaacaaaccaatacattgcattaggccttgttcggtttggatgggattgacgaggattggaggggattgagggggaataattccacaccacaataagtgtggaaaaaatcccctccaatccctccctcatggggattaaccaaacaaggccttagttggtagcaataacattgcataccaagctgagtgcaggaattctacagttttcagttttttttggcaatctttggcaaatttttcagtacgcaactagtgcacatatgcagaccccgacaccccgtaaagtttatattcatatattcaactgtgaaatatcaacaatcaagatatgacacccgtccaaaaatttcctaggcctattatgtgcactaagtatgtataagtttgaacagacaataagtaaatctaatggaccataataggttcagaaagggatccaattgatatacagttcaaagttcaaacactatggattcttacttacgaactcaaggtttcaaagttcacaagaaggcttcaaccctcaaattccagttctgccaaaaaaaacctctacttggtggtaatgtttcctggaaagtgatttggcatttttaaaggtagttttagtctgtccaatttaaagaaaaaaaaattgatcgattattgttaaggacaaccagtatgtagttgattactatcttaaatttggtagcaagtctgcaatggccaacctaaaattctaactttctaagtatttacaaagtagcagtctaaataattcaatcaactgaactgagtattgcacacagaagttctttttgatatgaggaacattgcagcaaagttaagttacatgagtgaattcagtattatctaaacataaagaagaatcaccaatccagctattattcatggaaactgggaagactgcatttcctttaggattggctaatttcctacacttagttatacctataatatctacttcttctagggctaactaggtataacttcaactcacttatttaccgtgcaaaagaaaatgtaacttacagcttcacatagtttacaggcgatgcaacgctcttctccagttggatagcgtctgagagcatgctctcctcggaagcgagggctcaaaggacccttctcaaatggatagttgatctgtaaggaggtaggataagaaggtaaatacaagcatgcaattacattataaaggaaacagtatgccaaattcaccacttaactgtaacattcttctcgaagaagtacttgagtgtcagcatcaaaccgcggaccatttcagtcaaaaacaatgtgttgatgctcctttcaaatactgaagcaagaaagttcaaaataagcattaaagggaatagtggatcacaaacttttccgatgcatagataaagagtatcattagaaattcaccagcattccaatctttcgctatctcctttgcaagcttctctttctcctcatcctctggtaattaggaagaaaaagtataagaaaaaaatagcgacatcacaccaattagaatggaacttcatgagttgttggctaggaagttctgcagactataataaaattactacacgcaggcaaggcgtgtttcatcatattggtttccagacataactacactgtg

SEQ ID NO: 3101 - DNA, 596 bp, Oryza sativa
acagtagtctatcagccactacagtagccgtgccggcccggcacggcccagcaccttcttgggccgtgcttgggccgtggccttggcacgtgggccggcacggcacgggccgctacaggagtcgtgcctaacgggccgtgccctagtgggccgtgcggtcggcgtgccgtgccgtgctgggccgggccgcccgtttggcctgctatacccctgcggcggcagggagagaggagaggaggcagtggcgagagtggaggcaagagggagtaataagttcactttatgtcccttatcattccgtcaaatttaatttgcatccctcaaccgcaatacaacaaatcttaacctccaacttgcaaaaacagtgcaaaagagatcctaatacactagggaggctagttttggttaacgtggtgcctacgtggcatgtggcccacatggcattgacatccatggacaaaaaaaaaacgggccacacttcatggacaagctgtcccagcaaaaaaaaaacacatgatctagcacaaactgcttgagctgcgagacatgaaaaacatggtgaatcaatgaatctttaggaaacctgcagtttgtat

SEQ ID NO: 3102 - DNA, 746 bp, Oryza sativa
gtttctttcatgatcgatttgttgttgttgagatggatcggaagcggtataagcaaatgtcgcgccgttgcgggaattccccgatcatctttgcgtgcattgggatcgacccgccgctgcccgtcgtcgtttggtcgccggcggccgccaccggcgccgcggcgcgcagccggggagggagcaccaatggcgggcgaggcggcatcaagggcgggaaggcgtgggttatttgttcttgggcgtcagccgatagctcccggcccagcccagcccagctgacgaggaatctaaggttgcgcatggccgcaggggcatggcagtggcgcgcgggcggcgagcgagagagagcaccacacggtggcgctgagggcggcggcggcggcgcgagcgcaaccagcgggaagccgggaaggcggcggttgacggagaccatcgccattggactcactggagcagcaggggaacagaggaaggaagccatgtgtggtggcattttgattctgggcgaagcttgatgagtttgggggccaagcttgggaccatggctctgggtgatctaccacctttctcgcggggccttctacctcgcgcggattcctcgtgttcaagtttcaaatccagaggtgacctccagtgttgatgcccagaagatgtttgatgaaatgccaagaaacaaggagctaaccacagcaagtgttgttcgcgtcaccgtgagccatgtgctctgtccagtgaccacagatgat

SEQ ID NO: 3103 - DNA, 736 bp, Oryza sativa
ccattaccctaatccctaaaattccctcccctacctcaatcaagcaattcagatccgtctatgggctaaatggttccctgaagtatcagcaaagttctgacaaacagactgtctgtagtggctccatccaccgttgcctcaacacaaactgcttttattccaggcaggttcatacttgaaggatgtgttattctacatgaggtgatgcatgaactaaggagaaataaacaaagaggcgtgattctgaaactagattttgagaaggcttatgacagagtgagatggggattcgtttatggggtgtttgacagtgattctgaaactagattttgagaaggcttgacagagtgagatggggattcgttatggggtgttggacagagcattttcatgaaaaatggattcactgggtgaaaagctgtatagaaggtggaaaagtctgtatcaacataaatgggtagagatctaatttttttcagcacttacagaggcctcaggcaggaggatcctatctctccgctgctcttcaattatgtgagtgatgcgttgatccagctatttgatgcagccaaaagcgccaatatcctaacagggctggtcccacacctcttccctgggggattgactcacctacaaatgcagatgatacagtgatttttatcccataccttgctgtgaccaagttccttctttactgctttgaggacatgtctggtctaaagattaactatgataa

SEQ ID NO: 3104 - DNA, 585 bp, Oryza sativa
acagtagcccatcatatcgctggaaaaaaaatgcaatgtttgatgaggtgtgtgcgagagtggtaatgaagttgtggatttgtggttgccgccgattgttgcaggaggtgaacgagatgtgggcggggctcgggtattaccggagggctcgatttctgctcgaggtgagtagcgagttgattgatcacgaattcatggtcgaaacgacggggattgggatgaggttcacttgttcagtgcgttctgtggagcgcccatgaaccgtttgatgttttgtccaaaggagagattttatttggaacccgttttgtgtctgacagaggaggggattattgctactagttcgtgatgtctgctgcattgttttcgctggcaatctcatgtgaagttatcagttcatctggtgaagatttggctagtttgggtggaagaactgacaagaacattagcagaaatgttttttccttgaaagatgaaatgaatgaataagtgcctatgcatctatgtgcatggtgctgagcaactaatagaaatgttgctacggagcaaagcattattctgggcatgcatttttggttcaatttc

SEQ ID NO: 3105 - DNA, 759 bp, Oryza sativa
acagtagttatgcatggtcttttgaagtcttaagacaacaggtatttcacaaattttaagaaaaaacatgataaaaaatagataattttgtatgggtgctagtcgtgcaattgcgcgggccacccggctagcaaataaaataaattctaaacatagaaaaaataattataagagttaaatagaaatatgatttataagtaaaagaatatcagaatgaaaaatatggaattttaaaaaaaaagttcatctagaacacagcgataacatataacaataaagaggggagaaacaacaagcctatgaaggaatagagtgttggcggctgatgggacatctaagaactattaacaaaaccccgaatagtatcccaatgatgattaaaagaagggacgttagacagactgttaaacagcacgatcacggcggttggcgggacttctaaaaagtaaaaaagtaaacccaatgataaccatgttcgatttttaaaatctccatgacaacaaagagtgaagcagcgggcgagccatagaggagtacaacggtgacggagcgtggggctcctcaccaggagaccgcgcaggcccccctttgccggttcggccggggacgctaagtgaagttctaagctctcaatctgtggaatgttcgctaaagtggaaacgcgcaagacacgggcgatgtatacaggttcgggccgcttagaagcgtaataccctactcctgtgttctggtggatctgtgtatgaaggagctacaacg

SEQ ID NO: 3106 - DNA, 590 bp, Oryza sativa
atcaatttcaggggaatctacgaactataccagctggacgccctcgacgtttctattatgagttgctggattttgtaagtatatcgttcagttagatttcttactatacgtctcctttaattaattaggtccttgtatataagtagactatagaaaataatatactcccttttatcgttgtagaatggagattcaaagggcccgacggcggagggttttcaatactggattcatcgaccctcggaaagtaaacgtcgcaatgctcgaccaatatccacaagaaacagaggacaatctcgtccatctcctgaaggcgcagcattacaagacgttcatactgttgccatacaacacagagttagtttaattttactgtcttcctacataccaaatttcattcccgtacgaacttgctaagtgttttatatgtaatgcatcccacgcacattgcagattccactgggtgcttttactcttcgacctggaggcctgcaccgtcaacgtatatgactcaatggataaaaaaagagctacggttgacaatgttcgaacttatagacaggtccggcataagttcttttgttatttag

SEQ ID NO: 3107 - DNA, 695 bp, Oryza sativa
tgtaccgcctgcgccatataataatggcatggcatgtgtctcgtagatgcgtctcaccgtctcctccagggtaatccagctcgaggtcctcgtacgcgccttcgaccaactcaacttcgaccttcgagtatcctgctggaatcggcctgcagtggtaagtacctgaagggtccgttgggatggccatgcccgacgccaccttcatgttgtgagagattatttattagtaatcaacatatataagcagcaactagcggaatggctaaatcttacctttattgataagttcttgaagggaatatgcagctcacatggtgtccgttgcatgatgtcatcaacagggcaggtggtttcgtcctgggtttgcatggcgtccatgcactgtgatcctacctgccccgttgaggcgcagctgctacgattgcctgatgggctgaccattggaggaggtatgtgcagctggggatcatgtgactgatgtgctgccatgcgttcatccaccttccgtgccacctcctcttgcatgttgagctcgtagctcgataccctatactcaagatatgcaatcttcgcctcggtatctctcttgcttctcatccgactcctgtacgtgtggatgtcctccttgaaaccaatcttccaaggaatcacccctttccctcgtgttcgtcctgaatgctcgggagtctgtaggg

SEQ ID NO: 3108 - DNA, 3646 bp, Oryza sativa
tgcatggtttatatatatatatatatatatatatatatatatatatatatatatatatataaaccatgcatatatatgtttcaacacatatatatgtatatatatatatatattatattatattatattatatgtatatacatgcataatatatatgtatttatacatatatatgttatgcaaatgcatatgtatatagatatatatatatatatgaccaaaatatatttacattatagaaaatgtgtacacatgcatatagaaacatatgtagtcatgtattaattacaatccattatatgtcctagctagctacgatttcgacgtagtagtactcgctgctagctcagaagctaaggaccggtgaattgtgtttccgtcgtagtagaattcacccttgggatcaaggatttcttcgttgatgaatcccatgagttgttcttgaaccgccgcgataaattccttgtgtgtggtcaggttatccctcatgcgaataaactatatgaatgtatgaaattgattagtaattaaacaagaaatcgctacgtaatgaaattttgaatttatttgtacgtacatcgagctctcttgtggtgatgatttggtctgcaaggtagtggcaatactcgcacacgtaatagccgcaaaagttagttccctgcttttgctttgcgcactacaaataaatgacaaacaacgagagatctaattaatatacacttgtatgtatttgaatcggagaaatataaatgtagagcatgtgtattcacaggaaatttgaacttccgcctaagtctttctctccatttgccgcggaccaaatgacggaaccgataccaagccctacatggagtttaaagctatgattcgtagtagcaattaacataacaagattttcttaattaacaaaggaacttatgacggtacctgtctataagttcgaaaacattgtcaaacgtagactcttttttatccattgagtcatatacgttgacggtgcaggcctccaggtcgaagagtaaaagcacccagtggaatctgcaatgtgcgtgggatgcattacatatgaaacacttagcaagttcgtacgggaatgaaatttggtatgtaggaagacagtaaaattaaactaactctgtgttgtatggcaacagtatgaacgtcttgtaatgctgcgccttcaggagatggacgagattgtcctctgtttcttgtggatattggtcgagcattgcgacgtttactttccgagggtcgatgaatccagtattgaaaaccctccgccgtcgggccctttgaatctccattctacaacgataaaagggagtatattattttctatagtctacttatatacaaggacctaattaattaaaggagacgtatagtaagaaatctaactgaacgatatacttacaaaatccagcaactcataatagagacgtcgagggcgtccagctggtatagttcgtagattcccctgaaattgatccagagaatgtcatctccttgcaagaagtccgtgtccctgatcctcgctccgatcatctctctaccggtggcgctcatctccatgtacagctgatggaacttgtacatttgtgtgggtagggactgcagcagctcaggcttgacaagcggtttaccgagttcatacatgtatttcacttccgccttttcgattggtgcgactcctagcaattgatccgtagttagaccggtgtcagtaataaattgttctatcgtcatttctttaccggtcaccaacggctcgatctcctggtttggttgctctccaagctgagggactggtttggactttctagaagatgctttcttcagcgttcgctcatagtccgatagcttgatggcctccttgacagatgcagacatacccctgaagaagttcctgacactggggtctataggaatcttcttttctagacttcgaggcttgaattgtctcttgacttctgatgcaacgtaagcgtcaagctcctcttgcgtgcaatcgtaccccgggtccttgttcttggcggcgtcaactttcgccttcttcgttgcccttgtgtgggcaggcggtggagctgggggggcccttgactttgaaggtgccggaagaggagcttgcgggggagtaggtgtaggagcacgaggaggagtcggtgcaggatcctgaggaggagtcgatgctggagcttgaggtggagacggtgctggcggagcatgaggaggagacggtgcaggatcctgaggaggagatggcggagccggaggagatggtgcacgagacgccgtttgtcgcctagggaggatgatgtaccgcctgcgccatagaataatggcatggcatgtgtctcgtagatgcgtctcaccgtctcctccagggtaatccagctcgaggtcctcgtacgcgccttcgaccaactcaacttcgaccttcgagtatcctgctggaatcggcctgcagtggtaagtacctgaagggtccgttgggatggccatgcccgacgccaccttcatgttgtgagagattatttattagtaatcaacatatataagcagcaactagcggaatggctaaatcttacctttattgataagttcttgaaaggaatatgcagctcacatggtgtccgccgagtgatgtcatcaacgggacaggtcgattcgtcctgtgtttgcatggcgtccatgctctgtgatcctacctgccccgttgaggcgcagctgctacggtttcctgacgggctcaccattgcaggaggaatggtcggctggggatcatgggaccgatgtgcggccatgcgttcatcaaccttccttgtcacctcctcttgcatgttgagttcgtagctcgatacccggaactctaggtctgcaatcttcgcctcggtatctctcttgctcctcatccgactcctgtacgtgtcgatgtcctccttgaaaccaatcttccaaggaatcacccctttccctcgtgttcgtcctggatgctctggagtctgcagggcgagtgtcagctcgtccctatctctgtctggtcggaacgtgccctgagaggaggcttccactgcatctgttagtcgtcgcgcagcctctcgtatctgatcgccgaagaccagtgagccatcagctgggttgagcgttccaccgtgagcatagtaccagaacttcgatcgttccggccaattggctgttgccggttcgatacccctctcaatcaagctagcctccatctgctcccacttcggcatcgcgacgctatagcctcctgaccccaagtggtgatggtacttcttcttggcggcattttctttgtttctttccatcatcgcctgcccttgttcacctgtcttatatgcaacgaactcgtcccagtgatcccttagctttgggaatgtgtcaaagttcggtgtctgccccttcagtatatacttctggtacagatctcccttgaagctctgaaactgttctgccattttcttcagagtccaccttttcactttgtcctctgtacccgcaggaagggtgaatgtctcgagcattgtggtccacagcatctctttctctgaatctgggacaaaactctcatgatctccgcgtgcccttgttcttcggcattacaccgtactgacaggcacgt

SEQ ID NO: 3109 - DNA, 9533 bp, Oryza sativa
gggggggggtgtggacttggactcagcaacaggagcgggagcgcgcggctgggaacgggaaagcgtgtttagcctccgcaccgagtagactttcttttttgtttacccggtaacagcgcatgtagctcaacagtgtttcttacctgatgggtgttgttgtcacgttgcgtcctgtgtgtctgtacgtgatctcaagatagcctctgcctacctatagaaacgaaaaacatccgcttgtcaagcattgaaattaatagtcacctctagttgttttatatgtgcaacgtattatctctatcacacttgctccagtacattatcataaatttattttattgttcactcttacggcaggtacaatagaagactataagccagctataaacacatttcaaaaagataaaagggaagagagaagagcagcgagctacatatttatagtcagctgcaatatgaactccaagatacatgtgtgtatgatagatgtaatcagatattaattatgtagtatatgtttatatgtaactattgtatgaattgcctattaaattaactatggatgatttggagctaatagttagctatactattaaacttgctcttaatctattagggcccctttgatttgcatgaaaaacataagaattttgaaagatttcattcctatagaaaaaattcctgtcaaaacctatgaaataaaagatagaatcataccatatcctttgaaaatcatatgaaatggacaaactttggaggaaacttagcaagaactccaacctcttgaaatttttcttccagcctatctctttcatctaattccaacgattttcttacgatcctatcaaatggtcatccttatatttttttatgtgttttgtaatcctttgttttgtacttgcgttccattcagaatcatgtgtttttcctattcctctatttttccattcatgtgatttaaaggggcctagtttatttttcatctcttttagagcttatgcaaaggttgtctcttacacaatggttttagtgtaattttttagttccatcttatatattataaaatgtttttgtcagggttatggataccacataactaatagtagttgactaaatctcggcaggacccaccacataccatgttttatacggaaacaatcttcgggtatagaaggagttccggataaggaaagataaatagagttctgcatggaaacgacaagtactactcggattgtatccatattgatttcactagttctacttggacaaggggacacctataggtataaatacaaagccccctaggaggagaggggacacggaacaatagatcaagacacaagatcaacatacaagccaatatacgccaagacaagccgccggatatcgacatcggagataagcctagttagtccccatacggttcctatgactaccgtcaggagggatctagcgctgtctctgatctcgtcggacacggattcgaggaggaagactactctgttgtcgactacgggatggttttatggccgccaagttgatgacagatagataggctaccccaaatattgtactggtatgattatgatgaataagagcaacgaccggcttcggccaataggattagggttattacctgacaattcaggggcccgaacctgtataaaaatcctcgtccccatctcttttactacaatctcatatattctagtaccaacgatctccatactatgcaaataccagaatcgcgacatcaaacgtcgacagttttgctttcttcaagtaagtttaatcaagtttataaaaaaatctagcaatatctacaatatcatattagttttattagatctaacaatgaatatattttcatagtatgtttatttcgtatttcaaatgttgctatgctttttaaaacttagtctaatttaaaaagtttgacttgaaaaaaaaattgaaagagtcttgtagtatgaaatcaagggagtattgtttaacatgttgcctctcggtagcctctcacgctcaatccagttttttccgttccgtgtaacaggcgaaaacaatgacaagttttcgccctcgtcatatccctctcctaccagcgcaacgaagaggatgtcacacaaaggaaggtggcggcgacgtggatctagtgaggatgttgatatgcgaggacgagatggtgacagaaggcgagcgtagggcgggatggcatggtgacaaggcgaggtggggagctgtcgcggacatgacttcctttttgcgcgggagggctgcgctatagagaggttgtttgcactagtcaccattacgggcttccttgtcgatagccggatgcgcaacggcaggaggctacgacttaggggcgcaattagtggcataggtcgtgcgatccatccctggccacaacaccctcaggcatgtctccttgcttggcctttggtggcttttgttgtcagctgcaagtccgttgctaattgtcgtttgcttgacccgaccgtagtggccatgagcacccaaagactaacatcggtgacgcctttgggcatcaaacacttccctaaaggtgatgatgtctcagcgccccttctgtcatacatgccatgagtggaatcttgtgacatcctagcccaaataggatttagcatgtgtcagccatgagagctgtgtgcgcatgtttagtaccaccttactaatttagtaagggtcggtgtgcgggcatatggtgcatgtgggctctatgtgaggtatatggcatcggcactggacgtacggacttgcattaaggccctgtttctttcagcttgggattattataatctagattattaagtcagattactataagctagattgttataatctgcagtagaatagattgttataagcggttagttgttcccttcctagattattagagcatagattattgggtttgtaagtctaaaaagggagtggggtggcatggtgggtaatttttcatccaataatctggaaaaagctcacctaaatgagcttatcatattataataagctgggctccagattataataagctacttcaataagttatctgtttctttcagcttactcccaataatctggattataataatcccaagctgaaagaaacagggcctaagaagggacatgttactggacatttgcttgtatagttgtatgcttgtgtagctataaaggttcacgaaacgaggacgaaagtgtaagtggaaaggtgtgtaagtggacccgcctatcggatgggatgtctatgcggttttggagggaaagttgtttgcaactctttgagtgaaaacctagcgatgatggtatttaagatgtcgcaagcttcctaaagacattatgttagatgttccttgatggtactgcggtttccctattagattgggttcatttggtggtggtaagatctagactaatgattgatttacaactcagataatctttgatgtttgatgccattcaccagcattgatgggagctgaattcaatgaacaaataattgaccactagttttggaaaatttgtttttctagtttaagaaagataaagtctatgtacaacttgtaagttgtttggtcgtggtaagatctagactaatgattgatttacaacttagataatctttgatatttgatgtcattcgccagcagtgattggaggtgaattcatcgacaaataattgaccactagttttggaaattttgtttttctggtttaagaaagataaggactacgtacaacttgtaagttatttggtggtggtaagctctagactaatgattgatttacaactcggataatcattgatgttcttccacttatgtttgatgccattcaccaacagtgatgggagctgaattcatcgacaaataattgatcactagttttggaaattacgtttttatggtttaagaaagataaggattgcgtacaacttgtaagctgttgctagaaacaactgttacgcacactatgatcaacaatggatagagttctctaaatactttagggtggacttcttagtggtcatcttgtttttaattaagctgtaattttgtaatttgtagtcatttatcatgttgtcgaggagtgatcctctctagcgggaggacgtgaggcccccctttgtgagttcggccaggggatagggcgcgatgatcaagagcgcatcttcgccgtggatttggctagtgtggtggatggcgatcaagagatagaccagggattatttaggttcgggccgctgggaagcgtaataccctactcctgtgtgtggattcatatttatgctattacaagagtgttaacagtgaaatttggtaatcggtaaagacgtcatcggctaagaatcattatcggctgcagcatctcggaatcagccgatgggagttatcaagtcgccaatagtcgaattcctgctatattcggttaagaaaatcaatctactaaaggaagcttatccctaagtgaccgagtttaaagaggatgcggcatgacagtttatctattaattatgaatagtttgttagtttccttttatctttaggaaagtgtgtttagtgtccgataaggactttatatttttcttttatctttaggttagtttctttcttgtccgacaaggacttgtatcaacacatgggtataaatatatacacccggggtctatgtaatctatcgctacgatcaatacaattcagcgcatcgccaccctttttacttctacttttgttttttacgttccggcggaacttggcacccaggcaattgtctcatctacatcggcgtcgttcaaggctgcatcagtacattcgacctcttggattgctctggtttggatgatatatttgcctacctatttattatatgtctctgttaatctagtcttagcatatcaatttagctctatcggctgtctctcgctttagggtttctgccggtatcggctaaatcgccttgctagattagattagcataggtatttaccaccctgaaaatcagtcatcggcttgattgtctagatattatgtttcttttcatacttagtgctgcatcagttaagtttgatctactaagtcgtgcttagaaccataatctctagcctgcttattgattgccaataagggtttcatcggggtttcagccggtgagttatctggacgttgcattggctcatgaggattgcatatacatataagttggatttagccgatgacaacaaaggtttcactgtttaatataatcttgtggatttcatgacatcggacctccatccgatgtgtgctttaaccttcggatcgatgcttatttatcatatcattgctagccgattggtttatattggattatattgttattttattacattatcatcagccgattgcctttatagcattatctacattggacatatagccgattgcttaaaccctatcgctatcggctggtatcgacatcggctattatcgactatcagctggaactactccataggcttgtcagccgattggctgttttgatctactatttgcatatcttgtcagttgcaggatcaaactgactggcacgcccgcatctcattatatttggacctgcactagagctaagcagatctcccaggccagtgtgttcgatttttcgtcaacaaagagatctcaaaccctagagaaacggttgcttgggcaacgcgcgacctgccatgccgctttaaatgcggcggaggtggttggggcgccacccataaatgcgcctggcagcgtcccttcctccgcctactcagctgcgacgtggcagccgagtgagggcctcgtggtgatgtagcccctcgggcccaaggggtgtgacaagacgccccgaggcccctatatagttacgggtgcctcttagctacttattacccgcgcgcccgacctcccatgaggggcccaggccgtgcggccacgtggctaggaggaaggaccctttcccctcagcgtgggtactccgggcccatatcaccgacacatgtgaactctataataattagttataacttgttttacttaagtaatggctggaataaattcgattatgaaaaatgaaatgaaacatgaatagtggagggttcctctgaccgttttaatgtttactgtttttatttagaatttcataaaaaaaacgatgtaatactgacatcccttaaaatataaaagaaatgctacgttttgtcggtgctgatgccacatcatcgttactaagtaatcaaaatagttacctcctactttgaatttgtaaaaaatattgtatatggtgtaaatatactgtaaatacgattgaattgctcgccattgtaatacgtatgttcgaggttttgttctaaatttctaatagttatgtttctgatattctctctattcccactctacagtcatatttaccattgtcatgcccgtgcattacaacgtgattaaaattatggagttcagtttttttttatcagtttttgggttgattttcacgtgaaaacacttttttaagtgatggtttattggttgttaatgtgggatgtacgatcgaatcataagaactaagccaaccagagaggggtgaatggttggtatacccaaaaaccgaaaacttttagcggaaaataaaagttaccctcgaattcgacggaagtcggtctgaccgagaatgatctgccgagattgatctgccggtctgactgaagcatagccgctggtctgaccggtgttgatcttccggttggaccgccctagaatccctgccgcgtctgatgtcgccgccggtttgaccgccgcttgccgccggtctgaccgccggtgagttgtaagttagaccgccgaaaaccggtgaaacacaaatcgaagaactcttaaagtagatgacgactttattgattctatctgtgtttacaaagtgcaccaacagcactatttgcaaaaatttcgactaaactcgaaaccctaactcaaaactcaactcaattgctctctaaagcgatacagggaagcctcatgctccccctctatttatacatgtggtaggcagcctaaagccacgaaccaaactcatactaagagtactaaacaccttaggaaaccctctagtacaagaaagaaactttacataaccaatcgtaccaaatttggactccttccaaattcgactccgcatcccatacgcacacaatacctccatcgtatgccatatggaatctccatcaaccacgtgcatcaactctagcctaagtatcccgcatgattatcccgcatgatctctgaccaccacggacgtcgtcttatccccaagtcgactcccggtccatcactgcaaatactctcccgagacatcgagtcacctacacatgaaataaacaaagaaactatatttcgagaccaagctatctccaacttgactcattagtagcaaacaatattattacattcgtatagtatccatctagaagccttaatcatgaaataatcacggatatccaaacaaacaacccgaaaccgaaaccgacacagcgtcggccggtcagaccgcgggctagccagtctgaccgagcaaaacacgcaggtctaaccggctaccagcgcccagtctgaccggtcacatgaaataacaaatcctgcgatcacctgtgaaatccaatcctgtccaaaaccgcttcgtgaataaattccaaatatcaaaatcaataatctccaatgcccaattgttcatcacagaataataatcaaaaacacctttgattttacaatctcccccttgatgaacacattggcaaacccatcaaaattgttttggtgtttggaaaaataaaaacaaaagtagtaaaaagcacacttcgtacaaacgtacacatcgtgctcaaaaatccaaaagaaaacttctaaaatccaaaagaaaatttcttcccctttttaaaagaaagaaattcccaattgaaccaaaaacatgctcttctcaacaactctccaaaaatccaaaaattttcacattacttcttccccttttgacaatgatttcatcaagcatatgaattacgttcattaatgttcaagtgcttagcatacatatagcatatcaagtcatgtgttgcaataaaaagaagatgaacctatctataatatacaagcatgtattaaagtataatcatgaaccaaagattttacaattaagcttgaatcaacaatcaaaattgatgatttcatatgatttataatggaacatcttaacaagcacataggttgaagaataaacactaaatacatatacctattgcatttatcactctttctcaaataacctttagcacaaaataaccaagagaatgtctttaactttttcttttcttgagcctttttgctcatatttttctcttttattccgggtacgtccctgtcgtcaagactgtttccagagattcggcacccattattttgctcacatcgaatacgtccttgtcgtcaagactatttacaaggattcggtattcatttttttcatattttttattctctttttcacaatgagcaattaaagctatttgaggaataacaagtcaataaagcatatatatagagcatttacaaatcaaaccgtatgctagcatcaacattgcatatttgcttaattcaagtagaatttaagtgtcatgcttcatctcccttaaaagcaaaatctaaatctcatgaaaagattagaataaatacaagctatgctagagacaaataaaccttcaaagtattgttagtatgcacaagaaaataccatatgcataaacaaagctctcttttctcaattttttcattgtcatattattgcttgataaaaccatgaggtacaaactccccctcaaaccatgccaaaaggatgaattatgcccaattcaccacgaagaaaagcaaagtgattagaatccaaaggtttagtgaaaatatcagcaatttgcaactttgtgtccaaaaactggaactcaacatctcccttctcaacatgatcccttagaaagtaaaaacgaatatcaatgtgcttcgtgcgtgagtgttgaacaagattcttatcaatgttaatagcactagtattatcacaaaagagaggtactttctcaaaagtaagaccataatctttcaaagtagataaaagtcaaagaatctgtgaacaacaactagcagcagcaacatattcagattcagcagttgattaaacaacactatattatttcctagaagaccatgcaatcaatgatgtaccaagaaaatgacatgttccactagtacttttcctatcaattctacaacccccaaaatcagcaccggaatatccacttaagcatatagaagatgaagtagaataccaaattccaaacttaagtgtatgattcaaatacctcattattcgcttgactgcttgacgatgtgaagcacgaggagaagcttgaaagcatgcacacaaacacacagcaaattgtatgtctggcctagaagcagttagatacaaca

SEQ ID NO: 3110 - DNA, 1739 bp, Oryza sativa
tgatgcaaaagttaagattattcggactgataatggaacagaatatatcaataatgaatttttgtcatatgtctcagatgaggggattattcaccagactacttgtcctggcacccctcctcaaaatggtgtaactgagagaaagaatcggcatttgctagaagtggcaagatctctgatgttccagatgaatgtaccaaagtatctatggagtgaggctgtgatgacagcagcatatcttatcaatcgcatgccttccataatacttggtatgaagtctcctgccgaactgttattgggtaagcgagagttcaaggttcctccaaaggtgtttggctgtgtttgttttgtgcgagatcaccgaccttctgttggcaagttagatcctcatgcaagaaagtgtgtgtttgttggctatgcttcgagtcagaaggggtataaatgttgggatcccattgggagaagactgtttgtgagtatggatgtgacatttcgtgagtttgagccctattataaaagtaaaggagatcttgaccaatttcttgaggaattctcgactgtcatggaggttgatagtcgagagggggagagagagagaggtgacatacatgaaaaaaatgttggtgacaagaatggagaggcagtagtgattggatcaataccatgctctattgatgatgcgagtaaagaagtagtggaagtcattgaagatacacaagatgaggatagagaaatggtccctcatgaagaggatggagaagaaggagaagtagttgttgggacaattccatgtcctatggagggagccgaaagggtgaaacaaaaggatgtgctagtttaccaaaggaggcggtttgatagtcagggggagaaaagaaaagggttggtgcaaagtcaaattgaagagttaccacaccaaaaatgtccagtccctgaatcctcccagagtctctctcctccagcctccttggcttctcttgagacaattggtaatacttctccaactcttgaacatgtagaattacctcttgcacaacgtagagagactagatccaatgctggtagacctcctatacgtcttggttttgagcatcttagttctatgcatgacattgcaaactatatcacatattctcatgtttcaccagcatacaaaacatttattgcatcattacagacagtgcctataccaaaggattggaagtgtgcaaagcaggatccaaagtggaaagatgcaatgaaagaagagttgaatgcccttgtgaagaataagacttgggagcttgtaaaacttccaccagaaaaaagggcagtgggatgtaagtgggtctttacagtgaagcaaacccctgaagggaaggtggatatgtataaagcaaggttagtcgcaaaaggctatagtcaaacatatggaattgactatgatgagacatttgcaccggtggcaaaaatgggtacagtgagagctttggtatcttgtgcggtgaactttgggtggccccttcatcagcttgatgtgaaaaatgcatttctccatggtgatttacatgaggaggtctacatggagatccctccaggatttgggaatagccagacagttggaaaagtatgtaaactcaagaaatccttgtatgggttgaagcagtctccacgtgcatggtttgataggttcaggcatgcagtgtgtgatatggggtattctcagtgtaatggagatcacactgtcttttacaaacata

SEQ ID NO: 3111 - DNA, 599 bp, Oryza sativa
attggggacagaggaagataagcaacctgaggccgcgtctccagatcgcaaacaagattatcttccaactggatgtagcacaaggaaacaggtccctgttgtcgcaagagctgcgattcagggctggactcaaagggcaggctctacctgacgcttgcctccctagaaaggataagcgtatggcaaagggcaagaataaagtttttaaagagggggatgcaaacacatatttcttccacatgaaagctaaggcgtgagtgtgtgacggcacaagttgattatcggcccttagcatgaatcatgatggtcacatggcaaggggatatattgattcggtgatgggggttgccgacaaggaaaacagagtgatggatcttcaagcactaggtttggtaacagcagatctgtctgacctagaaccgcaattcacagaagagggagtgtggagtgtaatcaaggaattatccagtaaaaaggcaccaaggccagacggtttcacaggtcttttctatatatcatgctgggccatgatcaaacgagaagtcaagctatacaatggcaacaaacacaggtgcatgaactactgtacatctgataag

SEQ ID NO: 3112 - DNA, 574 bp, Oryza sativa
gtcccagctcccggccactggattcgagcagctcaccgagctcacacaccttgacctctcggacaccaacatcgccggcaaggtgccggctggcattgggcgcctcgtgagcctggtctacctcgacctctccacgagcttcgtcatcgtgtcttacgatgacgaaaacagcatcacacagtacgctgtagactccattgggcagctctcagcaccaaacatggagaccttgctcacaaacctcactaacctggaggagctccatatgggaatggtggatatgtccaataatggcgaattgtggtgtgaccacatagccaagtacacacctaagcttcaagttcttagtttaccttactgctcactgtcaggtcccgtatgcgcatcatttgctgccatgcgatcgctcaccacgatcgagcttcattacaatttattgtcaggttcagtgccagagttcttggctggcttttccaacctcactgttcttcagctatccacaaacaagtttcaaggatggtttcctcccatcatcttccagcacaagaagttgagaacaattgatctttctaag

SEQ ID NO: 3113 - DNA, 600 bp, Oryza sativa
caacgccattcaccagtggaccagcagctatggagtcagaagagttcgtgtgaggaccaaagctgatgacatccatttcatctgcctgaaggtgacggagatctccgccgtcgtcgtcttcgtcgccgggaaggccatcgtcggcaatgtaaccgtcgccgtcgtcgtcttcttcttcttcttcttcaccggtctcgacgtctccctcaccgcctcgatcaccatcgcccacctgatcagacgtgacgccccgttccatttcggcctcggtggcaacattgctccggccaccgatgctccgacgaacgccatcaccatcagacgcgtcgccggcgaagacaatgaagcccttcctgcccagccggcgccgcgtcacctcaccgtccatggcagcgccgccgccctccacggccactgcacgttgccggttgcgtgtgagctggtacaccagccagacactgacggcgactagcaggacgacctggaggatgtgctttggcctaagaagcttctttgatctgtggcatctgctggatggctgcctcaacatagtgaatcagtctcagtttgtgtgtgtggtggtagacttgttagtgttca

SEQ ID NO: 3114 - DNA, 982 bp, Oryza sativa
ctcaggcacaagcacttgcatctacatatagacatcctatagattggatcatagactcaggagcatcaaagcatgtcacaggattgcataatactttcacatcatacaccccttatatccactctgaaactatccaaatcgctgatggtacatccaagcctattcatggtatagggtcggtagagtgcacatcatcaatgaacttgtcttctgttctgcatgttccttcctttccagttaaccttctctcagttagctcggctattgatcaactcaagtgcattgttgtatttgatgagaattcttgtctgttccaggagaagtggactgggaggaggattgggactggagtcaggcgtgatgggttgtggtacatcaatcatgaggaactgggactagctgcggtggttggagatgttgagaaggagatcagtttgcttcactgtcagttaggacatccatcttttgagattttgagtaagttgtatccagacctctttagtagagtggataagcatagattggtgtgtgatgcttgtgagcttggcaaacatactcgctctacatatgttggcattggtcttcgtaactgtgagctcttcatattaatacattctgatgtttggggaccatgcccagttacttctgtgagtggtttcaagtggtttgtcacctttattgattgtcacactcgtatgacttggatttatatgcttaaacacaaaagtgaggtccttcgttgcttccaagactttcataaattagtgacaactcagtttgatgcaaaagttaagattattcggactgataatggaacagaatatatcaataatgaatttgtgtcatatgtctcagatgaggggattattcaccagactacttgtcctggcacccctcctcaaaatggtgtagctgagagaaagaatcggcatttgctagaagtggcaagatctctgatgttccagatgaatgtaccaaagta

SEQ ID NO: 3115 - DNA, 586 bp, Oryza sativa
aacatgtcctgtctgtgtgatctgataattcaacatcatttttaacctgtcaggaaaggtacaaacggtggagtgacctacaaaggctttcttgttgccacagcaggtggcctaatcataggtctgacttttgtttttgttggactgttgactgtggagtgctcatttgacgtggctcttcgacagcttctagtaatacccatctctgctactgctggtttgcttggcagtctgattgattcagtgttgggtgccacactccagttcagtggatactgcagtgttcgaaaaaaggtaatgttttctgtgacatttaggtttgaatcatacttgaatcaaatgcatgtcagagccatgcttttccatacatcgtgagatcatgatttcattttagaggtacttccacttatagctcaaagatttgatccacaactttgtttctatgattgaggtataaaattacataggacttgtaaatttctgtgtgaaatttgtcttaatatgtcttatgtatccccattaaaaacaatttttcatattctacccttatagctctctatcatttgtgagccgttgtagtgaaatt

SEQ ID NO: 3116 - DNA, 595 bp, Oryza sativa
cgcggctggtatcggcatcggctattatcgctatcggctggaactactctatcggcttgtcagccgatcggctgttttgatatactatttgcatatcttgtcagttgcaagatcaaactgactggcacgctcgcatttcaccaagatttggacctgcactggagttaagcagatctcccaggccggtgtattcgattttttcgtcaacacctacccagattgtttgtcctgtatttgtaattgacacagttggctggattattgaaatatatgagtataatttatctagaaccataatatgttgatacgatatgcagcgatattaaaatgaatcgacatacctatatataactacaaattgattgatccaacaacgagctatatatctgttttagaggcaaccggaccagataaaggaaaagctaacgcatgcgtgggcacttcaaaggcaaaaattatagagtgatagcatataattaagtaattaaacatgctcaatcgccaacaaagtgatcgagctaacgttgcttaggacaacacgaaggctcgctagcaggagatgtcaacaagcgcttacagtggcccgtgtgataag

SEQ ID NO: 3117 - DNA, 688 bp, Oryza sativa
caagccaacatacgccaagataagccgccggatatcgacatcagggataagcacggctagtcccctacgatgtctccggatactgtcaggagagacatagcgttgtctctgatcttgccgggcacgaactcgaggaggaaggctaccctgttgtcgactacgagtcagacgttcagaccgtcatgtcgacaacagttagataggctaccccaaatattgtactggtgtgattatgatgaataagagcaacgaccggcttcggtcaacaggatgtagggttattacctgccaattaaggggtcctaacctgtataaaaatcatgtctccgtctcttttacctcactctcgtatatatcctagtaccaacgatctccatcctatacaaataccggaattgcaacatcaaacgtcgacatatacaatacaaaatttatacatacgtatataaagtatatacatacgtatatataatttttatgtgtaccaaaaattgacatataaaaagtatacatgtatacaatttttgcatacgtgtatacaaaccacctatatatataccgagagaaaataacacgaatacaaactttatatgcgtacaaatacaaaatttggtatatatacgaatataaactttgcatacgtacatcttaaaaaaagcagaaaaagaaggagaaaaaaagccgaaaa

SEQ ID NO: 3118 - DNA, 1373 bp, Oryza sativa
ccacgggttgtagaggtagttaacaggtggtgacagtattcgggtacatcatagagccatagccagagtctccttggcagaccaggggtaagccgatgcttgaagcaattgatagagttttatcttaacttgattaagataattaacccataggaatcctctctattcttggcctaccatatagttatttcccttggaagaatctcgttcttagattatacacatacgttgcctgtggatactatatcctggaatactcttggggtgaaggctacgactgtatttgtgcgcttgcggattattctgtcgtcgtaataaataataataggcggttgaactcgtgtaggtactctatagctatcttgtttccctaatgaagcgcatggaactccctcttattttgtgctacagtcccatcgggaacctatgccttcctgaagctacggcaaaattccgcccaagtgacatatgtcacagctgagcgggtgaccatgtagttgtcccaccaagcagaagcgggaccttgaagtttgtacgtggcaaagacaaccttctcctagtcgttccaccggaggaggttcatcttcttctcaatggcatgaagccagtcattggcttccattgggttgatggtgctggagaaagtgggtggcctgacatggagaaactaaagtagtttggactaatgtggtggtggtggaccaaactgctgattcagctgctgcagtgcctgatggtgcatcatctgctattgcatatattggtgttgtttttgcatctgctgcatatcattgtatgatatgcgtctaattggccaacacctgagcgattgttgaattctctagcggtggaggtggaccattgctagttgcaccactggtattggctcctccagtctattcctcactgctgctaccatcacctgttgcatggtcgccattccttgtgttcaccatctgaatggggatggacagaaaaagggggaaaggaaagaatatagactgctaaaaaacctaagctttattacattataatttagtgcaattgtctaatctgaattaaaacaactacaaagaaaacaattcaactcctaattaaggtagtcataccgcaaccactgttgacggtcgttgtcgatcagtttcgaccatcaatattaccaaattaagagagaactagtgatgcttgcaatgcatatgtttgttagaataataatattccactagtattaggtatattaatctttgtagagaatgacactaaagtggaggagaatcggcataacatagacgataaatcaatcggacaatgtcgagaaccagacttatgtatgaatgggaaaagaactcagaattgacacgatgaattaggcc

SEQ ID NO: 3119 - DNA, 806 bp, Oryza sativa
ttttggtgaaaaggatgttgagtgcactgccaccatcgatgagggatctgcgaagcttgacgttgcgaaccactaggtctagtaccagggggtaccgccccgggtagaccactcggtcaggatgatcggagcgtcaaactcattgttgtctccgaccaccaaagaaattggggcgtatcgggctgagcagcgttgatctctcattcggtcagcttttgcttactcttagattcataagccaggggtccgccaaagatgtggttgagttccttgtgatggtcttgaaaaccagtcggggcatcatcgtcatcgtcttcttcttcgacgtgctttgatctccgtcgaggcctacgtggttcttacgtgcgttcttggcgtattgttctgcaaactgtttgtagatgaaacaatcttttgccacatgattggaattgggatgatgcggacattgggagttcatgatcttgtcaaaagtgttgacacgcgaacgttgtcagaaggatggtgttgtagttgtcacaagttcctcgggcttacgcttgcgatccttgtgattggcacttccactcccttctgtagtcggcgtatctttctttggcttctaagtggtgcccgactgcttggacgcgataatggcatcttcggctttggcatactcgttggctttttcaaacatctgtttgaccgtcttgggaggcttgcgcccgaacttgccgactagatcttcgtgacgaattcccttggtgaaggcggcgatgataacgtcgtcggtaatgtcggagatcttgttgcgttgctcagaaaag

SEQ ID NO: 3120 - DNA, 1556 bp, Oryza sativa
taagttgggtgcgtgagtcatgctggccacatgagacgcacatgtaataaaccaactctagcacctccattggtgttcgaaagataattctacacgttcactggtcctcgaaccagtacgtagcaatctctcgcaccgcaacttccattggtgttcgagaaataattctacttgttcgctggtccccaaaccagtacgtagcaatctctcgcaccgcaacctccattggtgttcgagagatgattctacacgttcgctggtcctcaaaccagtacgtagcaatccctcgcaccgcaacctcagatggtcgaggtacgactacagcaataacgcagcggtcctcgcaccacgacttcaaatgatcgagagacacctactcactggttcttaaccattcaatcgtagtgatctctcgtacatttacttctagtcgttgagttacgactactacctggttcttgactagaggtgtagcgattctcccattacctctacttcaacaaagttgatatcaggtacacaatatcgccaagcgttttacccagagatcccttaccacaaaaacacctagcattgaaacctatcctaatgtccttttacaccgtcttgacaaggcctccgaggaacctaagggaacttcggctagggacgcccagagcggataaggccttgtcggatcctgtagagacaaaagaccatgtaagatctggtcgtgtaagagttctcaccgtgcgtattaaccaagccgtgtaatcggaaattgggttttccaacttcacggctgggggctaggataagtgcttattcaaccgatgcaggtcaaaggtctaagagccttatttcccgagaacgattctccgacgacaaggctgggggctagggagagtgtataactcaaacaaattgactgatcgaagttggtaaaagagtagacgctcatatacaaaacattggtatgtaaatttaattcatttttagttttccatacatattataacatgtcaccctttgagcgttcactcgggggctatttctatctaatattcttttctaagtattgatttcaggaaaactctattcgacatcgttgaagactccatgtctctatggttctacaccaagatcgacaaaggcgagtacgacaaatgttgacaaggctccgtcgcagactctacgcctactcgattactcaagaacggttggtggatctcgacaaggaatacggaatgaagagatggtgtacctgtcgagataaaatttcttgacttcaatccaaattctcgattacagcaagacgggtaacttagtcatatgctctgtactttcttggttgactttgatgattgactcagacaaaccctttaggtgcccacacgaggctgataaaggaagtttaacgttatctctgaactcaccgagaacggtcacgtgagctcgataacagttcctctaaggtttgcggttgagaatatgaactcgttcatttgcattgaagtcggggactactgtcagggttatggataccacatacctaatagtagttgactaaatctcgg

SEQ ID NO: 3121 - DNA, 5139 bp, Oryza sativa
  unsure (1)..(5139): unsure at all n locations
tttcatcaacacatatacaacaccaacattaaattaatttaataaaataaatctactattgtatagtattcatgtttcaggttaaaatgttaattattatggttttaatagaaacttgctcaaacatggagaaatttgacttagaaaaaccaaaacatcttcattttaaaatagtggttgtactatatgacaaccattatatctagacaatttacacccactaccaaaaaaattcatttttcctgggagccaaaaccggtcctggcatgcggttggccagcacgcatgcacgaaaatgtctgcaaaaatcactattttcgcatgcgctcacccttaatgcagcacatacaataatcgatctttgcatgcaactgggttaagtggcccgcatgcaaagatcggttttcgcatgcagacaagttatgccggccgcatgctccatgaggcccattcccaaactggccatttgggaagatcgtgtctcgtatgtaatacaacatttcccgcaatttcataatcgaaatttgaaattctacgcataggagctaaccaagttgtcattctaactacaatattgcattgacatgtaaatagtcttagaataaataacacaaaacatttatggacgtgtcatacatatattacaaataaacaacagtttcatcacgaacaaaaatattatattttcactatatatgttcttcctcccactctcctagtgggttgaatatgtcttttattgcgatttgactctccttttcgtagaatagcccaagtgcattgtacgcatcatgatgggtgaaacggcagtgctcagcgcacatgttccatataattgtgtcgtacaaccgatttgctacgtaagggattgacgggatctatggacaaagtggacaatatatgttacaaagttatttttgacagaataccctgtatggagtgcaatatccggacttacttcatcactgttagttgtgtacctcttattgactctaaccatctcgcacatgtgttatttacatacggaagtcttgggggttgcttaaaacactgtgaacataataataagagaccggtcaatactaacaagtcaggattctacgaaaaatggtgttaatatcatttgtcagtactgacaagcctgtcttggcgtgtagattattccttgtcggctcttttactggcccacctgttttgcggtaatacatatgtgtgttgctcgaacaaaacatttgttatagttacttagaaatttcataatagcaattatgcacatatggattattacattacttacaaaatcagaatactgaggaactccatgaacgtttccttgtcgtagtgtgttgggtccaatgctacgaacaaatggtcctttggatatactaggaatagtatatagtgatcgctgcaaacaagaaagatgaattagagacatcaattgttaaaaaggatgtattactgcggaaaaaaaatacttagatttacgagcggctgcttatgtaaaagcataagggactgttatgacatttttgtcggcatgcactaattaacatcgctagtgccaagtatgttcctcaaggcgctaagtattgcattagcggcttgagcattcctgtgctcgttctcgtcgtcctccttcgtgggatcctcgggtttctacaaaacatagcctttttcgactattctccaaatagatgggttaatagacttcaaatgcatcttcatcttatgtttccaagcgacatagcgcgtatcgttgaagtacggagctttgccgctataggtactcacataagaagtagatgtggatggatagtcataaggaaacgtatctcccttatcaccatctttgccatcccccgtttggcccgacatgatctctccaagcagttaaggctaattaggagattaggctctgataccagttgaaagggtcaattaggcctagagggggggtgaataggctaatttaaaactttatgcagaagctaaaactgaattagggtcggaaagtttgatccacagccagactatccgaaaataatagatagtctgatgttggatcagactgtctaatctactaaagagtcacaacaagaagatctagcacacaaacaagagtatagcgcaaacagcgactagatctatagcagcacaattaagcaaagctaaagagaggatgaagagagatcaccaacgatgaagttcatggagttgttcccggagttcaaatccttgaggggattctactctccgttgaggagctcactaagagccgggtctttgctaaccctttcctcaagaggttgcactaagcactcctccttctactaaggggtatctctgtccttgcggagatgagatccggccttcacaaacttctcccggccaaccacacgcagagcggtggctcgggagtgacacctagccgtctaggagtcctcaacctccaagagtaaaagacaccacacaactcttggtcaaaccctagtgctcaagatcgagtgaaacacacactaggccctcaaacaccaaatccacaaccacatggatccaccacacaaagaacgaggagggagaaagagctcaaagatccaaagcaccttagcaccaagctcaacccaaagtgaatgagaatgaatgagttgggtaaccctagaaaagggttaggtgaggggtatttatagattcccccaaaatgtggccgttgagagagaatcttttcatcccacctcggaaagtccaaggtgacatcagatagtccgatgttttgacccccaagcaagccacagatagagaacgaaattctggagaatttcgggcaatccgatcgatcggatagtccgatgtcatatcggatattccgttatttttgaagcaagaatttcatcctcttacagagactcaagttccattgaatttcggagtctctgggtcatcggatactctgatcacatcggataatctgatttcaaaatcactcaagaggaaaaaaacaattcaaaacagagagtgaagttctgagaaatttcagatagtccgatgtatcagacaatccgaccttatatcggatagtccgatattttttcgccaacactcagaccaaagacagagagcaaagttctatgaaatttcggatagtctgagcatcggatagtccgatcaggatcggatagtctcacaagaataaaacaagaacacttcaaacaaaggattttgagcactagtgttctaccaattatatgcatgtggtatccctcttaatagtacggcatcctaatactcaagaacacaagatatacatggattagaagacgattaccacaaaacatgctgcaatgcttttaaactcaagttccactcctttttatccttgcattcatctcaacaaaaagcattagtgaacctctaattgtgttgtcattaacaccaaaacaattgaggggtcctagatgcactttcagcagtgaagcttgaactgtagtcggagagggaggagtcggcgcttgagcaggagatgcgggtgatgacctcactagagttggggaaagtggactagtgttgacgcgaaaaacacacactagcctaggagatctgcttagctctagtgtaggtccaaaggttgatgagatgcgggcgtgccagtcagtttgatcctgcaactgacaagatatgtaaacaatagatcaaagagccgatcggctggcaagccgatggagtgattccgaccgatgtcgatacaagccgatagcaatagggtttttgaactatcggctataattctgatgtagaatccgacacttgaagcaaataacaatataaaggtaatcggctgatgatagtaaaatatagcaataatataatccaatagaaaccaatcggctaataatgatatgatagaataagcactgatctgaaagttaaagcatacatcggctggaggaccgatgtcattaaatccacaagattagataaacagtgaagcttttgttgcaatcggctaaatccaacttgtatgtaatccttgtaagccgatgcaatgtctagannnnnnnncctgtgcagcccgatngctctcgcccnnnnntgnnnnggggttcttcggacaaggtctataaaacacctcactacactcacttacgcacactgccaaccaaaaaaaggggtctctgacgcgtaaataataagagactctattgtactatattgtatactagaataggaagagagtagagtagaagaagttagaagaattccggagttgtcggtaatcttctctcatttctttaattctgtttattactctgatttcaatataatattctccctgagtaatttaaatttatcttgtgagaattatctcttgtttagttcctaaatagcatacaggattattgttcactataatcaactaaaatatagtgattgctttggtgagttgtaaacactaaagtagatattaattgcttagacgtggtgtttaggtaattattatacagtaattgctgtgtatcccacggtatgtttgaggtaggtgtagaggtggtgacagccctcgagatcacttaagtcctccctgtccgggtacgtagtagagcgacatctgggaacagcaggttaccagtgcccgaagtattgcattaggattaaacttaagctttccctagacattgtttctcactagtagatcctctctatccttgcctatcctttccttggtgtcnttaagtgagcagatgaaacatctgatcacacacgttcccttggattcgctaccctttcaaatactccgtaggggaagtgcacatcggtatatccatgcgcttcggatttctatctgtgctgtaaaataccacagtcacgcccaaagggggtttttttggatccctgcaactgacaaggtatgtaaacagcagataaaacagccgatcggctaacaagccgatggagtaattccagccgatagccgacattagccgatgccgattctagccgatgtcgatagggttttgagcaatcggctatatgtccaacatagataatgatacaaagacaatcgactgatgataataagatataataataatataatccaatagaaaccagtcggctaataataatatgataggataagta

SEQ ID NO: 3122 - DNA, 1445 bp, Oryza sativa
cagtggcggcggcgagaattggagttatagctaggcgatggcgaggtcttgtagtaaacgatcgtcgggttcgtcacatcccaccaatcgtgctcccaattccgctgtgagttgggcaattcgattatcagccagcggtgatgtgccggtgtggtgcaaaagcggcgcagtggatctcctggagcatggacaacccaggccggtggtactacagatgcaacaatcagttgagtgtttgcgatttgttttgattgttttttttttgttggacctagcacattggttgggtgattttgtatgtcaagttttcagggcgccggttgcaatctttttgggtggtatgacccccaacaagcagctttttgagggagttgttgaatgatcttcctgaagccgtgttgtcgctaagaagggagaaggctgagttagagcgtgctgttgaagaactgaggccaaaggaagaagagcagtgcacagagctgagtgcagcaataaatcaagtggcaaatttgaggcttgtggcatcggagaatgatgcaaaaatggctgctatgagggcaattaacagtaggatagagaaacagagatttgtgcttgtaatgttattgctggcatgtgtgtttgtgatgttggttgtgttactagttcagacgtgaggtgcaatatgttttttttaattacatagtacaacgcagacactcacccctgtgaacgcatgcacgcaaaccctacccctatgagcatcttcaaagactgggccggcaaatccttgagattgacgaaatcactacaagcgcctcactgtcgacagtacatcgcccaccactgaagcacaatgccgttaaatcctagaacattcgctctcatggggaatcgaacccaggacctaaggtgctattgaggctcttgtaaccactaggctatagtccctttcgcatgaggtgcactatgttagcaccaattaggtcacaatggtggttgttctagtcctattgctgccatttgtgttaggtgttagttaataacttgatgtgtacaacaactgagctgtaatattctgaattatcaatgaatacatctaagatgcaatatggttgtctggaatttgagtgaatgcagctatggctgtctgaaatttcagtaattccagtgaatttcgatgaagatagctcacattgcacattgcacaatattttcatattacaaacatgatatagctcacaaacataagataccaaatagaacattttgaaatttcagcttagatcaggtcaacatatcagatcatacaaattcacaaacataatatcagctcagatcatcacaatgcacataacttcaacatttttacatgccatctcagatcagatcagtacaagccacataatttcagcaaattgaaacatagctcaaatcaaattatcaaatgtcactcagttcaaatg

SEQ ID NO: 3123 - DNA, 577 bp, Oryza sativa
gacaacgagacgggggaacagcgcaaagcccgagaagcagaagagctacgcgtacaacaggaagccgaacgacgccgactggaagaggagcgccaagcacaagagcgagaacggcggcagcgtgagcaacaggaacgcgaacgggctgcaaaggaggctgaggaccgacgacaacgggccttggacgccgggcgacgagcacgagaacttatcgtgcagcaagacgtcgagggaactgcggtctttcgcacccctcaatagaacgcggttgcagcgatcaccctcctcgacaccctcctcaaggaagacgcactcaaccaagctaatcacgtcgtcaacatcttgaccctgaccaagaccatgatcgttgcctcggtcccggttaactccgcaagcgtccgcacgccgactggcagccgagttccccatcttcgatctcaagactatcaccagccgagccttcagcatcgccggcgcaggatccaatcgcaggagcaggggtcacgacgggcgatctgtccactcgccttccgaacgacacagggagcaccgagttggacgggcacgcttcccacct

SEQ ID NO: 3124 - DNA, 1224 bp, Oryza sativa
catttttcagttgaggtagatgtgagaggcgacgtcttggatgagctagttgaagccctaaagcagcctggtttgagcacctgcaaacaaaaccacacctccagctgtcaatcaatcagcttccaaatttgccaaaattactataagaaaatcttgcaatggtcaagcacgtttaatacacgtctaataaaaccattttctatatacagacttagaacatattgtttttctcaattttatcaaaattatctaattgaatgttgtgatttgtcagatacacattaaaacaaaaccctgctgaaattatctgaacttcgcataccacctgctgaatcactgtaaaacaaaaacatttttttctctgaaccttgatgttcatcgccaaagttgggttaggcagtatccaacacatgggcctaaattgtccctttaggcaatatacatacatatgaggtagtgtaagagatacattacagaagaaatttggagagcagcaacatttacagtgctctcctgtctaaacaaatcgttccttgcttcaattatctttggacatgtggtctatatatactctgtacatttcaataatcttgagacatgttgtctatactcagtccattacaatgctctccagtccaaacaggtgaaatggattgaagccataactcctactacgagtatatgaaataagagtattaacaatgtatatatttcttaccaacaatattgtagatatgcagtgatccttgtggcagtgcaattcaaatatggtatctaaaatatgggtaattatcataacaggataaacaagctacaaaggatttatgccacatgtaaatttacttaattaacttgcaatgtcaactggctgaaataataatttttcgagatgattacagcactttaaaagcaatagcttcaaaggctaacaacaaaaacactatagctgataaaaaaggtacggtaaattatatttcttgccttcaatagtagaaaagaaatagaactgcattgacaaatgaaagatgtccagaaatctcaaaacttttttacatatctagctatcaaagtcacatatatgcccattccagtcaaatatatgattaaattaagaaatgcacaaattggaatacccagaaactgcatcacattagtttgagctaccatgtaataataatctactgccacatgggaatatgatattggggtaccgagctcgaattc

SEQ ID NO: 3125 - DNA, 5199 bp, Oryza sativa
agatccgcgttgacgacggcgggccgtggccttgcggcggtggcgcggacgacggcgggccgcggcggacgacggcgcggcgcggacgtgcagcgccggcggatgatggctaggcggcggccatgatttcttgaatgtttttatttgctttcttctagaattgattcggtgattttggatgaaccgtggatgaattgattcggtgatttttggatgaactggatgaattgattggattggatggggaatgggtgggaactggattgggaacgggaagctaccgtcggaaacggcggtggctgcccattttttttagctctcgaagctattttcgcaggcagacctgttgcgcgcctgtgaaaatcaactattttcgcaggcgttgaggtgcaggcggatggcttgtccgcctgcgaaaatatgattcggccgactgggaaaagaatttttctagcagtgtctctccctctacaaataatgatctgtaagtctgtagtgcctcagtcaacttagaaactctagcttttccattctttaatatttaactagttttgattgtacaaacaacagttttaggtacactttcatatattctctgacttgccttgttaatttaattatacacggaactagaataagaataaccgaccatgcatgcatatatatatatatgcacaaaaaagttttccatgcgtccaaaaatgaacatatatccaaactgaattattacctatatatatatgtatgggctttcagctttctcgtgcatatatgtgctagctaggcatatgtatgcatgtgtttttcatggcacatgcgtgcgtcgcaaacaagcaaactaataacccgcagtttacacatgtaatgtaattaaaaaaaatatacacagcgcatatgcgtgcgtcgcaaacaagcaaactattaagctgcagtttatccacgtgtaactaaaagaaaaaaaaatcaaagcatgggatcgaatcacaccgtactagaaatatcagacatgaaaatatgcacgcagttcatgctagttctcaaccgatatatttataggggtaaacgaaatttgatgaaatatatttattttgaatgacttaagtattgtggatactgataagcattttcatatctttgatttagaaattttagattatatagatttgtgaatttcgttatagtatcttgccagatactaataatagggcatcatatttttgtacaccacactagtcacatcgtattttatatcaactcctgaattgggcaggatatttaaaattgttaactatattagggtatatcacctttataggatatgattagatgctttttggctatagctagaaaattgccttattctattcgtcgtatttagagcaccatatatcacgtaatttaaacggcaacatatcctatgcacacaggccctcacgtgtacacacgtgcacaccaactaaaaaatatcacaaaaaaatctagaaaaaatcatacacatactttcaattgtattacacctagggttaaaatcttaacatcaaattcattatattttagccgtaacaaaaaaaacaaaaaatctaacagttttaaggttgcaattttgtcagaattttatcttttttgttattctctatgtagaatgaatttgaagatgcgactttgcacgtagatgtaatactattgaaagtacatgtatgaattttcctagaattttttgtgataatttttagttggtgtacatggtgtgtacacgcgagggcctgtgtgtataggatacgctcccaacttaaacagctataaacttgggctccttgcctttagaacatatggattttaaataaattagatttgttcccataaaatttctgcaaattcatctattccaaagaggccttagggtgtattctacactcctattcccaagtcccaactctactccctcattttccatgcgcacgctttctgaaccgttaagggctcgttcggttcacaagatttttaaaacgtagaaataggaaaaacgtaggaatactataggaaatacatgtgtaaacctatggattgaaaaacacaagaatttttcctatgttgttgagcaagccaaccaaagaaatgcaaacattagattggagtggattattttttcctatgcttttccttcaaaaatgaaggaatagaaaactttcctatagttttcctatgttgcattcatatgaaatgaatggtagtttaaaacctatttctattcctatgtttttcctttgcaattcctttgaaacgaataagccctaaacggtatgtatttttttcaaaaaatttctataggaaatttgatttaaaatatcatatttatccattttccaagtttttagctaatatttaattaatcatgccctaatacattgttccattttgtatgccggggaaagagttcccaaccctcagcgcccaacagagcccaatgtttctctgtctccattgttgatttatgaaaggcatgatagtatcactacttagtgtatattgtgttgttaatatttatatacaatatgtttgctcgcatttataagataatggacataggaaaaacactttcaaatataaatacagtgatagtactttggttaaacagaacagatatacctttggaatagagaaatatatacacgtactaactagtcgactgtctgtcaggggtggacacacccactgggtagggtgggtcaactagcccagctacaaagggccggagctagaacgaaatagaggagggtatcacttgtttaatttactctactttaaattgagtttaaactgatgtaggtgtcaatgtttatattaaagagggtgcatacatggtgaaaatagatgagatatagctaaagtagggatacaaatatttatggaaattcatgaccaaataaatgagcattatttctatacaagtggtaccatttttgtcgttctgattttggccaaacataaaatttgatttttttttctctttctttagaactatattacagtctactaaatagttaatttggtaaatatatatataaaagtttattttactccccaaaactattttggcggagcacttaaccccctaaatactttttttggggggtttatttcacactcccaaactattcaaggtggatcaccttactctgtaacaatatttcttaatttctttaatctctctatgcaaatcgtatttgcactgaaattatgtaggattggtatatccattataacctacctcttgaaatcttattaagaaatttttatcactgtttacataggttggaagaactaattgtgaaaatattttgaaactttgataatggtgttatttatgagaaatgttgttaagcagtaaagtgaaccattattaatagtttaagggtaaaatgagaaaaaaaatacttaaggagttaaatgatccaatgaaatagtctgaaatagtcttggggagtaaaatagacttttcaaaatatgaatgttttgtaaatcatttctaaattaataatttttgggttcgaccattttcatccctaattctcaatatgaggcttccattgccatctcatcttcatgactacgctcattgcctcacctatctgacgcagacgtttgttcgactgttaatctttgttaacttgcttgatgttcgtgagatgcgcctccgtgccagtgccataagctggcgattatggcttgtgtgcgatgtgccatcatccaattagggctagcgccttgctagatatcgccccatctatatattttaaagctgtgtctgccactgctgcctgtagaatataaatattcaatgaatcaacagtaatcatctcttcgagagggatctcgttcttctttctatataggcttaatatttcgagagagctgttctaaaatttttattcatagcttgtagtataacttaactattctttgcagatataattaataaatttaaactgtgggggacttccaagcagtattttggtaaaaaaaaatcagcagtaataataactgccagttcacttgtgtgctaagtttacttatacaccggtagtgacgtagggtttatagattcttggttctaaagtaatgcaaacgtaatttgaacaacttatattgactttgaaaagttggaaacatgtctttgacagaaggtagtaacattataatctatttttatctccctccaatcctcaagaggacaaaaatccttgtcaattattagggattggcagcatatattgtccaccaaacccatctaggttgccaagtctcccagcgacagagatgtcgtaaaacacatgtggtatagtataatatttgatgctcctgggacaatgagccccgcaaattataccggtgactttatgtgattcccatgcatgactccctatcctttaatttgcacactttgttagaaagggccttgagagatggatgtgaagctgtaatgcaaaaaaaggcgaagaggatcgatggatgtggaggtgctggtgtactgtcagaatgttgtaatgcaaaagaaaagccatatatgtacaaaaatgagtatgcaaggaaggttttatgtgggggttgtatattctctttactcacaatcatgcagccaaggtccatggccaaggccagcccagccatccatccatccattgtggtttagatgccccttccatcttgcaatgtccacacaatccgctggctagtgtacatgtaagatacacgcatgcacacatttgaacgtgcttcatcggtcgatatctaagtttgtgttactatggattcatatcctttgccactataatcagataaaaatatcataatagtctataacaaaacctccggttaactaaaattgtactatatatatcatccaccctcattgattaatcgtaaggtgcagatataattgtgcggacttgtgaatttttcctacatagacagagcacacggtagctagataaccgtcaacatcatcaaatgccagtggaacaatgcacatgcttgctctactatagcaagccagagagctcggatagatggctgtctagggtcgccgggttctcaatccaccactgatgatattatatatatgctaatataatatgaatgtaaggttctctatataagtccggagaacttgggccgttgagttgtcgatcacatgacggt

SEQ ID NO: 3126 - DNA, 587 bp, Oryza sativa
cttggatgcatattcatttcctgtgttcttatccttttctgtattgattggtgggctactcagagtgcgttgagcatcactgaacccagctgatgggctggctgctatgggctggccaatggaagtatcctgagatgcaaccggcgatagagccatgcaaggcatcagagaagatgtctgggatccagatggagattgcaagagagcaagggaatgactctgagcacccttaacaactctgttcacttgaaaagcaacaatgccgctagagaccgtgttctctgtgaaactcacattccacacaaattctttctcaagcagatcagtgatctctctggatatgcagcccttgccagttggattttccagcatcagtgcctcaactgaacgaccaatcagcctctgcgctaaatgcccaaagataataaatgtagtatctcctgtgtcatctcctgctatcacactgagtttgaacctacagaatgtaatgtagcattagctgtaatgtatcggtgtctgtattgcttcaattgctttatcacgactcacctaggtgaagctgagccagttggggggcatgtgctgtt

SEQ ID NO: 3127 - DNA, 636 bp, Oryza sativa
tgccagtggcggcccggcgcacctcccagcctcccctcccgttgcatcagccgtgacgcactacccgactcccgtggaactcatacccgcatgatgagcctatatcaatgccacattaattgccagtttgccacggtgcgctgaattactagattcgcacgagcaacagttagctagctatagccggcgccatcatgccctcgtcgacggccgtcgtcccggcagcggcggaggcgagcagccgcatcatcctggtgcacggcacgggccacggcgggtggtgctggtacagggtcgccacgctgctgcgcgccgcgggccaccgcgtccacgcgcccgacctcgccgcgtcgggcgccgacgcgcgccggctgcgcgacgacgacgcgcccacgttcgacgactactcgcgcccgctgctcgacgccgtccgcgcgctcccggacggcgagcgcgccgtgctcgtgggccacagcttcggcggcatgagcgtcgcgctcgccgcggacacgctcccggacaaggtcgccgccgccgtgttcgtcgccgcgctcatgccagactgcgccagcccgcgccccgacgtcatcgagaaggtaaaacacacatccaagaacactcctcctctgttctcac

SEQ ID NO: 3128 - DNA, 672 bp, Oryza sativa
  unsure (1)..(672): unsure at all n locations
cgtgctgcagaatacgtgcctgccatcataaagcgttataccttgatggggcgtccattcctgtccaaacttgaaacctcaacatccaggtgtcgctcgacaagtgccctgtatccatctacactgccatccccagaagaaaaacaaatttgggaaaagggaaaaacccccaaaaaaaggccccaaccaaaaattggttaaaattcccaaggtacaaantgcataatgagaaactagtaataacatcacaaagaagcattctagcgagtacctcaaacacccctcgaagaacaatgcagttcttttactcgtcgtcttaagcttaggattgatgataacctggtatccaagggacacaaggaaaataaaacggcatgagaaggcggcaatattgcctaatgataattgttggtgaaggcaactacataggacaaatgtactactactcacaagaagatcgaaaggacggcgatcctgcgcttcaatgtccttcttgggagcatagctgatgtattcttgggtatcctccaggacgataatctatgaaattttaacaggtcgagcaattcagccatgtgtcaatcaggaacaaacataagcaggtaattaaacagttgaacagtagacgacttagtggagtaatttggagcaattaatgcaatggaataatgc

SEQ ID NO: 3129 - DNA, 538 bp, Oryza sativa
ttaacaacatatgtcccccacggtttctatctccatatttggtccttagcctcctctaggcacaggtgaactcgtgatatcacattacaccttaaaatacctatcgcaaagcgatgaactaactataaataactgcattaacttacaggaggcatcttcgttccatcatgggcagcatatctggagtcccattcattggctgagccgtcataacctatatacacgaacgcacaaacattaaaatcagcacttaattagactacctgattatccagcaaagtactaagtgtttgtaccagtaggatagtaatatgctgagggtccatattcattggtctgatacaagatgttggcattcactggctcctggagcaggggagtgatcgacctgtccaccggcgacgccgcattctgcgcattgccggcgcttgcagatccatagggcatcccggcaggctgcaattcacaaaaaggaccataatttttagctacctctcctccaaacaaaccaaaaggatggcacaagcaacacatcaca

SEQ ID NO: 3130 - DNA, 1048 bp, Oryza sativa
cgacacatggaacacatcatgcacgttgcccaaggagccgggcaactcaagctggtaagcaacttctccacgtcgagcgatgatacggaagggacccacataccgaggtgcgagcttccctttcgtctgaaacctgtgcacacctcgcaatggcgtgacccgaagatacacaaagtcatccactgcgaattccagatcacggcgacggttatctgcataacttttctgccgggactgtgccacctttagattatcccgaatgattctgactttagcttcagcttctctcaggatatcagtcccgaacacttggctttctccaacttggtcccacaatagcggtgtccggcatttgcgcccgtacaacgcttcatagggtgccatttgtatgctggcttgatagctgttattgtaggagaactcggcataggggagactcttatcccaggtcttcccgaagtccaggacacatgcgcgaagcatatcctctaggatttgatttagacgctcggtctgtccatctgtctgcgggtgataggcggtgctgaaattcaatcgagtacccagctcttctggaagcttcttccaaaagtgagaggtgaattggcttcccctatcagatacgattttcttgggaataccatggagactcacgatcctagcgaagtagagctccgctagtttgttccctccataggtggtcttcacaggaatgaatcgagctaccttggttaatcgatccactattacccatatagagtcatatccaccttgggtttttgggaggccggtgatgaaatccatcccaatttcatcccatttccattccggcacttggagaggttggagaagtccggccggtcgttggtgttctgccttgacacgctggcacacatcacatagagccacaaactctgcaatttcccgcttcatgctaacccaccagtatttctccttcaagtctaagtacatcttggtactgcccgggtgaatggaataaggactttcgtgagcttcctgaagtatcagctgtttaagttctctgcta

SEQ ID NO: 3131 - DNA, 2059 bp, Oryza sativa
ccattgaaaatgttaaggcaatcacgacgaggggaggtaagtccactcgtgatccgccgtatcctaaccttgcaggaactaatgggatatcaaaagaagcgtcatctaatgactcggctgacaaggagattcagccagaaaagaccgtgccgcaggagtactgcgacacgcggttgctgctgtttccccaacggattaggaaaccgtcagtagacgagcagtttgctcgttttgttgaagtaatccaaaagattcacatcaacatgccattgttggacgctatgcaaatgccgacatacacccgttatctcaaggacatactcaacaacaagagaccgctcccaacaacggaggtggtgaagctgacagaacaatgcagcaacgtcgtactccacaagctcccggagaagaagaaagatccgaggtgtcccatgatcacctgctcgattagggcacaacaattcgaccaggccttgtgcgatcttggagctagcgtcagcgtcatgccaaaagccgtcttcgacaagcttaacttcatggtgttgtcaccgacaccgatgcgcctccaactggctgactcgttagtccgttacccggcaaaatattcatgtggtcgaagtggagccacccaagacggacagcctggtgaaattcatgcaaaacttcctggagaaggaaacaacaatgcctaggaaccgctattggaggacgtcggtaaaatcacctgtaccggccaagaagttagagcagccggctcagaagaagccatcttccgcaccaaaatcaaagaaggtgtggaaggaaaagccgaaaacgcccgctccatcacctccagagacgggtagaaaatccgtgaactaaaccaaaaggaggtacggtcttgcacgtcggactttaaatgacgcgaccttcgccaacaggtaaattggtatgtatccgcatatttgctttcaacaatttgaatttttgcatcatcacatatttgaatttcatatttgcatttaggatttttgaattttgaggaaattcttcaaatgaatttttcaaagcaaacaaaaaataaaattttcaacaaaaattgactgtgccacgacaacactgaccgttggaatccaacggccgaaagtggggccggttgggcccaccaggggttcggccgaaccggccaggcaacggtcggctgcctcactttttgaggcaacagctagtgggccccacaggtcagttttgaccgttgtgggtgcactacttaagccaaccgaccgggagaagggacttcaccccatttcaacacattttcatcccctctccaaagtttgctatcaagttcattcaagctttgatagtttccctcaaattcaaaatagtttagttgcatatataaaagttgctttggtgaaactaaccggcgggtgaaactcttatcattcctaacccccgccgagtttgcatatgcaattactctatgttatgacgatgatattatagtagtatctggtagtttaggcgtggtgtctagattacgggatatcattatttggggttatatattgcggatgagaggtgggccgctgatggtgacagctcattacgggtattcctccacaccggtatataatcctaagttaattccctggggagggtatttctccgtatttagccctggttgtatggtcatgacgggctgtcgtaaggaactcgacagtctggggtggcttctcgaagtaccaggagggcatcggatagagggtattagctagtatatcggttaaccagaatgtatgtataccatgtatattagaagtatagaaatagattatatttctcttttctgtccacttagcttagataatatattatgagaatgagtagctaaaacttgtgtgtcactctacccttgtattatcttaaccactgcttagaatatgattatcacaagtaatatataaattatttgtcaagttctctacatgatcttcccatgggataaaataaatacgatacccttggaatactctcggttgaaatgctacaatggtatatccgtgcgcttgcgaat

SEQ ID NO: 3132 - DNA, 850 bp, Oryza sativa
gatgatattagagtagtatcgggtagtttagacgtggtgtctagattacgggatatcattatttggggttatatattgcgaataagaggtgggccgctgatggcgacagctcaatacgggtattcctccgcgcctatatataatcctaagttaatttcctggggagggtattcctccgtatttagccccggttgtatggtcatgacgggctgtcgtaaggaactcggcagtcaggggtgccttcttgaagtaccaggagggcatcggataaagggtattagctagtatatcagttaactagaatgtatgtatactatatatattagacgtataggaatagatttcctttctcttttctttccacttagcttagatgatatattatgaggatgagtagttaatgcttgtgtgtcactctaccctttgattatcttaacccctgcttaaaatatgattatcacaagtaatatataaattattagttgagttctctctacatgatcttcccacgggataaaataaatacgataccattggaatactctaaggtgaaatgctacaatggtatatccatgcgcttgcggatgaactctgtaaccataatataccagaaatatttctgcgccattgttgggaattatatttcttgtaatgccgttaagaaataccaacaagcaattctggcgccgttggcggggaagattcataatagagattacttgaactaatactttatatttacctctgtataatcatttcctttgcaggctaaccttggttgttttcactttttgttgtgaaaacagagtagtgcatgactggtttcaacttgccggaaaactttaaagaa

SEQ ID NO: 3133 - DNA, 641 bp, Oryza sativa
tgggaagtgcttaggccgactcccagtgcttggtgctgagagatcccctcataatttccccaaagcgtaaccatgtgtgaataaatgttgagctagtagggttgcagccacgagtaagtcttcccttgttattgtgtagccagaatgccgcaaaacttccatgcctaagcgaactgttgagagtagcgtttcgatttctgactgtgttagcctggaagtgcttgtcccaacgcttgtttctgagtcagtgaacgcccgcaagccaacatgttagttgaagcatcagggcgattagcagcatgatatcaaaacgctctgagctgctcgttcggctatggcgtaggcctagtccgtaggcaggacttttcaagtctcggaaggtttcttcaatctgcattcgcttcgaatagatattaacaagttgtttgggtgttcgaatttcaacaggtaagtgagttgctagaacccatggctcctttgccgacgctgagtagacggcaggtgacgggtggtgacaatgagtccgtgtcgagcgctgattttttcggcctttagagcgagattcatacaatagaatttggcatgagattggattgcttttagtcagcctcttatagcctaaaggctttgagtgactagat

SEQ ID NO: 3134 - DNA, 811 bp, Oryza sativa
gttatgtaagattcagctgtggcagttccagcatatagccactgggatccttcagggcattcttctgcccagtactcaggaggcaaaatgtccaatgcatttgaaccaagtagggggaaatttggtttcccattggatgtaaataattattcatacagctcagggacctcaagtgtggaaactttattagatgcatcatgcgcaaatcatgatggtgttgccaaggtaattccagtaaaggaagcggaggtctcatgcatgcctgggtttctcaataatgactgctctgatggcgatgaatattttgataccccccttgttatggaggaagatgccctcgaagaaggtaaactcttaggattattttcctgattttagttgcgatatgattttaagcatgctgcactaagcaatgatgaccccatttcataggtcaggtaattagatttacaagaacaataattttggtcatgaagctctttgaacacttctctgtgcattttaattgagtagactatgggttttcagatgactcattgctaagtttcttgtacagcagagttcttatagatttctgacatacatatatcaatctataaaggttgtcaatttaatctgatagcagattattaattctttcattctcatccaaatgagtgtgtgcaattgatgtctctcactctttgaactatcatagggagcaattgtttaattcttgtcagctgtatctttttcagatcatctgcataaatatgaatcatgtgcatcagtcaagggccagatctcaaaacccaggaagcaaactgctgaa

SEQ ID NO: 3135 - DNA, 2705 bp, Oryza sativa
ctgctcatcggagactcgggcgtcgggaagtcttgcctgcttctgaggtttgcggtgaggatcgcttccttaccctgtattgagatttctttttttttctttttagattataatttaaggttttgtttatttgaatgcatctcgtatggcaagtccccgggcaaagtggccagaagcctgtgaactttcaagacaccaatttagttcattggaaagataagaggatacttaaaatttgactagagagtatcacctaattggttttattcaaggcatatgtatgatgcatgtttgcgaataatgacttggcatcggcaacggtgacaaagtagacattgattgctttattgcttggggtatgttcattgatccaagataaaaacaatgccgtgggagatttgtaatggacttgaatttgcatgacaagttcctccgtagggtgccctgataatgttatttgctgtttggccaatgataaaatcttacgtagaatcatagaaataatcataagagtttatctgaattttgttctgctttgggtagtttccgtgaacaatttggaaaaaagattgaggtgttttggtcattttgtcaaggtctgtggcatctcaagttactatactttcgggacaagcttgtcgatactgatttagttagtagtagtgactcgcctaaaacgagttaagatctggagagtttctgttttcaatgtcctcattttccaacattacatctgacagaaatgcaaccagtaatgatgatcaagtgggagagcgtttacttctagaatcatgtgctatggcagctgtattcatagtctgcatcatatttttgtttggtagctcctcctggccttgattaaaggatctatcttctcatttcttttgcaggacgattcatatctggagagctatatcagtaccatcggtgttgattttgtaagttcaatttttccatgtgcataagtttgcacaaatgagccttttttttttctccttaatagccttttcactccatgtttgacctgctagaaaatccgcactgttgagcaagatgggaagacaataaagctgcaaattgtaagtaaaccattctagtgaaggctgtaacatttttccagactgctaagaaacttcagctctgatatgtcaacttgttctccttcagtgggatactgctggccaagagcgatttaggaccattacaagcagctactaccgtggtgcccacgggatcattgtgagcactcttcacatatgtcactatccatctcccatggattaatattaccccgtgcttgctaattatgtaatgtatgttatgtaggttgtttatgatgtgactgatcaggagagcttcaacaatgtcaagcagtggctgaatgaaattgataggtatgctagtgaaaatgtgaacaagctcttggtggggaacaagtgtgatctagctgagaacagagtggtttcttatgaggctggcaaggtatttttttgctttgtgtttccattaccctcgcataaatatcttttgacttccttgtggattataccttgttcaactggcatacatatgttttaatcattgacaggcccttgctgatgagattggaataccattcctggagaccagtgcgaaggatgcaacaaatgtggagaaggcattcatgaccatggcaggagagataaagaacaggtgacattccctctagatatttgaaggcttattctaggaaattgctattttgtgcttaatcatcatgacctcctgatatatagttacataaggaaagaattcatagaaatgaacatactattgctggaccatcattattggtattagcattcacttgcattacctgacaccttgttctttgtttgaataggatggcaagccaaccggctacaaatgcaagcaagcctgcaaccgtgcaaatgcgaggccaacctgttgcccagcaaagcagctgctgctcttgattatcaatctagatcacaatagtgtgcttgtttgtgcaccaagcaacacttaattggttgctctatccctgtaaattaagtctattagtactatcaaaaagcttgatgtgttctgtgtcggatattattggaaaaagtctgtcccctaactgtaacgaagcggcagatgctgtgggcctgttttaactgcctgttcatatttctatgtttcaagtggcatcgatgttcgactttattcgattaatggttccacttgcaaactgtgctacgaaatgctgacggagtgcaatcttgtcataccaggcgcgcactgcctccgtagtaagatattttactgtagaaatttatgtggaattatccgatgttttacgtcctttagaaatttgcgtgcaattgggacgacgttttgcattgaatttgttgatactaacaccaaactcaaattatgacgtttctacgggatcaaaatgtgattagcctaacatgctagttctactcgagttctggccgcaggatgtacaagcagaaccacatttttgtttgcaagagcaagacggtacatcgacacaatgcatactcctggatgctcaaaactttcacagcttgtttccagcaacaaacctgaagcatgaactacccttcacagcatatatgagcaaaaagaacactcaggccgcgttaccacgatcggatgcaatcagtatattcaaggtgcttattttcctccca

SEQ ID NO: 3136 - DNA, 1039 bp, Oryza sativa
ccaaggacatcaattataaggtccactttgcgatccgcccatttgcttcgcgattatgacgtatatccccgagtggaaacgatgtgaccaccgtgaccgagtgaccttgaaagtagtgagatagtttcttgatagtaattaaaacaccatataatagcttttgaacctgaggatatcttgtcttggaattagccaaaacctcgctaacgaagtaaattagtcgttggactttttggacatggccttcttcttcacgctcaacaaccaggactgtgcttacaacctgggaagtcgccgacacatataacaacagcggctctcggatgtggtgaagctaggactggtggagtagtgagaagttgtttgaagtcttcaaaggctttttgtgcttcgggtccccactggaaattgtctgttttcttcaacagcttgaaaaagggcatcccccgctcgccgagtcgcgaaacaaaccagttgagcgccgccatgcaaccagtcagcttttgaacatctttctgggaacttggcggcttcatgttgaggatggcattgattttccccgggttggcttgtatgcctctatgagacaccataaatccaagcagcttccttgatggtactctgaagatgcacttttcagggtttagtttcatcctaaaagcgcggatgctcgcaaaggtttcttctagatacgtgatcaaatcatccttctgtttggtcttgacgactacatcatccacataagcttcaacattgcggctcatctgagttgaaaaacatctctggatcatgcattgataagttgctcctgcgttctttaatccaaagggcatggtgatgtagcagtaggccccgaagggcgtgatgaatgaagtctttaagcagtcggattctttcagtcggatctgatgatatcctgagtagcaatccaaaaaactgagtagctcgcagtcggccgttgagtcaactacctggtcaatgcgaggtaacccaaagggatctttggggcaagatttgttgaggtcggtgtaatcaacac

SEQ ID NO: 3137 - DNA, 552 bp, Oryza sativa
tcgtcggcgcctcggactcgggaggatcagcatgaagagccgaatgcccgcctcgacattgagcgcggacgtagtgatcggcgtactccccgcgcaacggagggtgcctcttcgtccagggtgtcacctcgacatggacgtgaggatcagccctccgtgcccccggttggtggtgttggctgtagagcctttgtggcgagtcttcggaatgtccgttggcccccaaggttccggcccaccatcaccgagaagtatgatgggagcgtcaaccccaccgagtttctccaggtctatacgaccgggatcgaggccgctgggggagacgacagggtcatggcgaatttctttcccatggccctgaagggacaggcgcggggttggctaatgaacctgccacccgcgtcggtccactcctgggaggatctgtgccagcagttcaccatgaactttcaaggcacctatccacgcccaggtgaagaagcggacttgcacgcagtacagcgaggggatgatgaatcccttcgctcgtacattcagcgtttctgccaagtc

SEQ ID NO: 3138 - DNA, 1527 bp, Oryza sativa
  unsure (1)..(1527): unsure at all n locations
aaggaaaatattatcactgcataaatctgaatttgtgatgtgtatgaaagcatgatatccagtaatatcaatagaatactctacatgcaataccattgcttataatgatgtccaaagtatcaagtgatggtgcatagaagtataggactataggggcttgtagcagcagaaatattagaatggcctcatcctgaaactaaagtatgcagtatttttagtccataacggtctccacatgtctttagtagtaacaatgacaaagatatacagggactgtcacacagtcagtcacatatgtgggctgggccaagcggtgggaggagaaaaacaaaatttgcatcaacaagaagcacgtgaggtaactaacaatgtctattggtaaaaattgtacaaatctacgaaacaaaacgtctagaacaatccatgcatacaaacttttataaaaatatttctaaaagtaatgaccttctcaatctcagatgattcacattgctagcgttcacctttagaatgaatatcctactctgctcttttcagcttggaatttcctcctggaatcaaataataataccaggttgaattttatattgacaatgtactattatttgcatatttcagaaaaaagctagtgagcaaggcatcatacactgttaactgttcaatgtgcaagatgtctaaaatgacaggggaagtatgcagtacgacaataatcaaatctctataacttcgccactttctttactatagtccctcttggtggtgtttggatccagggacttaactttagtctctgtatttagacactaatttagagtattaaatatagactacttacaaaactaattacataaatgaaagctaatttgcgagataaattttttaagcataattaatccataattagagaatgtttactgtagcatcacatagactaatcatggattgattaggctcaatagattcgtctcgcgaattagttcaagattatggatgagttttattaatagtctacatttaatatttataattagtatccaaacatccgatgtgatagggacttaaaagttttagtcccatctaaacagggtcttagacttttttctcgagaatacacaaaagtttttcatgcctttgtatctagaattgggaggtagctcctcctagatttaaaaaatcatccaatattatataagttaagttgtctaaagaagattatatttcacatgttattaagtacccacggatgatttgcttctttttttcccccaaagggncaaattaagggtactggtgccgtcttctccttcatctatctctcagttgtatcattttccacgtacaaaacatgctttgagtcagtgctaccactgataaggaaattgatattggcattcatactaatactaactaaagaggaggaagggcaacaaaggatgggcttgcaaataaatttaaggtacttgaattgcacctcagtggaggcggtggagagcctagcctaggatatgagcattttgtttgttacct

SEQ ID NO: 3139 - DNA, 677 bp, Oryza sativa
tccatcccatgatgaagacaggcggccacatactcctgcagtcgttcccatgcttccggaatagactcgtcccttgtatgctggaaactggaaatccttccacaagagcattggttttgcccatcgggaagaatttcgagaggaatgccgtaaagcatttgtcccaggtgttgacagcagcacggttggcatagaaccactgcttcgctctctcgagaagggagaacggaaacagccgcagcctgacggcatcgggactgacgcccttgataatgtacgtgctacaaatctctaggaactgttgcatatgagcattggcatcctcattaggcttggcacagaacgggctagcctacgccatcgtgatgaggctggacttcaaatcgaaatccacatctcctatgttgacttgcggcccgatggccacattatcagcagagggagtactgaactcgtgaagagtcttgcaggctattgtcttgaaggtcagtggcgctggtacggctggtttctttgtcagtagagttttctgcggagcaacgactcgcggcctaacgctccggaagaaagcttttggattttctttaaagttttccggcaagttgaaaccagtcatgcactactctgttttcacaacaaaaagtgaaaacaaccaaggttagcctgcaaaggaaatg

SEQ ID NO: 3140 - DNA, 600 bp, Oryza sativa
ccatccacatcgtcgtcgtgatccggtgaatggtgggggacgtagcctcgtgccgcgtggcactggttgattgtatcgcgaagatcgacggggcgcctgcgaggtggggagcgtgcccgttcaactcggtgctccctgtgtcgttcgggaggcgagtggacagatcgcccgtcgtgacccctgctcctgcgattggatcctgcgccggcgatgctgaaggctcggctggtgatagtcttgagatcgaagatggggaactcggctgccagtcggcgtgcggacgcttgcggagttaaccgggaccgaggcaacgatcatggtcttggtcagggtcaagatgttgacgacgtgattagcttggttgagtgcgtcttccttgaggagggtgtcgaggagggtgatcgctgcaaccgcgttctattgaggggtgcgaaagaccgcagttccctcgacgtcttgctgcacgataagttctcgtgctcgtcgcccggcgtccaaggcccgttgtcgtcggtcctcagcctcctttgcagcccgttcgcgttcctgttgctcacgctgccgccgttctcgctcttgtgcttggcgctcctcttccag

SEQ ID NO: 3141 - DNA, 632 bp, Oryza sativa
aagattctcgcccacccattcaagtcaagtggtgggatgacgacatgcaacctcagggaatcatgataaacaagcaaaaggaagccgaggaagtatgtctgttgaaaaaggcactcgggcaagctactcgtatcgtaaacgtaagtctccttatacgcagcttcaaccatcctgtttgccgctttgcacaaatgccgacaaactcgccttgcagagaatccatctcaggaacgaggcgaagactgcgactcttgaaaggctagttccccatcttggaaccattgaggccaccagaaaccagctgcacgaagctaaagagcttgctaggaaaactgagcatgatctaagggatcggattgccgagctgcaagactccaactttgaactgagcggttcatgaaaaggtaaatacaacctctatccaacctacttatgctaccatccttgtaatatcaattaacaagaagaatacagtgcaagctgccaagatatttgaattggaaaagcggatccaagctctggagaatgacaaggccgaattggcgagacaaagggactcggctcggaaagacgttgaaggtactggtgactaatactccaaaaaccattcctttctttatgcccactcgttg

SEQ ID NO: 3142 - DNA, 2812 bp, Oryza sativa
  unsure (1)..(2812): unsure at all n locations
tttacttactttgctccagtgctagtagaaattagaattataatagtcttctctagttcttcaagtcttccggagatttcgggtatggatctagtatctgttccctctcttgtaagactttatccgataatgaaatacttttctttatctagttttggtcctttactatacttgcataattattcgagtacgaactttagctcatacttgtctcgtattaaatatgtagttagcttaccagagatatgcaatagtattgtctaagtgtctatttatatagttgctctatgtcatctgtagagatgtagagtaatatttagtattgtaagcgtggtgcttagattattagatatcattaagtggtgctatatgccacggatctgtagaggtaggccgctgatggtgacagctcagtatgggtattcctccacgtgcgtaggtagggctaagagaggttcttgctgtgggtactcctccgtatctttaaccggttggatagccatgacggattgtcgtaaggaacccgacaatatggggcggtttctcgatataccagggggggcatagttagggagttattagccacagagttgtacaatagtaagtgtatactaaatgactatatactagaagtgcataaatgatgttgttctaatttcttctctatttagcctagacttataatttagtgagagtattctaaactgaaccttttatgtgtcaaatctatccttatcctcaattgattaatccctgcataagactttgatctacataagtatgataagaatttatagcatattactatcctaccatatcttcccttgggattaaataaatacgatatcttggacgtacttccgggtgaaatgctatagcggtatatccatgtgcttgcggaattatttctttaacccatacgattaccgtttaatatttctgacaacattgcttgggactaagttcctagtaatgttgttaagaaatatcaacagccatccctaantcggccaaacctagtcgaagccgctcgtgccaacctgcacctgggtcactgcctagtgggtcttcatgatggtgtacggtggatggccttaaatatgttggttttactctgatttttgggccatccaatctgtgtattcacgtctgattagtatatttcatcgcatgtcagacggttttcctccataattcacatgcatacaaatattcaccaagacttgtggaactagttagtaatatccactacctctaagtttagtattcaattttatattctttaattttctttcttgcaggaattggcagtcggatttgacacttaaggatctacaaacatcgcctcacacgctactctcctgttgatgtgcgcaccgatgccgtgaggcaagagaagtttatgtttggtcttaatgatgaactaaccaaccaggtcatctatggagattatactgattttgagaagctatttgacaagttgatttgtcaggaggatcagcgcaaccagatggatcgcaaaagaaagggagctagttcagggcgcgtcaggggaacaaccaaaagcctcgcttcatgactgataaatttttaagtttagatcagccatgcaaagatgataattcttctaattttagtaaaatttaaggctagatagaaaatgaatctgtgatgtgttaatttggggatgaacaattgaaattccgcacgaagcantgaactggctgttgacggctgttaaataccaaattctcgccgtcaatacctacataaaactgaaagtataaaatatctgaaagtataaaatatccaaaatagtggtaggatatatttctaataatttccacgagtgttgtgtatattagatgtaggtgacaaactacttaagttgagaagaaatatacataaggaggagatcaaactcatattcaaacttaggagtttggacgaaaacaaaatcaacacctcaaatgggnccaaccnnnncacactagaatgaggtcacaattagtgnnnngagaaaaacggggccacggaccggccagggtcagccaccctacaagccacacgcccccccccaaggggnggcccaaagttgagttcggtagcaaccgctccccaatgtgggtttctaccgttttcggctctccaactgtcatccaaatagacgcttggcttgaggagagtgaagatgctcatatgattccatggagggtctccacactccgaaggcacctccaccaataaataccactcctcatccttcattccaactcacaccaagatgtagcttgagctgaattataagaggctctttgtatgatttattttacacatagaatagggagagtatggtagaagaaatcggacgagttctggagttgtcggtaatctcctcttactttttgtacattgttaattactctggtttaatagaattatcttcctgagtaattaagatttacttcatgtgaataattcttggttattttctaattagcatgcgggatcattgttcactaaagtccattaatttattgtgatcgctttagaatttagctagcactaaagtagttattaattgaatagacgcagtatctgggtaattaatttccggtgattccttcgtatcccacagtaggtttgagatcggtgtagaggtggtgatagccctcaagtacactaaagtcctccatgtacgggtatgtagtagagtgacatttgggagtagcgagctggccagtgcctgaagtatcgcattaggattaaactgagctttctgtagacaccgtttctcactaggaaatcatct

SEQ ID NO: 3143 - DNA, 590 bp, Oryza sativa
gggcaaaatgtggcctgatgcccaaaaaagcttcgcaggcatgtatgaagttggcaatacgaactatggagttcgggtttaggtgatgtaaactaatcccgtagaaatccaaaattccccggaagaatcttgaggttggaagagaaaatcctccatagaagaaatgagaaaataccacgacttcatgtgtgtcgggggtcgggaatgcttcgccgaatgctggacgccatccaatgatctccttcgccggaagaacaccgtgcgccaccatctccttcaggttttcctctgttacatcggagggcgcccactgacactcgaagctttctttctcttctgccatgaatacgaattggatggtgtgatttggtccaagatatggctggagatggatggggaatcgatgcggtggttgcgcggaaggtttttgtggagctcaggaggatggatcggagaggatttgttaaccctagcttccgccagtgtagtttacactgtagcagagaatggggaaaatggcgagagttttggcagggaagacgaaacgacgctctgacttcggcgtttattttgctagggtttcaggagtg

SEQ ID NO: 3144 - DNA, 1719 bp, Oryza sativa
attgaccaaaacttggaattacatgaaattatcgggaaccagagggccagaggcccctatggctcagtacatatgtaagccagcccatgggaagatattgtgcgcactctctccatgaagaaattaacagcccatgttggcccactaaatattctactacctctgtcccaaaataagtgtagccatgggtacccatgtccgatgtttgactatccgttttatttaaaattttatgaaaaaattaaaaagaattaatcacacataaagtactattcatgtttatcatttaataacaataaaaatactaatcataaaaaaatttcaaataagacgaacagtcaaacgttaaacatgccggtaccaagttgcacttattttgagacggaggaagtatattttaactctttcctttcagacgactataactactgtgattaaaaaaaaacacttgaccgacgcgagaatggacgtccccatggtttttcattaagaataagcctcaacacccggactcaccacctatggatcaattcttaaccgttactttgaggcccttgcttccaacacgaggactcaccctatataggtcgaatcttaacacatgtttttatgtgggatcagagagagagatttttttttaactaggtctgaaattcaccaaggaacccaggaaaaaaagtgatgcttaagtgctcttgtggcaaagctcaccaagtatattaacataaaatgtatatgcattttggagcaattttttttataagtaaaatacaaacacaggcgctcacaatgcgctcacactcattcctatgaatacacacgcacactctacctctatgaagtcctcatagaatcatttgtgactctggtacaactaagatagtctctggtttctgtttctgtaactgtagttctgttccatatggttttactgaaatcaaccaacatgttatgttagtgaaggctgtatttgtatcaattagagatcggccagagattaattggcatgaaaaatattcttgcaaaaccaggacacatatatgcaatatgtagaacattaatgtttgccaacacatacatatttgtatactaaaatctgtatatatacaaacacaaccatgggcgtcatcatcagagggaaaaaaggttacgttcagtttataccatcgaagtttaattttctcatccttcgccatctaaccaatgcatgcagggatatgcatatatatatatatatatatatatatatatatatatatatatatatatatatataaacattgattgttaatggctttgggagagaatatggtgttacagcactgatcagtgagtgtttcactgaacaggccactacttgagcccagtgcctaagccttgtcttcacaagctgagggttgtcacctgttaagttgcatgcatcacaatttcacatcatcttagcagacaaaaacagtgacataaattaacacaaatagaatcaatattccaagagaaaggggataaatattgttcttttttttctttacctggactgcaaatcttccacgagtccatgaaagaagaaggtgcgacggggctacccgggttcgatgtgccaccgagggtagaggaggacgacgtcgctgatgtcggtgatggcaaggagctagtggacaaacgcatcttgggctccgagagctgccggttgacggcgaagtagaggtcgagggcagggag

SEQ ID NO: 3145 - DNA, 595 bp, Oryza sativa
acatgcgggcatacttaagcattccaagagtccgacaaattagctactctgtcacaccagatgctggaaatcatgacaaatatatggtagtccacatagagagatacggcagtaccagaagctatacatacgtattgattttttttaagtcatcttctatcattttcttcaaaattaaagatcaatgttctatattaaatgatcacatgtctttgtattagctagaacaagattatgctagcttacccatcatgcggcctgaacactcatggaaccggttggtacatccagcaaggctccattgctgtttgcatggcctatcatgcgaaggattattgtgaatacgacttacaatcaagtgcaaaaacatgctatttttttacaaaggcaaacatacctgcaggttgtcttgcaacgaaaaaacatgcgccgatgacaatgtagcacaggaggaggagaatccccttcaggtaatgtgatgttccatcctgtaaatcaagcccattaattagttgacacattgaattgcaacatgtcacttaagatgttatcctgttatctgagtaattttcggtgactaaattccatttccacc

SEQ ID NO: 3146 - DNA, 637 bp, Oryza sativa
aggtcgactctagaggatcccctaaagagtgaatctcattgaaggaacaaaatgaacatttcaatttttttcagcagtctcggtaatcaaagttatgaatataccattgctctatagcacctctctctggcaaaatattagcattttgtctcaagacctccttatgacactatattaaacactatgggcacacaatacctatcatgtaaaagttttttatttttgctaaactcaagtttcacaaggtcaattacatcactttactgtggcattagtgagtattcactccattttgttccatacttttgataggtatcatcttcacagactactgagaatgcaggccagttcaagatctgccgatgtggggaaggagacccaaatacaaacacatctgaaagagatcgagaatttccgattcccatgtttcttttcaaccaaaccaacaatgtcatcttcccaactgcacaaaatatttattccttcaggaaaattgaggttggattaaaaattcacgctcagcataaaacaaataaatgatagtaaaaaagcaccgagtccacagtttcctcagactataattaaccattaccatcattcaccggagtcaaccaagagagaccctagatctcactcg

SEQ ID NO: 3147 - DNA, 532 bp, Oryza sativa
tttgaccccgcgcccgtgagcccattccttctcctcgaagctcccttgccccagcactgcttcgaggtcggttcccgaacctacatagccaccccttaaaagccgcccctccccctctcgctcgatccccctgtttctctccaagccgccgcgccgttgccgccctgccctgttcgctgtcgccgttcgttgtcgcgcgtgtcggaggagccggcacgagcgaggacgcgtgacgtggactccgggcgcaccctctccttcctcttccccggcccgaggccggagcgatcacgccccgtgccgtcggccatcgtcactgcgccccttcaccccgtcacggtagtgccttcctctgttcttcctcctcgctccatctcctcctcttagactcgggtagtagcacgagtagaccccccgtagtcagctggcgccgccccaagccttgccgccgcccgctgtgtgctcgccgacgtcgccgcccgagctcggtagtgtctctcgtcgccggcgtccctcggtgcgtttcctccta

SEQ ID NO: 3148 - DNA, 1101 bp, Oryza sativa
ttttgctgagttcgctattagcttggataaaaagaacaatgtaccacctgagaagtcattaaagctcccatacaagattgatggtgacaaggtagggagccacacaatcttcttaagttttaataaagtggagaactggacgaaagcactaaaatacacgttgtgcaacttgaagtgggtcctctactgatttatcggcaatacgagtttcgcaccaccccctggatctttgtgtgcagcgcaatcatctaagagaaatttagggtttcgagtttagctcaagattttggtgaggagtgttgctggtgcactttgtaaacactagttgatgcaataaaatcaaaaagtttcaatctacatcttcaagtttgtcatctaccggtgtttatgggtccagacggtctaaccgcaggtctacgcacggtttgaccggtgggatagcggcggtaggtgttcgggtggtctaaccggcgaggctttggtggtctgaccgacggcaggaaggcggttcgaccggcggcgacaggacttcatcatctactccgtttgagggtagtttttatttccactaaaagtttctattttgggtttttggttaattctaccattcaccccctgatcttatgcgatcctacaagtaatataattgtatatacatgtgtttataattttcattttctatatgcaatcttaccgttcttccattttggaaacatttttttgaccgtgaggctcacttcactatataggtgagctgtaattttagccgtgaaggtccacttaaatacttgtggatgtgttctgatggtcggtcgtctgcaaagattcattattgtagacgaccaacttaaatagatagcctatcataaatcataattgatatatttttgctgacgaccggtttaagactccacgtacaaacaccaccatcaccggcttcttttagttgaaatcatggtttagtcgaaaacagtatcaatttacctctgaccaacatgtcaaattgctatatagatgtgctgcttgtttactcccatgtgttatgctttcatcatagtattatactacttccattaacgggtattagcaagacttaattac

SEQ ID NO: 3149 - DNA, 3723 bp, Oryza sativa
gatatacacagcgcatagctaaaataaatagttggttagtagatcaaatatgtctaattacagcattagtagcggattgacagtagcataacacagctaacaaattgtgcttccaaggaaagaaactgtacaattgtttcagttttcctgagctccagcagtttaattagccggctggccggggtcattaattaagcttttgctgctggggtcattagttataaaatactgaacaattcacttgattcatcgaatgccatcgggtcatctgaccccgatgatagtacagctccgcccctagccgccgagaagaagcgcacgcgcgccaccccgggggccggtgcagctacggctacgcgaccatcgtcgattaagcacccctaggcggtgggctctctgcttcaccgcgccaccacacgtctacgccgaccaccaccaccgtctcacgttctcgaacgttcccggagcaaaagttggtaagcgtgatcgttcgcacttactcagaagtactatggatgttagtaattgtttggaggtcgatcaacctgcacatctgtcgttttagaatttcaaaaagttattttagatatactggcagcacagtacgaacgtacgtaacatagcaaaatagaataataggattcatttgaaaataataagagaatattgatctctattaaaaagtcccagtatatacatgatgcataaaaggacccttatatatataagagtttaattgttaattttcttcatcatgccggacaaatagtaatggagacatgacactcaacgtcggtcataaaatccttatgtttatatctcttctctatcgctatttattataaaaattaaaaatgtttttgtcaagattttgggattttgatgcgttatccgtatttgagttgatttttaagttcgttcgcttttagaaattcagatccgtgtttgagttggaatttaagcttattttcttttggaagtataaaaggattcgtataagaaatcttttggaaaaaaaattcgcatgctaacttgaattgaaatacaaactactaattgcaactcatgattttcttaagaaaaaatccaagtctattccgacagtgaattttactctagctaaaccgtataataacaataaaattaaaatagtatttacccgttgcaacgtacggacattttttagtaaaaaaataaaattccactctctttgtgattagttggaatatttgggttgctgagtcagatttaaaaacacctgttatgttacatgaaatgtatttttaaatatgtcctaaacttgaaaagatgcatacaacttttgatcaaacagtaatccacagacaaccaacatcccggtccagggcttaatatgattaatagaatactcgtatcaacaagttgcaatttcttttccggaagccaatctctaaagaactccgaggttaagtgtgcttggcctgaagcaatttagggatgggtgaccaacccggaagtgcatgcacacgagtgaggacaaagtgtgcagaaaagatttgtgttggtctgtgagggcaccaggactgggtgcacacgagggagcaatttagggactgtgagggcaccgaccgagaagtcccgggtgcacacgtctatgacctacgaaagctactagatgtaagtgagtccggcccctgagagggcagtatatgacctacgaaagcctgtgagggcaccgggaagtcccgggtgcacacgagggagcaatttagggatgggtgaccgaccgggaagtcctgggtgcacacgtctatgacctacgaaagctaccagatgtaagtgagccgaccgggaagtcccgggtgcacacgtctatgacctacgaaagctaccatgtctatgacctacgaaagcacacgagggagcaatttagggatgggtgacagaccgggaagtcccgggtgcacacgtctatgacctacgaaagctaccagatgtacgagggagcaatttagggatgggtgaccgaccgggaagtcccgggtgcacacgtctatgacctacgaaagctaccagatgtaagtgagcccggcctgagaggacagtgtatgacctacgaaagctaccagatgtaagtgagcccggcctgggagaggcgggccgttacaaagtggtatcagaaaaggtctatgacctacgaaagctaccagatgtaagtgagcccggcctgtgagaggcgggccgttacaaagtggtatcaggtcgttacaaagtggtatcagaaaagacttgtgttggtctggtctatgatctacgaaagctaccagatgtaagtgagctcagcctgggagaggcggaccgttgtaggtgggctccacatgtcagtgactgtttgctcctgcgacgacgaatctgtgccgaccttgtttcaccgcctccgcctccgattcgacctccgcggccgccatgaaattggagcttccgggaggaggaaatctcgagaagtagagagagaagaccacagcgtgggcgagcgcgtcggcgtcattgattccggcgacatgaagcccccgccgcggccgcggccggcaacagggctggtggggtggatccgtcgataccgcggttcaagtgccaggagtgccaccgcgcgctcgtcgtcgtcggcgtggactccttcgccgccgataagctcccggctcaggccacctctgggcatgtatcctctgttcatggaagtattatgggagctagcaggatggataattcttatgtcgtgctatccaagcaaaacaaatctcatggccatggaattcccccacgcccaccgagtgcagcagccccacatatcgaacctaaccagccaacaagagcgatggagggttcatatatagtgcttccacctgctgctgcttccatatacaagacatctacttctgaaggaggtggtgcgcagttgccaccaccaagtatcaattccagcagtttgttaacaggaaatagttttcactctaacgtgactgtattaaaacgggcatttgagattgctacgtcacaaactcaggttgagcagccaatgtgtctgggctgtatgaggttgctctctgataagatggataaggagattgaagatgttaatgctgacattaaagctcatgaagtttgtcttcaacatttggagcaggaatcctacaatgtcctcagcgatgctggttttcaggaggagaaactgaagattgaagaagaagaaaagaagcttaacgctgctattgaagaagctgaaaagcaatattcagaaattagttctgagatgaaggatcttgaaataaaatctaaagaatttgaagaattggaagaaaggtattggcatgaattcaatagctttcagtttcagttgacatctcaccaggaagaaagagaagcaattttggcaaaaatagaagtttcacaggttcatctggaattgctgaagcgaagaaatgttctcaatgatgcattctatatttcacatgatggagtaattggaacaataaacaacttccgactcggacgccttcctaatgtacaggttgaatgggatgagataaatgctgcttggggtcaggctgctcttcttttgcataccatggctcagtacttcaccccaaaatttgaggtccggattaagattcatcctatgggtagctacgcaagagtcacagatatccacaaaaatacatatgaactttatatcatgctaaccag

SEQ ID NO: 3150 - DNA, 1701 bp, Oryza sativa
ttatcctaaaatataagtattccgagatgattttgtgcgaattaagaaattaagtgaaattagatgacttaaagttgtgattagttaagaagagaggcagataaattaaatataatatgattgtgattggttgagataaaaagttaggtaaagaaaaatagctatattttaggacgaatttaaacactatagatagatatgtacattttaggacaacaagagaatttactgaatacttttttttggctatatatggttatgccgagaaaatggataggtatggctcgaagcctgtttctgtgtccacaatatgtccagaaaaattatagtatagcctcataaaaaggatcaagcaattgtagctttgtgaaaattctagtaagcattagtgttcagtagcattctgcttttctctctctctctttttctctctctcttttttttacctagaagcattctgcttttctcttaaaggcatgtcttttttttttttaagaattacacagtacaacacacgcacactcactcctatgaacacacgcaaaccctacctctattttttttaagaattacacagtacaacacacgcacactcactcctataaacacacgcaaatcctacctctatgagcatcttcacactcacccctataaacgcacacacgcaaaccttacccttataagcatctttgaagactaggccagccaattcattctggagattgatgaagttaccacagacactgctttatttttagaattacatagtacaacgcacgcacactcaccccgatgaatgcagacaagccctaagtacaacacacgcacactcactcctatgaacacacgcaaaccctacctctatgagcatcttcacactcacccctataaacgcacacacgcaaaccttacccttataagcatatttgaagactgagccagccaattcatcctagagattgatgaagtcaccacagacactgctttatttcgcacgcacactcacccctatgaacgcacacaagccctacccctttgagcatcttcgaagactgggccgcctcgctgtcgaggggtatgtcgcctaccaccgaaagcacaaagccgttaaatactggaaaattcgctcccatggagagttgaacctaggacctaaggtgctactgaggatcttgtaaccactaggctacatgccctttcgcttgaggcaggtttttttctctatctctactattataaaaattgaaaatatttttgctaagattttggtacacaatccgagtccatttgcaatacgctttttgcggtttgtccgcttccatgtgatcctctgcagtccatcatccttacgagcccgtcatatgctttaggccgagtttagatccaaagtttttcttcaaacttttaacttttctatcacattaaaactttcctacatacacaaacttctaacttttctatcacatcgttttaattttaactaaacttctaattttagtgtgaattaaacacacccttactcgatgttgtttgcctggctatatgttcccgaatcgttttcttatggggcatttgcaaatttgccaccggttttttgaatattgcaaggataccactcgaatgacagttctagtggcatttttgcaattttctagtggcagttttgcaataatgattcaaagtagtggtaaatttgcaatt

SEQ ID NO: 3151 - DNA, 956 bp, Oryza sativa
ggttcattttattgattcactgccggaggtatatcctgtagttgaggaatgggtggaggatgttcttatggatgaggggaacgcaacaatatttactctcttcgcttgccttgtaactgtcctatatttgcgagagcgtcagaggcgtcaagctgcggccgccaaccctcaacagcctgatggtgcacccatctaatttcaacctttgcatcatgatgctgggattgaagtggacgttaagcttgaggtacatagtcatttattctcagccatatcataccatcaaagttttgtttgatgtctgaagtgttaatggaatgacaacgtccatactgtcatactggaaaagcgggtccttcaactgcaaaatgctgatggctttctgaggttaaaaatcggggtttaaaatgatagctctccttgacatctatgtacactaaaattgactaggataagaactgatcatgactgttggatattgagatcatgttgtgggttctaacagagtagtgcttgtaagtaacgacggttgttcaagaaaacgtatactccctccgtcccataatataagggattttattttttttttcttgcactgtttgaccattcgtcttattaaaaaaattgtgcaaatataaaaaaaacaaaaagttttgtttaaagtactttggataataaagtaagtcacaaataaaataaataataattctattttttaaaaaaaataagacgaatggtcaaacagtgtaagaaaaaaattaaaatcccttatattatgggacggagggagtatttaaaaaggctatctttcttggcttttgcatatgggatgcatttctgttgacggggcatgcactgcaatcagtccggctctcaacttttcatggtcaacaacctgacgacacaattgtgtgactagagaagcgtgttagtgggtagaagttcaaattttaccc

SEQ ID NO: 3152 - DNA, 5014 bp, Oryza sativa
cttcttatgaggacctaagcacaagtaggtggtattgccaatctcccaactgttggcgcgttcttcttctcctcctcttctttagcttcctctgctaggttgaggacatgtatgtagtcgtcgaagcattcgtctattgttctgaagggaatatcagggtaaaggcttgagatttcaatgtctctaggcccgtctatgtagaaatgtgtctggcaaccgtttataaaaatgtcatgcgtcagtgaagcgactatgctctccgggatgatgtcatctgcagtcaaaatgatgaatagatcatacaccatgacaaaattccatttagagcgcgagagtattcttttaggtggccaaacctgcagccatggcgatcaagtcctcctcggtaagcgtcacgcgtggcagtgtccggccgatcttgctctcccacagcgacgccatctcgttcgtgctgaggagattgcaggcgggacggaagtgcacgatcttgttgatgctccgggcgtcgtaggcagccctgatggtgaacttaccaatgtcgcttccagccacgaagaaagctgcacgcgcgcgcatgcagcacaccgttggcaaaatcgcatcgaaggtgaatttcatcatgcggcgcaagcatgagcgtgtactacgtacctctgacgtcgccgtcgccgtagatctggaagcggtcgagcggcggcggcagctcggacgggtgcgtgctgtcgtggtagggccagccggcgatggagttgcagcagatgaaggtgtacggcacgcccgacgcctccgccgcccgccgcaccagccgcttctcctcgtagaacctcagccccgcccccaccggccgcgccctgtccacgtcgtgcccgaactccgacggcagaaacctctgcacccacgcacacgcaccgcgcagaccaaactttacgtgccaaaaatccgagttgtgcgacgcgcgcatgcacgcgctcgtatgtaaaatgtgtagtgtacgtactttgaccgtgcctgcagctcggatggcctcgatgaggccgagctggtcgaggatgctggcgccgcccatcaccgagatcaccacctcgacgccgcgcgcgcggagcgccgcctccacggacttcctcccctccttccccccgacgcagccctgtcacgagcacacacgccatgaatccaaatatgtgttcatttccgcgcgcttaactaagttggttaattttaaactctaatcacctcgatgacgacggcgcctttctggcggagcgcgtcgacggaggcggcgcgcgcggggcaggcgttcccggggcggacgaggatgaaggtgtcgcggccgctgtcgaggcaggcctcggcgacgaaacggccgatgtagccggtggcgcccacgatgagggccgcgccggtgcggcgaggctgcggcacttcttgcagcagcagctcctgagcagcaggcgccatggatcgatcgatcgaccgatgggttcttgctggctaacacccagagctgaaagctgatcgagtgcttggtagatctagcagcgcccggccgtcttcgacacacacgcaatgagtgtggcagtgtggctatgtatggcttttgtaccgtgccagaaagtgtggaggcaggagagaacagtaggtaaacacatggccgccttcgtgcgacgtacgggtgatagacggccaaaactcaagagttaggtggtgaataatcccagattttcctggatgatatctacctagctaggacggcgcaccagcagcgaggcgttaatcaagggcccccgttgtatgcataaaaatgcctctacagaatgaaatgcgccttaaatccaacaaaatttccactccagatacagaaacatgtctcgtgctctgcctccgccaccgctttcctctgttcttcgtgtctctcgctggtcgtcttctcgtctcatctcatctgcccccaactgatatgggccggaaatttgttgagatctcagtgcggtctgggccagtggctatctcgtacgggccgcgatctgggcctcatgtgattagcacacggcgtttaccaccactcctgagcatcgcagttgcgttgctctctcccctctgatctttctctatggaataattgtctaggcatctgtcgtatgatttttaagaaaaaatcactcagatttttttctccccttatatttgcatccaaccataaaaataaagtacagagaaaccgttcaggtagcttgtgattgtattggttactagagtagtatttagtagagattaacacaaatgttgcatttataactaaaattacagtgccttataactaaaattacatttgtaaaaaagtagatatggtatgtaagtacactgtaattttagtacaaatgcactgtaaattttggtaactataatatttatcgttttagtacaaatgcactgcttgagaaaccgtccaggtatctaaagtgttaaatgttgcatttataactaaaattacagtgctttacaactaaaattacatttgtaaaaacagtagatatgacatgtaagtgcactataattttagtacaaatacaccgtaaattttggtaactataatatttgtcgttttagtacaaatgcactccttgaaaaaccgttcagatgtctaaagtgttaaatgttgcatttataactaaaattacagtgctttataactaaaattatatttgtaaaaacaatagatatggcatataagtgcaatgtaattttaatacaaatgtgctgtaaattaaatcatggtgttcatattttggcccgtgctcatcagtttgtttgtattattcattgtgtgcccggtaaagatactgctaggtggtgtcgtggtggtagggggataaatcacgaccgtcaaattaaaccatgcccaagtgatccgacgaaagcaaattcggtgatttgacgcaaaaaatctgtcgtgagacgtatagcaaaatcgttctctatctttgcagtaaaagcgctcggttaatgggtagtagtattttggcttatcggtgacttgacgggcgcgttacgtcagtggaggatatataaggccgcacaatccgcgccgccatcagttcgctctcgccaccaacaccaccgccatttccactcgctcgagagcaccagattagcggaggagataggggtccgcgactcgcgagggagaggaaagcaagcggagttgaggatgcagatcttcgtgaagacgctgacggggaagaccatcaccctcgaggtggagaacagcgacgccgtcgccaacgtcaaggccaagatccaggacaaggaaggtaaccctgctctcttactgctcgtgttgcgagtttgagactgcggttgcatatcgatctctctgcccccatctgcttgttgcatttgcccgatcagatcagtagcaaagaattcgtggatttgggttggtcggtgactggggtttttggctgactaattgtttctgtgcttgtaggtatcccgccggaccagcagcgcctcatcttcgccgggaagcagctggaggatggccgcacgctggccgactacaacatccagaaggagtccacgcttcacctggtgcttcgcctacgcggcggccacatctggatcgagccctcgctcagggtcctcgcctacaagcacaacatcaacaagatggtctgcaggaagtaatactactcgcgcaccgctcccttcttagttcttacatcgatctatcgcaacctgagatgttgttgagttggtcgtgcttgcttagatgagttttgttagcgatgaacagttcagtattttagttggatgcattctattacgagtcagctatgatcaatgtgagcaccttgtcgatgtctcaccaatccaccatactggatcgttttaatttcagtttttttttctaacagcaggggcactaggccactggcaccacaaaggcacaaagtcctctctcactgtgatatactgttgccgtcaggtttatgtttattcacgtcatgtagttagttggatcgatataaggttgataggcaatgcaagcaggaaggttcaattgcgaaccagccagatcggcacacatatacattctgtttcgggtgtgtcagtttagtcatcaatacttttgaaagaatttacaaattgtaccatgctgcaagtcgtttgattactttgttcactctttgccctttctatggcttggtgagagctgtgctgttactcgtttacgttattgggacggttgtttggtagaaaaaatgatcgatcgatccgatgcgcaagataagctgtgtttcaaaatctctcaatgtgcatacatatagtctccctagtcctttatatttggtcagctataaggcaatttggtcgagaattttgtgcttgcaaggtttattgcacaatttgtctttttttgttcacccctttgtcttgcaggtgctatgcaactctgcctcccagggctacaaactgccgcaagaagaagtgtggccacagcaatcaggtgagccttatcaccataaaccatgttttcagtcttagtgatcatgtcctaatatgacttttggagttatgatgcatgtttcattgtttgcaaatggtacttagtagttcttagcgatcttgtcccaatatgatttgatgcctgtttccttcttgtcaaatatgagtagttaacataatggagtttgatgttccagttttggttctgtggtatatgcatcctatatatttctggtgtaccgtgtgctgttaccgtatctaaatcgtttgcatatgctgacaatatgaaacaatgagatgtttcagattttgtcagcttctaagcaatgacatcctcagatgaatatttctccccattgttctgattatgtacttttccaatccattctttttcagctgaggccaaagaaggtgaggtggtgcaggtacttcaacttctgaagagtcatctcatccatcattccatcagtatcatcagagtcaccagcgttcaagcgttatcaaa

SEQ ID NO: 3153 - DNA, 1912 bp, Oryza sativa
cagtttccaccaccaccgccgtcttcctcaagccgtcaaacacacgattagggcatcaacagggagagcaaaagaggaggtagctcaggcagaggtagaaagtagaatagggaggagagatgcggatctacgtgaagacgctcaaagggagaataatctccctcgaggttgcgaggagcgacaccatcgccagtgtcaagcacaagatctacgccgagcgaggtaagacctctcttagtgcaagctatgaggcccgtacttctagtcaaaaagttagcccaaagacacctagcctacagggcaagcaccgatatatgtgtggattaattggatagagacacaggtaaggaaatgaagcccacagtgggcgtgacctagcccaccaaatccacaacttaattccccaactacccctctctctgtgttcggccgtctctttttcttctcccggtgcgcaccgcatcccctcccgcatctcgcttgcatcgccaccgcttgactcccctcctccctccaccgacggccggcgccggatctccttcctccgccgccagcgccggctctgcttctcatctcctccctccggcgccgcagctgtggttgccggctcgcgcggcgaccggcagctgtggatggcaggaatccatccgagagatcagcgtttcgtcttcaacgcgaggcagttggacgacaaccaaagcttggccgattgcaacattacccataattccacgatacacttcgtattcggcattccctgcttttacgctaccccggtgcggattttatgattttcatatacctagaactttcgatctgattccgatttagaatcgtgattttaacaaccttgctacagactaaagaaagtttataaacgtgctgacattacatgcttatatatagttagataaaaatgtgttccctaaatattactccctccgtttcaggttacaagacgttttgactttggttaaaatcaaactagttcaagtttaactaaatttatagataaatatagtaatattataataccaaattagttttattaaatcaataattgaatgtattttcgtaataaatttatcctaggttgaaaatttgttatttttttctattttgggagtacaaggtatttttttcatattacagttgggctcagaaagacttatttttccccgttgagatcgtattgaagtgaatgtgactgctccctttattgtcaaccgtatgaagacttttggctcgtggtgacctttactctactctcttccaggcatacgaacagttcaaccgccttccccggtcagagagctcggattcgagttcgacgagcaaaggagacaggtcggattcgagttcgacgagcaaaagagacatcgccccggcaaatgtcaaaacagtgcactgcccagattgccaggtccaagctaacgtgtactactgcaacaccaaggaggataacgaaggctgtgtgttctacaggtgcccttatttctcggtgagtgactttcctattgttttgctcatgcttatgtttataattaaaccaaatttaaaattaaattagagttgattatatggttgttcaccacaaattattctacagtatttgattttggatcgccaaggacaaaagttttactcgtaaattatttttaaattgctaataaaatgattcacatgtatataataagcataagctaaacagattttggatcgctaaggaaaaaaagttttactcgtaaattatttttaaattgctaataaaatgattcacatgtatataataagcataagcgaaacaataaagtcattcccccgatctatttctgctagtttggaactttggattcctcccgttcttcatcttgacatttttttttccttgtagatacacacaggctggtgg

SEQ ID NO: 3154 - DNA, 529 bp, Oryza sativa
actatcatttgaccgaacatcaagacatgcaatgacctggaaattttaaggcaataagaagggcgagaatggaagttgcattgacgctaaaacatttggcgatacaaagcttactctctttgcaaggttcgatgctttcctacgagatgggacctgtgttataaatgcaagtatgaacttttacatcgaagaagttaatgaaaaggaactagcaacaataagcatacatatagcagctacctttgatcctgaagtgtttggactgagaaaatttttcaaaattgaaagcccagtagctgcagtaaaacaataatgggtatgcttagaaaaatctgaagtatctatatattctgcattattaagtattaacagaccttggtgatcaagaccagtcaagttatcagaactcaagaatctacatgtttcaatcctgtcttaaaatacattgtacatacttggctatggcatatcataacacattcaatatcaaactgcattttacctccgctcttttctgggtgaaactgaa

SEQ ID NO: 3155 - DNA, 556 bp, Oryza sativa
acccctgcagtaggagagacacaggcaaaacagagtgatcagtcagctgcaaatcagcaagcagagcctgcagaaacagagctttgacatgcacaagtagagtaggcggtgaactcacttgccccaccaaagctcctgcgcggaggcctcatccttgacgatgcgcttgtccctcggcgaccggccggtcttggcgccggacagcgtcgccagcgcgccggtggacgtgatgaacgaccccttctcgtacttgatcgcctgctcgtacagctctgctcgcccacatcccaccagaaaacacgtcacttacacatgtcacgagttataatccctgaacaaaaattacagccgttctggcgtcgcgtcgcgtaccagcaggcgagaggttgtagagcacatgggtgaacttgagggagctgtcgctgacggcgatggtcggggtgacgtgcgggtggtggtggtgcaccggctgcgggtgcggcgacggcgcgcccttcgccgcggcctcgcccttcctagccggatctcccctgacgaccttcgggccggtctcacg

SEQ ID NO: 3156 - DNA, 581 bp, Oryza sativa
aaacataaggtccaatttattgaatagtgcatcatatagaagattagcacttaattgttaataccattgaagttcttgtaatggaaaagtaagcggaaatctaaaaatatgaacaattatccgtttttcaatttgatacattagatcagacagaaaatgtccataatgtggtacactacatgagaaatagtgcattttcttagtactaccacatttctgtaaacattacagctaacttcatgagaaatataaagcagaactggagcattagctaagattcatggggaaaagagacaagtaggttcaccctaaactcttttgcaccagtattaagcatggttgcaatgcaagtttccatcccatggctatgaatgacagccccagctctcatcaaataagcctgcaaaataccaatgaaaattagacagtttagaacacactaaccgaatgtgcgctctttctcttttggcaaccatgattggacaatcaataaatgagaattctataaaagctcctaatcaacaccactcccgaatacggtatgctcgatcctaacagaagacacgagagtagccactgct

SEQ ID NO: 3157 - DNA, 548 bp, Oryza sativa
ctcggtaccctgtaatggaatgattttcattgagcaggcagaaactacagaagaactcaatgaatggagaagtgcactagagaatgctctggcacaggcacctgttgtagcaaatactgttggccaaaatccaattttcagcactgacatagcagagcctgctgaagctccagctgaacagtgtaagttaagataactttcatcagttgcccacgatctaaagtactagattcagctagggggttgggaccctacattctacttgaacaggcaaatcctatcgtttccattgcagcggacaataaatctatcattggcagacctgcagagtttgcccttgtagatgctgatggtagtccaactttcctggagaaggccttaaagttcattgaagattatggtgagtgttttttttttcaaattttaatttcatgctatcctggtgaatatcagtaacagtcaaatagaagtatgatatttatctaaaacacaataactcattgtatgtatatttattaatctgtagtttagtgacgagcagaaacata

SEQ ID NO: 3158 - DNA, 604 bp, Oryza sativa
tgcataatgttttcatttcaagttctttatatgcatatctttagggggagcttcacacttctctcatcattcaaaatttaaattctattatctttttgtgtgctttaaccatgttgtcatcaatcaccaaaaagggggagattgaagatgcacttaaaccccctagtgggttttggtgattaatgacaaggtggttaaagaggactaacatgtttatcaagtttattcataggagtttagtcccaaagcgagttgtgatggctaagaatgcaaggagaccccccaatttgaatgttcctaagtgcaaaaaacaccgaaggtgattagactaggtttttcactttcgaaattgagtttagaaaaaaaaccgtactattaagaggggtttcaagtgtggttctagggtatacaaagtgagtcaaaatatttttggaatcatttttgaaaaatgattttctcctcgggacagagagggctacccggaggttcttgccggaacttcccggtgccggttatttcaaaaagtttcctaagtactgccaggaagttcctgcacttttgcccaggaacctcctgcaagtttccagttaaacttggagtaacg

SEQ ID NO: 3159 - DNA, 1130 bp, Oryza sativa
cgcaagctagagagggcgagtgagaacgagtaaggagaatgaagggagtcacttccgagtcgggtcggcacggtcacgagtggccgacggtgcgggagtgagttctccgttctcagcccgggacagggaaacaaggggggtgctcggagtcccgtgtcacacgtcctcgcacgcaccggcctccccagtgcttgtcgacgcccgacggcggcgagatcgtagcgagcaccaacaatagcgcggcggtgatggaagtgaaacgagaagaggattcgatgggacgggctcgggttttataggtggccgggtaaggagcttcgaggggaagaacccgactcggaagagccggtcaaggagaggagctggcggtcacgcccgtggtccagcggccggcaggcggtcacgggcggtgtcgggcaaaatggaaaaaggagggggaaaagggagctctgttcttgccgaaacggggaatgggagagggagaggagagcgcgtgaggcagagagacgcgctgcctccacgtcttggacgcacgcgcgcacagggtgggggcgagcggcaggccggcatgggcggctgcgcggcgcaggcggccagggctgacgcggcgacgaccgggcggtctgccacgcgcgggcgagagcgtgcgcgacgcgagggcgcggcggaattcagaggcggcggcgggaatcggcgccgggaggggagtgagcagagagagagagcgaagatgggagagagaaagaacgagagagcgagagagctctctctcggttcggctcggcgcgtgcaacgcacgtgcgaggctgagggaggagaaacggctgagagagggaggtgggctaatgtcacgcccagaaattcccggatggaatcccaagcagaatgtgcattaaaatccccgtccaggaccatccggggtacacaatcgacaatgttgacatacagatccacgtcttacatacattataaagtctcacagaaatgcagcggaaaaacaaaagaaactggagctaagccttgacttgaacggcagcgggaacaccactccacaggcatcctcgacggcacggacgaagcctactcctcggagaacaagccatcggacacatactcgagctctgaggttg

SEQ ID NO: 3160 - DNA, 4183 bp, Oryza sativa
ggcacggcaagctcggcgccctgaccccgctcgacgtcaagggcgccatcctgatccagcccttctttggcggcgagacccgcaccgcctccgagaagacgatgccccagccaccaggctcggcgctgacgctctcgacctcggacacctactggcgcatgtcgctccccgccggcgccacacgcgaccacccgtggtgcaaccccgtcaccgggcgtggcgcgccgcggctcgactccctgccgctcccggacttcctcgtgtgcatctccgagcaggacatcctccgcgaccgcaacctggagctctgcagcgcgctgcgcagggccgaccatagcgtggagcaggccacgtacggcggcgtcgggcacgcgttccaggtgctcaacaactaccacctctcgcagccgcggacgcaggagatgctcgcccacatcaaggctttcgtcagagccagatagccccagccagtggctaagcttagctgacactcgccgtgtcacgctaattaatccatcctaatccatccaaccatccaaccagtttctgctgcagcagatgatgagtaggtgtcgtgtaagctgtaaattaattacttttgtagtacgtgtcactcaagacaagcgttgtccatcccaatacccaacttggatcgtcgtagcggtgtcggaaagcaaaagcgtagcacataaaaacgacactgccgctatgccacgatgttgttgctccgtgtatcattcatgttcatcaatatacttaaaaagcaagttgtggatactgttttcaaatcgggttgccgtcctcgacgacactgatggtgttgcatcaaggaaaccggaaaagtttccaagagcaaataattgtctgattgtctgctgctttctgggctttgcatcaggcatcatcaagtgaatagaagaactgatagtcgtagtagtatcctctatctcagaatatagcaacctaaaatcagatggaacgtattctaatactataaatctcgttttgtccgattctaaatttctataatctggaacggaggtaataatattttttcctctcttttccccgctttgggaaggttcaggctagatggagcccagcgaatttggcccggcaattccttctctaacaagcacgaatcatcatcgccatcatcgtccatcggctacgattagcgtcaggtcattagggcagaccggcagaatggaatctttggtctcttcccaatgcaatgctgctgctagctcccatggccatgattgagagatgccttgtgcactgaagccaccacatgattcgctcaatgctgcagcaaagtcgcaaaaagctctagtgctgctgctacaagtgcatcagacaaactgttcgatcgttggatgcatcatcagctcgttcctgctgttagagtttgtgtcgaatatacagctcgctgcgctcgtgctcaaggttttacctccagtacaacattctctgcggcttgtaagattggatcgcacgcagaattccgcattcttatcattagctcaccaaccccatcatagctgcagctgaatgcgtgcaagcaggccaacatcatgtgtgatcatgccggtttctgataaccacggtagtagtaaatggctaggattagttagttgcttctactgacacaccaatgagaccatggttggttgcagaagtaatactatcttattttttcttttccttcgccggggtggcgtgaagagccagccgagatttattaagagaactatcttattttttcttatattttaggacttcgatcagactcttgtttgatttagtcagaatgaaaaacgtcaaatgcattcaggattagtacgtaactagggacctgaaaatgcgtactcctaagttgtttcaaaaagcaagtatgaaactgtaagatgtgaagggtaaccaactattagtctgaaagtggatttggtagaaacttcagagactgtcctctaaccgacaaatgccattgctcatggtagactgttctctaaccaacaaaatgcagaattttcttctcatgtttgacaagaaaaatgaatcgacaagtagcttagagcgcctctctatcaaactttcttccgaagtggcactaaaagctcgcggcatttccttcagaatctgccgcggaacgcctttacaacagtagccgcggcattgcggttttcggcagatcaaaatcagcatggcaccgatgtgatcatgatccgatatggcggatattagagatcgacatgtaccctacccgagaatctcaatctatccccgtagatctcttgagaatccctgacttcatcctctcttttgccaagcttctcagcacattcagagcaccgccggccgtttcgtctcccacttgtttctctcacaagatatcacgatcaaaccaccgcgaaaaaaattaaaactttattcctgaataacgatattctcaaaatctttagctgatgtaaccacacgggccttgcaagtctgcatgatgcattgacctcatgcttgcccgcgcgtgcgtgagggagatgtttgccccaatatgtcaaaccgacctgcaagcgatgtcaaactgagatgccgcggtgcaatttatccgttgtttcttttgtaaaaaggcagccgtggtattcgataaattgccaatctgatctttgcgctcctgattcatgcatgagttgcgctgaacgaatataaagattttgctttggtacttcgtactgcacatgtgtttgaagatgcatgcaccgatcagtgcagcctgttctggaagaatccgaatagctaaagagcaagagcatggaagatgtcaaataagcagctgattctgagttgtgaaatgtgtgtagcattgaaacatttttttttttggaaaagagcagcattgaaacatatgtaactcatttatataacacaaggacgtaaagcttgtagaggtcggggatgtaatcatcttccttataaagaaaataacatatggctgtcattatctgttaattttagctaacagcgcattaacactgacataacaatggtcttaacactaacataacaatgctacactggtgagaatctggtaataggaatgatcatggatatctatctatggagatatgcacacttaaaagtggtagaaacaatcaagcacgccgtgcaatagcagtatggaatcattcataagaaaacgactgatctagactctagagcacatgagacttacatggtcaaaaaccacaggaagatatactggatagccaagaacaacgtgttggtaagctagagagacagtgccgctagaaagatggaagacaacgaaaagtcggtgcatcgtccagaattcgttccaaatggtataagatgcatcatgatgaagctgcaaagcgaggcacgggcaaaagcggctggagatgcaactcgagaggaatctcgcatttgccggatgctaacttgacagggaagcatcaggcgctctccttttagcttggaggcgcccgagcgagtggctgactaaaccagatagatgcctcctttgactatggctggaatgacaatgtccatgtcctctgctacggacggatggatggatagattgcaattgcattatggcacacaagtaggagcttcgctttttggaggtcactgattgagaggaacaatccttattccaaagaactagcttgcttgcattgcattggatattccagggttctttttcttactgttctggtgtgcatatatatcttcttcagaccttcagggacgtactgtagtgtagtttgtgcggtgaaaagtctgaaatatcaagagcttttcatgcactgcaagtggcatttgactgcagttttcactatatctcagtcatatcctgccaagaaaggaagctatcctgagtgggaggtcatagagactcctctggtttttgtggaggttgtgtgaaaattctagtaagctatgaatgtaaggaaacaaacactttcaggtggggaatatgtggacacgatgatcacacttacgaagcactagacgacttttaaggtcccattttcccagtgctatgctgcaatgtccaacttgagcaaggaaactggtttctgaaatggtacagcactagttcgtagtgataatgcagcatttctaagagtacaaaaacatttgggaatggctgagtccc

SEQ ID NO: 3161 - DNA, 539 bp, Oryza sativa
tcggcgctggaggccgccggctgggtgttcgtggcggccgacgccgtctacctcgtcggctgggtcgccatcgagggcggcgccgtcgccgtgctggcgtacagcctcgtcgccggcctcgtcttcctcagcgtcttcggcaaggtctacagattcttggcatggttggagacgagacaatctcaatggaaatcaagcctctgccatagcgctgtatgatactactactcgtcagaaaaaaaaaatctgtaaaaagaaaaaggaaaccatttcttagctcaccttttgttcatttgtacaatgattcacacaatgagaaaaccacagttgtaatttttttttcatgcttatatataagttctctgaaacaaatttgttcaattcttggacaagttttctgaagccattctgaactttttctgatgaatcttcagagtttcttttccatttttcgatagggtgtttgagagcagcttcctgattatagcacacattagatattcagcttcgaattaggcacgtgtactacacttttgggg

SEQ ID NO: 3162 - DNA, 515 bp, Oryza sativa
tcggtgacgaactgcggggccggggcgcgcgcggagtactcgccgtcgtcggatgcggcggcggcggcggcggtggcggcggggcgggaggccggcctgggcggccgggccttggaggggatggagaaggacagcttcttctcctccatggcggctgcgcgatttggggaaagcaaagcgagggggagatcgagagagagaagggacacgaggaaatcgagcgcgtgtgcacgacggcgaagagaagtctcccgtggacttgttgtcttattcggagtcggtggccgcagcccgcatcggatcaagttgggccgggcccattaacctcttgggcgggcttattctttttttggaaaaagtacaccgaaggtccctcaacttgtcatcgagttacaaaatcgtactctaaccgcaaaaccggatatatgacatcccttaactcacaaaatcgttcactttaggtcctttggtggttttgaacccaggtttgtccgacatggcgactgagtcagcgt

SEQ ID NO: 3163 - DNA, 614 bp, Oryza sativa
atgtgaaggacacggttgttttgaaatcggttccattccctttttcagccatttcaacctgcacctacacctgtcccacctctggctggctggatgtcaaaccctccagcagtaacacatcctgctgtgtctggtggagctattggatttggtactcctacaaatcctggtacctgttctaattactgttacaaactattattaagtggtctaaatggaaacagcacacatagtctgttgattcatggcattcttcttttaaatcttgtagctgctatattaaaacatcctagaacaccaacaactgccaatccttctatggattatccatcaggagattctgatcacgtctccaagagaacgagaccagttgggatgtctgaggaggtatttgtcacatctctttgaaatacattttgctatttctagtgtacgctgacactttataataccattgcattttgcctaatcattattgacatatatacttgattgtaactataatgatctaattttgcaggtgaatcttccagtgaatatgttacctgtgacatatccacagagtcatagttacccgcaagatgattttcataaaaatgttgcacggacattga

SEQ ID NO: 3164 - DNA, 540 bp, Oryza sativa
gttagattaagatggaaatttccttactcatttcatttgaaccaatcaccatttaccaaagtatctacagataaaggaaaacactcacaggaagaccaccatcggcatcaatggtagtcagaagacttgtgttgtccatgtcccatatcttaatcaagaattcatctccagcagccaaaaacctgttccgtgtggtatcaaattggacaacacccatcgatcgcttgcgaaatccctggtaagttctcttgacagctccttcactttcattccattccactagatgtgattcgccatccttgctagtcccacaagaaaataacctactcacaagggcaaaaagaatcagtgaaaacaaagacaaaaacccagttacccacatgaatcatgctaacaaagaaataattatgaaccttgaaccatctgcactatatgccattgttgtgcaccaatgtcctggcgcatcatagtcaactctggatcccaaattatcatatagccaagcctttatctttccatccaaagcagttgagaagatga

SEQ ID NO: 3165 - DNA, 595 bp, Oryza sativa
ttaactatatatcaaagtacctttgatttcattcaaaatggaggcttcctgaggaactggttcatcgtggaatcttaagccatgtgaaaaataggagaggcaggggttggataaaaactgaaatggaagaaagtggtaaaaagaccactgaaggcatggagtgcatccaaagatttgggtttggataggagtacgaggaagttggcgatccaacatccaagtgccagaactacataagaatttacataattctttcaccggtatcattcctagtagtattaggaatatgtggaagttagagatccaacattttggttctcctggctatacttgggtttcacctctagtccacccagcttcctgggactaaagattgtagtacttgttgttgagctaagtgcctaagtcaaaagaattaacaattaatgcagaaaacttactcttttggttcaaatataagttctttgaaaacagcatatccagccactgctgcaattccaagtcccgcaactattacaagactgtaggaagccccttcagcaaatgtcactggcttctcaggtatgttgtacgtaggggaatcaaatggatcttc

SEQ ID NO: 3166 - DNA, 677 bp, Oryza sativa
attcatggcataactttcagtcacatcctgtttcaaatttgttctccaaggcgtgagaggagcacaccaatagttcctccaatggcaagctgtgttgaataccagaagtttttgtttgtcatcttcatcagaggatgaatagtgaagaattaaatatgaatatgtctttatattttgaagtcatttttatacacaaagtatccatattagcttttgatttcaaattacggttttaacttgatttctaaaatttcattctttcattcaaacaagctgaatttcctacgcgattgtgcagggctagtttatagtttatggcaagtaatatcgcatgtgttatccagtttgtgcatttatttcaaaatgcagctaatacagcataaaagaatcattaccatttggagattcctcttaagaccaacacctttctggaacaactttgccacttgataaatagcttttggttgcccagcattaactgctcgaagaaagaaattgcatgctgtcatcacatccctctttactccaatacccttgagatacaagacgccaaggttataataacccccatgttccttatgctcagctgcaatttcaaaaaattcctttgcctacaaaatgagttagaaaaacattaagttgcctaaaccattacaaggtgcggaacacaggttttt

SEQ ID NO: 3167 - DNA, 1463 bp, Oryza sativa
cagcccgagattacaaccgacgacacggacgagacaacaccaacaacggtagcagcagcggaaacaacggactaacatctaacaccacaggcgacggctgggaactaggacgaaaccctaatctttgcttcaacttcatattcagagctagcagaactatatttatatagagagcaagggtgagtacttacgtattcagcaagccaggggaacttaggtggttaatgcaagcttcaagggtaggctgttatttttcaatcagttttatttgcaagttttcaacaatctaagtgtgtgctttccacaaccagagcgagacaggtctcagctcggtcgggggtgggaagtgaacaatattatttatcaagattgcacaactcccaaagttggcctcaaagctagtttcccaaaccaaaccaattttccaaactttcagagttttggttgtctccaaacaaccagtcacttttagggactccctgtcccgctgtctccctgatagccacttgcctttccaaacatcaggtttcccaaaccacatcactttttcataaaacagggggaaaataaaaactacgctaaggaatcacctcacatccgcccatgaccgtgggcacggccgttcgaacagtttgttaacctctgcagagggggtacactttacccacacgacattactaacccggatcacccagcctgtggggatcagccacgtcgggagacttccaagctttcatgacaaggcatttctaaagccgacacaggtttaccatatgccgacgagagggatcccagaccaacaacaggttaggtcccagaccatattgtgccaggaagcccaggggtcctccccgacaccaccccggcgaatccacttgtctctcggcatcaaggctcccctgattagctaattactcagccaggggtgtcccattccacccatgtggttgcactatcatatgctcggatgtaattccgaaggaatcggtccttaaaagcgaccgcacaagcatcccgcccaggaatggccttgtgtcgcaagttttatttttaaagctcattttctttcacaaggcaccgacccaggcgtcgggttttccaatcgttttgtaaaccaagttttacccaagatgtctaccatattttaagtttgaaggcgaccgtcgatactcacacagagtgcatgaataccgaggcgtgaccaggtggttacaaggaaacatgatataacaatttaacaatggaaggattaaatgcaacaagttaggtatgcccaccgatctgcctcgcagacggggcaaacatattatgtgcaatcctatcaatgcataatattttgcaagcaatataattaagttcaaatataggctcaagatgttcaaaggtggcttgccttgctcagagtcttcacggagcttcccgaatcttcgagatatccacgatcgaccgaaaatccgcaaccg

SEQ ID NO: 3168 - DNA, 1892 bp, Oryza sativa
cgcccggcgtcccgctcgcgcgccttcctgcttcacaaattcgccgccgacgcaggagacctccagtctagatggctctcgcctactccttcttccgccaggaggtgagatgattcgatactttgctagttcctcctgcaatttgcgcgtctaatgaggattccgtgatgtagtaatttatgtgaggttattagctcgctttcattgggctggggagggattgtccttgaagccctattttagtattcatccacagtagaaatctctgaattttttgttccagtagggtttccccccggatttgggacatttttcccctagttgttggttaagcaaccaattccccattctttacccagtttatccagcacaattttacaatttttagttttaccagcgactttttagcatactgtgtatggacatgtgattgtgtttaactgaatgaatttctctatcatctctggaggatatacagtgtgcagggccaacagtgtttatttggtgctaatgcattcctttgaggttgtaacaacacgtgcccttttggcagtccaactaaaaaacttggaagttggagagtgtattataaacattttgattttcttcaacttttctaaacatgatgtcttatgcaattcaccttaccctccaatgccctgatccatgttacacttatgtatctgccaatcatttacattctggagcaaaaatagttttactgatccagtaagaattttcatttcacgtctttattcttgctataagaatcaagcatctgttttactgttctttatcttcttgagaaaagacagtggttttaattccatgaaacgaaggtccatgtgtagtccttttttactttctctttgaaaaaaatatggaattaatatctgttcatatagcttcttgttgagttttattatgtcttttgttcacttgcatcaaccaagcatgattggagcatcattgtaggttgaaaacatgcaagtttctcagttttgtttgaatttgtgtcctaaaacctcatggtttgattgaatttgacccgagtatgtgtattggtgctctattacatatatcatctttccatcgtttataccacgttaaatttcttgtacacagaaataaatggtttaaacctatttatttccttctgttcagattacagaggaaactatttctttttgttagctgaaaaatttgctcttgcagatgtatgaagaagcagtcacactttatgctgaacttgcagaggctgcgcttacaagctctttgatctcgaaggagcctccagtgattgaaccagtcaggttacacagtgggaccgaagaaaacaaggaagccttgaggaagtctcgaggcgaggatgatgaagattttcaaatcacagagtaccaggcacaacgaggcaatactgttgcaatgcacaaattagggcttctgtattactatggcctacgaggagttagacgtgattatgggaaagcatatcattggttttcaaaggctgtggagaaaggcgatacacgggcaatggagcttctcggagagatctatgctagaggtgctggagttgaaaggaactacactgaagcatacaagtggttgacacttgcagcaaagcagcaacaatactcagctacaatggactgggttatctctatgtcaaaggttatggggttgagaagaaaaacttgacaaaagtaagtatcatgtattagagttttgaaatttagttgcatgtttgtattgggcttacagcctagaaaatagaatcttgaattgcattccattgttagacgatagaatcttgaattgcatttcattgttacaactcactatatccactgctatcgttgtttctagtcagggaaatctgtaggccacta

SEQ ID NO: 3169 - DNA, 2412 bp, Oryza sativa
ttctcaacaatttttgcagtgttccaactagtagtagatgatgctgtgatagaattgtgagtgagaatcattaattgtgctccagttgataacttgatatactagtacgtaccatctatctccagatgaagcaaatcacaaagacacaacctgatcaagcataattgagatggaaaccaaacaaggtagcgcctatagaaactttcgctggttttttggtggaaacactttcaaatgaaatagcaacatttgctgaatcacagctgatcacatccatcaagactgtaaacttcactgaagaaaaccatataaacagcaacaaattcttgatctcgggttgcttcaccaccacatcacagctttggcttttcttgggagggagggaaaaaaaattattttcttgaatgggtcaagtaaccatttccaactttccttggactctagcctacttcagtaaccttttcaacttttggggatatattcccgttgtggttggttccccgggccttccggtccacttctattcgccatttcggtggtacaacccttccaccatattatctgtggccttgtgattggatccaggtggcggggttcgccttttccgcccctataaaacgctcctcgcgttccccctgtctccccacagcgatctcttcgaacgaacacacagggtagcgctcgcgtagtcgcgtactccccggcatgctcctcacacagacgcgatggcccagggaagaggcagtgcagcgcaggggctcgccctcggcttgctcctcgtgtgcctcctcgtcggctcagacgtcgccgccgccgccacctacaacgtcgactggtcgttcggcgcggacagctggtccaagggcaagaacttccgcgccggtgacgtccttggtgagtgatcgatcaaaaaaaccgtttcgttacttgattctactactatggcgcgcggcggcgtgctgcatgctgctgcttgggctaacttgtgtactgtgccgcgcagtgttcagctacgacccgtccgtgcacaacgtggtggcggtggacgccggcggctacagcggctgccgggagtccggcaccaagtacagctccgggaacgaccgcatcacgctcggccgcggcacgagctacttcatctgcagcttctccggccactgtggcgcagggatgaagatggccgtcaccgccagctgaagaggaagccaacgcagcacaaaagcagggccaggctgctgccgctctagcctgtagctatacatatttacatgtgtcgcccgaacagcaataataagaggcagcagccagcaccgcgtcatcgtgcaggttttgttgtcatagtgcgtcgcaaacaatatatacagccatatatgtgtgttatgtagggagagtggtaggtgaggcatgagtgatgtgtgcttgtatgtattatcagaagtcaggagttgattactagtaaagcacatcagcttgtttgtttgctctctacagcgcaagcagaatctgttgtctttgtcttttagttttgcctgattgatgatggttttcttcctctgggttttttatggcgtggcagaaatagttctacacatacactcccatttcctggtttctcatacgttccttttgtccgagttcattttctcctcgtcgcccaaccaaacattcctgataataattaagctgaaaaatatcataatacttgttaggaccagggatgaaaccggtcggaaactttcacataaatctgataatgtaatgcaattcgtaaagaaattctacacaccaccatatcttattttagaggaaaaatgatggttcaagtagttcattcaactagtgatgataaacgataatcaacctgaaaaaatgagtcagcccaaatcgagcaaaattaatggcccaagtgccaaaggccgtctctatggcccatatcaagtgctaaaggcccaaagcacatactgtcccaccaaccggcccattagaagcccaagatccccagccaatcaggtttcaggagacacgtcctaaaccgtgggacccacatacacgtcatgccaatgccactctcgacgagaaaattgcatatctaccattgcataagattggcttcgcagaaataccatcacttaaatcggcttcgctagaataccactcctaactagaacggcttcgccaaaatgccattttggacaaaaatgaccctggttcttctcccttcctccaatgccggaggagctcatcggcagccaccggtgccaccttgccggcgacgatgggggcgctgccatcctcgtcgtccccaccttttcatcctgcccgccgcgctaggaggaggccgtagccgacgccatcaacgttgatggggccgaactcatcggcgacgaaagcggagcggatgaactcaccggc

SEQ ID NO: 3170 - DNA, 2296 bp, Oryza sativa
gtgacttgatggtgaattctcgaggtctgggatgaagtaaatgactagtatgatgtcatttgtgtggtcagcatttaggcaaggtaatgcgatttggttaaaccatactgtattgtacgcttaattactaaggggaactaaagtcatctattatattattaacacagccttgaaaagaggcaccacattcgttgtgggagctagaaattcccacattaatcggagaaaaagaaaaagaaaaaggaaagaaaaatgagagtccaagtagaagtacaatttaaaaatagttgaaattcggaattaaaaataaacaatattaaaagaagtttccatataagaacccaatacgagattaatcaaaattcgaaataaaaataaaataaaatccaaaattagaaaaggaaaggagagtccaagtagaaatacaatttaaaaatagctgaaattcggaattaaaataaggaatattaaaataagtttcaatataagaacccaatacgagattaataaaaaatcgaaataaaaataaaataaaatccaaaattagaaaaggaaatgagagtccaagtaggaatacaatttaaaaatatctgaaattcggaattaaaaataagaaatattaaaagaataatccatatcagaacccaatacgagattaattaaaattcggaataaaaataaataaatctgaaattagcaaaagaaaataaaagaagagttcaagaaagaatacaatttaaaattagcaaaaattcggaattaaaaataagcaatattgaaagaacaattgtcacgccccgaactagccccgaacagaactagcccgtgacgctccaaattaacctgttaaccgataccagtcccaggaaacagtgctggtatcacaggaagacagattatcacagcaacataggtctctttattacagagtaggagtacagtcatgttgagctgcggacagatctcgagctcacaactgcattacaaaagggaacaacggaagccaagacttggaccaatcatcacaggcacgacttgggaactagaccgaaaccctaaaactcatcatagccgacttgctcctggaagaactcctcatcagcggcatccacttcatcttcttcagcaactgggggggagtattatttatatagagcaagggtgagtacaggagtactcagcaagccatgggaattaagtgtttaatgtaggtttcaaaggaaaggctgttgttttttcaattgattttatttaaacttctttttggaacatctaagtgagtgcttctcaaacgacacggataagacagtgcgtctcgtccggtcggagtatgtgtaatgtatcagtctttgaattgatcaaggttggcacccggccaacagctttcaaatggccacccgggcctagctgatcccatcagccacattttccaaacatcgatcccattccacaacagcaatttcacaaagtagtagtcaaacaaaactacgctaggaatcacctcacatctgcccatgaccgtgggcacggctgttcgaacagtttaataacctctgcagagggggtacactttacccacacgacattactaacccggatcacccagcctgtgcagaacggccacgtctggagaccttgaggctttcatgacaaggcatttcgaaagccgacacaggttcaccatatgccaacgagaggggtcccagaccaacaccaggataggtcccagaccatactgtgtcaggaaacccgggggttctccccggcaccaccccgttgaattcacatgtctcttagcatcatggctcccccgattagctaattactcagccaggggcatcccattacacccatgtggtcgcacttgtcttatgttcggatgaaattccaaggaaacggtccttagtgcaagagcgggaaaccgtactcccggtacgtccctcggtctgcgattttggaaattcatttagttcgcaagcaccgatccaggtgtcgggtttttccaagtcttttgtaaaacctcaagttttacccatcgttggatgttttaaatttgaggggaggtgttccgatgcccgtgcccgaaggcccatgcatcgaaacacaacagtcgacaaaggagttttaggtattcaataattcacggagggtaattgcaacaatttagggtttggggccggcaggctatctcgcaagccgcggccgaattacgtgtgttaaacctattcatgcaatatttgcggaaaagaaatacttaggtttaaattataggtgcgagatgttcaaaggtgacttg

SEQ ID NO: 3171 - DNA, 5286 bp, Oryza sativa
cgatccatccaacgacgcgcttcgtccgacgatcgtcgatccctcgcccaacggcgcggcggtgagcgtgacctacggtgcgtcgttgacgttgcagttcgcggttccgccggcgaggagagcgcgcggcggcggcggcggcggcggcatcgggctcgtgtcagtcacgatggtcgcgccgtcgttcacgacgcactcgttcgcgatgaaccagaggctgctactcctcgacgccgtgaagacggcggcgctggcacgggccagcacctaccagacatccgtggtgatgccggcgacggcggccttggcgccgccgggctactacatggtgttcgtggtgaatggccacatcccaagcgaagggatctgggtccacatacagtgacactgacagggggtatagctgcaagggcaagactgtagtacagtacgagtaccattttaatctgttgtcaccatacagttgatagtgtgacactgtgactgttaccgcttgcatgagacagtaagaaaaagaaaaaagataggagaatgtctgtaaaatcgggggctcttgaaaaggttcacgtgaaccgtgcgcacgtgatgtttcctcagacgcatctgctcttggcaactttggccgctgccgccacggcgctgcaaagcttcggttttttcttgccatgcgtgtgcgcgcggtgcgagtaggcggacaaaaaggcgtgcgagtaggctggtgtagtgcaacctgctcaggagagatccattcggttacgcagccatgttggggtgggattgggaacgccgtccgtgtgcgcgcctcgccggtggggcggcttcggtgcgtcacgtgtgcgcttgcgggtgacgggagcgcatgggccacgggtagcgaggcagcggtggccatcatcacacggtcagacggtctcagcctcccagggaagaggggaatttaactatttaccactatattaggtttcttaattatccaaatacccctcttaaaattgtatttaattttttatcattggagatagacaacttcttatttttttaccactttatggcacgccaacaaggctaccctatcattttcttccttctccacctcctctctatcttctctccccttctccccaatcccccctcctctcgtctgctcttcatctctccctccagttcggcgttcaccgtcgtgaggtcctccgccttcatatccaccgtggcgaggagcaccttcgctgttgctcggcctccatcgccgccactccgcctcctcctccgccgctagaagcccgttcgacgccgcttcgcctcctctgccaccgccgccgccgctgctccgcctcctccattgccgctctgcctcctctccactgtcgccctcctcctccacggtcgccgctgcccgccactgccctgcctcttccacctccggccgtcgcaaccaccatgaaagagccggcaaggaggtgaacgaggaggagtggctcgcagtgaggcaagcaggggcccaatccatggcggcggcggcgcactgcgtcgtccttgtgctcatcctcgtcaccgctggcgtcattgcctccgccaatactgttgttgctgctcgtcccggtggttggcgggcggttggatcctcaccgactacgacgatggatgaggtggagtaagtgggtggagacggaatacgacggcggaagagggtactcgttgatttgagttttggttttgctacttttgcataaacggtggctcgtacaagaaaacggaatgtgcttggtggttgaaaaccgccaagtataacgacgagttattcttaagaaaaaagaacgtttttctggatatgtgatatattcatatttatgtacaaaagttatttttagatggagagagagatcaaacggtgaatagctagctgcatttcaaattggctatcttcatgcaaagtgggttatcctggtagtttgaggaatttaaaaacaaaggaatggttgggtattccatgcattttaaaatgtgttctcttaaagaaaaaaattattctgtctcaaaactattttttacttcttaaaatacttaattattcatataatcaagtagatagtctaccctaacagatacagtggaaaatctgtttaaaattgggtcaggtaaactcacagttcttcaaaccatacttcgcgggaaataaaccaggatattgttgtaacactacccaagaaccacattttgactcggttctatccctcttagagattgtattatagattatcacgtgtaaacttcccaagctcttaactagtacaattttaccaaaaaaatctatatattaattgcttatcatattattttagaacgacttaaaataaatcattttactttccaatgtcaaaaaaaattgctttgaccactgattgataatatatcatactccctccattcttacatattcgtcgttagaacaaacaacttttttgcaaaagttagtgcatttgcttgataaaagcgtcatatattagtgactggaggtaatacagcaaaataaaaagttatactacctccgtcctaaaatataacaactcttagctatgaatttggacacacggttgtccagattcatagtagaaatgcttatattttggaatggagggagtaccaaataatgtgttttgttactataaaaattctttttataacaaaagtagccatttatcagtcttaaaaaaaacaaaattagccttatgcgcaacaagttagatctacccctaaaaaggaacttgtttttggttccgtgagtctcatcggttgcccatgattactaataagccaaaacgatttgttagagaataaaaattaatttatgggtaaacttttatatatttgttcgtagcgacctcaaaaccaacgttaaaaagaaattacgttgaaaacatcttagaatcaagttaatttttttttaaaattttggcttttgctttgatttattagatcaaccgatgaggctctgtgactgttggttgattgcttcttttgttctcagacataaatgagggcgatcgcaatgaatatgcccatggctgtttctcgattatgctatgcgtggccactctgaagtctaaagacgctttgtggttgcaataccaaattctgaagaaataaccagaacaaactgggcgaatgctgaaatctcaatgagcagacaatgaactaaagaggatggttatgttactggggaaaaaaaagaagctcacgtaccattactctgtttctagttgtggacagtcccttatccccgtgcatgaacaagagttaactgatgcctgtatggtggttggagtaggtgtcacttgtcagatctcttgcagtgactggttgcattttcttgcaaatgcttctggctgctgcatctgcatgtatcgcttcttgtgtgtgaaagactgaaagtacatctattcatgtaccaaccattggctcagttaacattgtagcgattagatgcttctttagtactagtagattgtagtctacaaccgatagcagtggtggtactagtaatttaacagccaaattgttctgtaactctattcatgtcttgtagctgttgcatcccgtgaactcttgggacagtcatgttcatcgattccgaaatgaatcgactctaacacttgccgaacaccagtagtagtttttttttttcctttttggagagactgaaaacttggagtggttagttcagagctagagagagtgttcatttggtcaggcgtgagtttatacgtacttcatcccagaggccaacatagccacatggccagatccatatgggcttcggtctataagccgtgttgggtcaagatcacgtaaatagttagggatagttattcactcctaggaggctgggccgggccggaccgtgcggcccatttggccagcactaattgctgctattagccatttcattttttagataatgtattatgtgtagtccatttcttgaatatttgggccgcactaattgctgctattagccatttcattttttagataatgtattatgtgtagtccatttcttgaatatttgtttttttaatgtaatgcttataagcagatctactcgtaacatgttttaaatgttattctaaaaaatgtttcaaatgtttttcttttgtaaaaccaaaagaaacacagattgatatgagccatgagttcttttctcatcttttttctttgactcaatataaggagacatactacaaattagtactactcacttcctgtagagaataaaactcaagtttgaatctcctaaagatgaagatgaagataaaaattaagtgttttacacaaaacgagatggtaataacatgtgattaattgagttttaattattacaaacttgaaaaatggattaatctgatattttaaagcatttttcatatagaaagttttcgcacgaaacgtaccgtttagcagtttaaaaggcgtgccacgagtatccaaaattttatcactcacttaggcctgatttagttcccaactttttcttcaaatttccaacttttccatcacatcaaaactttcctacacacacaaacttccaacttttccgtcacatcgtttcaatttcaatcaaactttcaattttagcgtggactaaacacacccttatagaagaaacgaacaggggagtctcacttcctttcttgtcaatcagccaggttccttctgaaactgatgtaaggagtacttctactactaataaccaggtttctctgaaacatgagcctgaacagctactctgtcaggctgtcactgccgactctaacaaaggaatctgcaaataggagtccatccaaacacaaaacaagattggaacaaagtggcttcagacttcagagcctaccaaaagaaggcacatgtacaccaaggataccacaaacagcacagaaatgaacagcctaaaagcacatgaggctgcttaaagccaagccgaagccatcacacctaatacttcaaatctagccgttctctgtaccaagaaccgaacactcaacgacttaatcaccatggacacaacttccctgaaacttcatcacctcgacgtctgcatgacgagcgacagaaacatccgatggagttgaagaatctcccgtttcgtttcctgacgagcaagagtacaacaacgtcaacgacgcccacgataacaacagagcaaacagaaatggaagcaatggaacaagagctcacgttcccagattggttctagtcactatatccggcggatcacgggctcctcgtccc

SEQ ID NO: 3172 - DNA, 3712 bp, Oryza sativa
ttttctaaaaacaactaagtgagtgcttctcaaacgaggcgggtgagacagtgcgtctcgtccggtcggagtatgtgcaatgtatcagcctttagaattgaatcaaggttggcaccccggccaatagcttttcaaacggccacccgggccaacaacttttcaaacggccaccggggcctagctgatcccgtcagctgctgatttttcaaacatcgaacccctttccacaacagcaatttcacaagcagtagtcaaacaaaactatgctaggaatcacctcacatccgcccatgaccgtgggcacggctgttcgaacagtttgttaacctctgcagagggggtacactttacccacacgacattactaacccggatcacccagcccgtgggaatcagccacgtcgggagacctccaagctttcatgacaaggcatttcgaaagccgtcacaggtttaccatatgccgacgagaggggtcccagaccaacaacaggttaggtcccagaccatactgtgccaggaagcccaggggtcctccccgacaccaccccggcgaatccacatgtctcccggcatcaaggctcccctgataagctagttactcagccaggggtgtcccattccacccatgtggtcgtacttgtcttatgtttggatgaaattccaaggaattggtccttaagtgcgagatcgggaaaccgtacacccggtacgttccccagtccgcggttttggaaatttatttagttcgcaaccacgacctaggtgtcgggttttccaagtattttgtaaaacccaagttttacccaagatgtttttcagattttaagtttgaaggcgaccgtcgatactcgtgcagagtgcacgatttccgaggcgcaactgggtggttacaagggaacatggtatgacaattaacagaggaaggatcaaatgcaacaagctaggtaggtccgccaatctgccttgcagacgggacaaacagattaagtgcgatcctatcaatgcataatatttttcaaacagcataattaaatttcaaatataggctcaagatgttcaaaggtggcttgccttgctcgagatttggagcttgatcctcgaaatcctcgcactgcgggtcttcgggctccgaaactacacgcgaaacgggacaactcaacaaacggcgaaaataaagccctatttgtcggtgacatgggaccgggagtatcgtgactagaggcttgggcagccgcgctcacccacgtggcctgaccccctcggggggggggggtcgggcccgagggtgacatggccacccctccctctgtctccccgaggggtcgggccgctcccgtttcggccccgaggtctggggcgccccgaccccctgtggtgttggcgccacgtgtgtgggttaggtgagcacagcggcgctcacctaaccgcatttatgcgggttggacgagcgcgccatgccgcatttaatgcagcgcagcgcgctcgcttatccggtccgtgaccggtcgcagtatgtgaccggtcacagaccggtcagatcgcgggttaggtggcagcaggcggcctgtcacacgcctcgccccgtcccgtcggaatgatgagagcctccaggcactcgtccctagccggagccggcgtgctaactcctggagttagcacgccagtcccggccagatacattccaggcttcatcgcaaccattgcaaggaagtcattgtatgaagaaggacagacgtgcggcatgctaaactgacacgtggtggacaagaatgaccggtctgtgactggtctgacgccggtcacgtcatcggcagacaaaccgtgctctcacgttgcatctgcttccggcgaagtggaggtaggtatgacccatcccatcggagggtcattcggacagcggccattgcaaatctccgcccattaatgaaggaatgacagggtgatcccctgtgtcaggcgagtgacggcgctgggcctcactcaaggacaagctgtgatttagcttccaagcgaaggcgtgagccaagttctggtcaagatagggtgggtccccacccaaaagaagggtaggtagaagtggtgcatgtggtatccccttgagatataaaaggaggaccttgcccaccgaagaggggggatggagatccagaacaagaataggagggacgactctgagaatacctgagctcgtagaggagagaaagaggaagaggggttctagagcctgaactctcttgctctccagctctctgtaactccttcacacacagatccaccagaacacaggagtagggtattacgcttctcagcggcccgaacctgtctacatcgcccgtgtctcgtgcatttgctctctcgcgaatattccacagatcgagggtgaagaacctcacttagcgcccccggccgaaccggcaaaggggggcctgcgcggtctcccggtgaggagccccaagcaccgtcactattaatgacctctaagcgtgccattagatagatctcgagatttgaggaattttggaagttgaacggagtcaaacggatttacggttgggaagatattgaatttctaagattattggatttttggtctaaaggaaaaatgatttaattaaatcctttttgaaaaaaaaaataaaagaaaagaaaagagggaggcaatatagacttttctcgggcgactagggtgcggcccgagagaattggggcggtccggccgagctaaatgggccggccggcccaaggcggcccaaggcgcgcgctcgcatgggagggaggagagagagagccagtggaccgggctcaccgcgcgtggtcccgagtgggacccgcttgtcggcggttcggttcaccgtgcggatcgagcacgcggcgcgcgcgcgcgggcggggctgggacgcggtgcacgcgcgcggttcgcggaggaacggatgcggcgggcccacgcgcagcctcacggctcgcggtggaacgcgcgcacggggaggggctgaccggggtcggctcgacccggtcttggccgagctggcgccgacgtggcgcctacgtggctgccacgcgggccagcgggaggtagacgacgacgccggccggaacggacggcggacgacagcggcgagcggcggagtgaaccacggcgatacaggcgaaagcgagcacaccgggtggttgcacgagacgaggggagacgagccaacggctcggattcgccggaggatgcccgacggcggcgatttgcggcggcggcaaccggcggagggagaagggggaaacggcgacgaggtcacgaggggccgattcccggcggcgagagcatctacgcggctacgggaatccgatgctagcgttggattgggcggagctgcgccgagcgaggccggcgacgagcggcgcttccgagctcgggcggcgacggcggcgagcacacggcgagcggcggcaacggtcggggtggcgccggctagctatggggaggctactcgtgctactacccgagtctaaggggaggagatggagcgaggagggagaacggggagatgcactaccgtgcgggcgggcgcagtgacgagaggccgacggcgcgggagtaatctctccggcctcgggccggggaagaggaaggagagggcgcgcccggagtccccttccgcgtccttgctcgtgccggctcctccgacacgcgcaacaacgaacggcgacggcgaacaga

SEQ ID NO: 3173 - DNA, 1884 bp, Oryza sativa
ttcggcccatcgaccccgggggaggcaaaatagactttgcggaggaatttgatttggaaggatttggattcggaattgaactcgacgatagatcggggatttgagatcttgagatagcacgggcactagacaacaagcaaagaaacaaatttcgcaattagggtttttaagagataattttcccgctaggcgccacgacggaacgggcgctacaatgtatcacttttcaataaatatttttatagaaacaatcaatcaaagttgtgttttgaagaccgtgtcgttatcctaaatgacttcctttatgagtacggagggattattctgtacttacccacgctaccactgcatgtacagtactgtacctgatgaaaatcagagagaaaatagcgcagatgaattactggttgttggtcaaatcatgaaaagacggtgatgaccgcgtcgttatgcctagcataaaacctgggtcgcaaaaccaaataataaatcatgaagaacaagttaatgcagggtcgaactaccgaatcaaattcaatcaaaacaatactgaccgaattaatgaccagcatcgcgccatcgcctccttggctcctcgctgaacgaagccttgaccgttaaggttttttcacctaaaaaaaaaaaaaccctctcctgctgtcatgcatggctgcatatatacaggctcgctgctcttcagctaaacactcccgcgcgcgcagccaaagattcagaaccggcaaaacctgtagcagtagcactgtgcaagtcttccacaacacaaagcctgttccatttctaaccatgaagcttacattacttggcaactgtatccatcaccctgttcttcttctagtgatcctcgcctgcgccggcattgcaccggcgagcggcgccggcgggaggtgggacgtcctccagcgcagcatcggcgtgtcggcgatgcacatgcagctgctgcacaacgaccgcgtgatcatcttcgaccgcaccgacttcggcctgtccaacctctccctccccgacggccggggccgccgcaacccgcgggagcgcgtggtccccatggactgcaccgcgcactccgccgagtacgacgtcgcgttgaacacgttccgcccgctcttcgtcttcaccgacacgtggtgctcgtcggcaccgtcgcgcccgacggcaccctcgtccagaccggcgggtggaacgacggctaccgcaacgtgcgcacgatggccgcgtgcgaggcgggcgacgacacctgcgactgggacgagacgcaggacgcgctcgccgcgaacaggtggtacgccaccaaccagatcctccccgacggccgcgccttcatcgtcggcggccggaggcagttcacctacgagttctacccaacggccgattcttccggtggctctgctatctcactgccattcttggttcagactaaggatcccgaggagaacaacctgtatccctttgtccacctcaacatagatggcaacctgttcatctttgccaagaatcgcgccattcttttcgactacaagaagaacaaggtcgtcaggacgtaccctgagttggctggcggcgacccgaggaactatcccagctcgggctcgtcggttttactccccttgaagccgtccccaacagaggccgaggtgctggtgtgcggcggcgctcccgccggctcctacacctcaaccaaggacggcaccttctcctcggcgctcgtgacgtgcgggcggatcaagatcaccgacacggcgccggcgtgggtcatcgagacaatgccgtcgccgagggtgatgggggacatgatcttgctgccgaacggcgcggaggtggtgatcatcaacggcgccatggacggcaccgccggctgggagtccg

SEQ ID NO: 3174 - DNA, 579 bp, Oryza sativa
taagagtgaagtgcatcgtctgcataataaaagaggggtcaggctgaaaaaggtgaggtttggatatcagctaatgtcaaccaaaatgtgtgcatcctcaactaaagaaaaggagaacatatattattcttcatgcgtgcaaaaacacttctcaggaatccagtagatatttttgtggtaaattaatcaaactaatcatggagtggtaaatttatcacactaatcattgcaagtgatgcattatgattgttctatatatcatgtctcaacagagcagcgaatatgtgacttttgttgcttttgttaactttgtaagaaggcccggtgaattaacttgtaagaaggataccttggttagtgaatttgtaccgtgcaagtacaaaaaatgtaacacttcaaactcctcatcattatctttctggttgatcagaacttgatgctccattaggaggtgtggacaaagcgctggttgatccattctctgctggtggaggatttccccattttctctcagattccaagggttccaatacataaacaccaccatcagtcaggcctagagcaaactgatttgcttcc

SEQ ID NO: 3175 - DNA, 750 bp, Oryza sativa
tatagggcgaaggggagctcggtacccatacagtccatatagaaatacagttaggaaataactgaaattcggaattaaaaataaagaatattagaagtagagtatagaggcaatatagaaatacaattaggaaataatagacatttggaattaaaaataagaaatatcagaagtaaagtatagagtccatatagaaatacaattaagaaaaaaatagaaattcggaattaaaaataagaaatattagaagtagattatagagtgcatataggaatttaaaactaactatattttggaataaacataataaaattaaaagtagagtttagagtccgtataaaaatacaatttacaaataactaaaattcaatattaagaaaaacacgggaagaagagtttaaggtcaatataggaatacaaatataggaatacaatttagaagtaactgaaattaaaaattaaaaattaaagaatattgaaaaatgagtttagagtccacatggaaatacaattagaaataataaaatttcagaaataaaaataaataatattggaagaagtgcatagagtctatatagaaatacaatttacagaaaattcggaattaaaagacgagtctagagtccatataggaatatatattatttacaaataactaaaatttgatattaaaaataattaataactaacacgtatatgaaatataatataaaaattcagaaataaaaaaaataatattggaagaagagc

SEQ ID NO: 3176 - DNA, 740 bp, Oryza sativa
ggcgaattcgagctcggtacccggggctgagcacaaaagtgttggctacgtggcatgccacgttggcggtcaaacgtggtcaaatgacaattggactaggtgtggtacattaaaccaagttcacggacctaaacatgtaattttcaagttcacggacctaagtgacaccaccccacaagtttaaggaccggccatgtatttcactctatgcctattcattcttctatcaatctcattgttcttattatgtgcaagtgcaacctaggcgccacctattatggcatgtcaatctcattgcttttttagaacttttcttcaatgggaatggtgcaaaatgtgtgaatcttgtttattctacaaaagttctatattttgaggcaactatcatgaattcgtgatggatcagagagtagttgttttgtgatggcatactgcagttgtgtgtaatagacatgtcaatactagtaacactttaaacttgctttcataggattcatttattaaggattggatgatttgaagtttatcatttaggtgactttaatgtgttgtcaacctttcatgtataatttgtgtaataggcaaaaggatatagtctctggctatgcataggtgtggtcaattcctgatgctaagtttgtctgatttttcaggttcggatctttcttgcttcctggttccttgccacattcttgatggtttctgtaattccgcctatactgcctggtccaagaaacttg

SEQ ID NO: 3177 - DNA, 610 bp, Oryza sativa
atccgacttgctatagggcgaattcgagctcggtaccctaaacgaaaacaaacaactgagggaatacatccaaccactagctatctgagacttgacaccggtacactcacactgtcgcacacacatttacaacaacgacgacgacgacgacgatcaatggagatgaccgagaagagattcaaccgaagagcaacttcttgggcggctctcccttggcgcggtactttgctgcggcctcctcggccttcaccacctcctcccctcgccgcgcctccgtcgccgctcgcttctcctccgccgccctgtgcaccttcgccacgccgttcatcaacttctccacctgctccgccttcttcctctccaggtactcctgcatatatatgaaccgatcgatcaactcaatgattcacacacacataattgatctctccttgttctgcttgttgatgaacttagctgagctgaacttacttggtacttcttaatctcggcctcgatctcggccaccttggagttctcccatgaggcgatgtcggccaacttcttggccgccctgtgcgcgaaagtttcagttaaccgagggctcatttggaatgcaggaattttatat

SEQ ID NO: 3178 - DNA, 1684 bp, Oryza sativa
ttccgggcctccctgtccggaacctccgggtgtcggggaatatatatactcaaggggagttagaagccctattctctctcctcatttcttctctctccccgacgccagccctagccgccgccacagtgcttctagtggcgattttcactttcatccaatcaaattcgtttcttcttcgtggattcatccacattggtggctgggaggttctttctgtgatcgattcgcagtttcttctctcaaggtagcacttcttgattccctctctcggttcattgtgtttttatcccgatctctaaatctgtgaacctagggagaaaaccacttggatagtcttgtttctgctaccttgtagatcaccgatctataggatttgttcacatgcactggcttttttttgagtcctctgttcttcttttttgccggccggaagttccggtgttcttgcacccggaacctctgggcgctgtccagccagcctgtcattcttacttctcttaatttttgcctaactactgcactccaaattgttgattcctgttgcagtaagcactatgactcgtgagaaaagacagaaagcctctcaagatgtgtccggtgatgagagtcctcctattcggttccctcgtggtcgtttgggtaaagagaaagttgttgagggcggcagtggcagtggcactcgtacttctcccaggtttacaaggcaatcaagcaacctaactgttcagattagggatgttgacagtagtcaaggaagtgatgcacctaatacaagaggacgggggagaggtggtggtcgcagttctggggctggaagggcatctcatgatttccctgtaggatctcgtgagaatcccgttcggctctacaagactcttggttttgacaccactcctttgcaccacattagaagacccaagtccaactaccttcatcaacttgccaagtgtagaagagattgtttgattgatccagagacacagcctgaggagtcacagaatcctcgcttcaggactttcactcaattggattggtataactcggtgattatggctagagaaaatccagtggttgagatgaagtggattgatgtcgcgtcccaaaacgactctaaaatctatcctcgaaatagtgcaaagaataattaaaattcatgagaaagcctccaacaattaaaatgtgcaaagataaaagtcaaatgaggcttggaggatttttgtatatttcctaaaagcctaaaatgcttaaacaaattttagtggaattttcagagcacaaataataattgaaaagaaataaacaaagtggaaaaaggttttataaaaagaaaatcctaaaagaagttcttttttcccccctttttccttcttgggccggctcggcccacttctccctccctctctctctctcctcccccgcggcccatcggcctccccgcgcgcgcgcgccgctgacaggcgggcccgcccgccgctctcgctgacgggtggggcccacctgtcatcgccttcctcccgccgcgcccgccgccgcgcccgtgccctagcgccgccgccgccgcggattgcgccgcatcccgccttccccgcgcgccttaatgaggggggaatcactccccgtgattccctctcccgtttcccccgttttcccctctctctctccctcggattcgtccgatttcctt

SEQ ID NO: 3179 - DNA, 3229 bp, Oryza sativa
gtctaggtaaaattgccatctccaataatcaatctctctctaatgttcttcttgtcaattcattaagctacaatttattatccgtttctcaattatgtaagttgggttacaattgcttgtttaccgatgaggatgtgaccgtcttttgaagggatgactcctctgtagcattcaaaggcaagttaaagggtgatctctatcttgtcgatttcgatgtggatagagtgaatccagaagcttgtttgattgctaaatcctccatgggttggctatggcatcatagactagcccatgttggaatgcagaatttggcaactcttctaaagggggaacacatcctcgggctcactaatgtcacatttgagaaagatcgtgtgtgtagtgcttgccaagcagggaaacaagttgggaatccacatcctatcaagaacatcatgactacaacacgccctcttgagcttctacatatggatttatttgggcccgtggcttacataagtattggaggtaacaagtatgtttttgtcattgttgatgatttttcacgcttcacttgggtgtactttctccatgacaaaagcaaagctcaagatgtcttcaagcgctttgcaaagcaagcccaaaacctctatgatctcactatcaagagggtgcgaagcgacaatggaggagaattcaagaacactcaagtggaggaatttcttgatgaagaaggaatcaagcacgagttctccgccccctatgatcctccccaaaatggcattgttgagaggaagaaccgaaccctcattgaagccgcaagggcaatgcttgatgagtacaagacttcggatgtcttttgggcggaggccgtgagtaccgcatgtcatgccatcaaccgcttgtacctccacaagatcctaaagaaaacttcatatgaactcttgagtggtaagaagcctaatgtttcatattttcgtgtctttgggagcaaatgttttattttaagtaagaggccttgctcatctaaattctcacctaaggtggatgagggattcttacttggctatgaatcaaatgcacatgcctatcgtgtcttcaacaaaacctccggtattgttgaagtcactagggatgtgatatttgatgaatctaatggctcccaaggagagcaagttgttgtacatgttgtaggtgatgtggatccaagtcaagctataggcactaaggctattggagacatacgaccagtcgagacgcaggatgaccaagaggatagggatcaacctccgtcatcgacatccaatagccctacaagtgttgtgtctgctgagccagaagttccgggtcctattgaccggaacctccggacatctccaggcccggaagttccgggttctacagtccggaacctccggaccagtggcagtgaagacgtgccaacggcacaagtggatgggatcgatgctgcgggcactttagagtatactgatcaggcttaggtccccccagtgcaccatccaagaatatatcacactgtccaaagagatcatcccgtcgacaacatacttggtgacataagaaagggggtaactactcgttcttgtgtcgctaacttttgtcaacactattcgtttgtctcttctttggaaccaaccagggttgaagatgaacttggtgatccggattgggtgatggctatgcaagaggagttgaataacttcattcgcaaccaagtatggacgttggtggagagacccgaccaaaatgtcatcggcaccaagtggatcttccgcaacaagcaagatgaacatggagtggttgtaaggaacaaagcccggttagttgcgcaagggttcacccaagtcgagggtctcgattttggtgaaaccttcgcacttgttgctcgtcttgagtcaatctgaatgcttttagcctatgccgctcaccatgatttcaggttatatcaaatggatgtcaaaagcgcctttctcaatggacccatctcggagttagtctttgtggagcaaccaccggggttcgaggatccaaagttgccaaaccatgtgtacaagctccacaaggcgctctacgggctcaaacaagcccctagagcttggtatgaatgtctccgagattttcttttgaaaaatggttttgaaattgggaaggcggacactactctcttcactaaaaagtttgaaaataatttattcatttgccaaatttatgtcgatgacataatatttggttctactaatgcctctttttgtgaagaatttagtagtatcatgactaaaaggttcgagatgtctatgatgggtgagctaaccttctttctcgggctgcaagtcaagcaagcacaagaaggtaccttcatctctcaaaccaagtacgtgaaggacattgttaagaagtttgggatggaagatgccaaacccatcaagactcccatgcctaccaatggtcaccttgatcttgatgaaaatggtaaatgtgtggaccaaaaggtatatcgctccataataggatccttgctttacttatgtgcatctcgtcccgatatcatgcttagtgtttgcatgtgtgctcgctttcaagcggagcctaaagagtgccatttgattgccgtcaagagaattctaagatatttagttcatactcctaatcttggcttgtggtatcctaagggttgtgactttgagcttttgggctattccgattcggattacgccgggtgtaaggttgatagaaaaagcacaaccgggacttgccaatttcttgggcggtcccttgtttcctggtcctccaagaagtaaaattccattgcattatccaccgccgaagccgaatatgtcgccgccggttcttgttgtgcccaactcctttggatgaaacaaaccctaaaagactttggctacaacttcacgaagatcccactcctatgtgataataagagtgccatcaaaatagccaacaatctcgttcaacactcaagaaccaagcgcatagatattcgccaccacttcttgagagatcatgaaaccaaaggagacatatgccttacccatgtgagaaccgagagtcaattagccgacattttcaccaagcctttagatgagaaaagattttgcgagcttaggagtgagctcaatatcttagattctcacaacattaagtgatgggtagttggctaattcatagccaaagtgtcactaaaatgtaaattaaaaaacaatgagcttttatg

SEQ ID NO: 3180 - DNA, 3176 bp, Oryza sativa
ctcttctgggatctttgcataagtaagccaagggtttattcaagaccgcggctctttggagcacctcacaagagagtaggattcatgtgatccgaacttcgggaaaaaaatcgtctttgtctctcttgtgcatgatctttgtgtgaatctgctgatattctgcaatcttcatcttgttcctctgtgtgcctaaacttctcttgctaggacctgtttttcatctctgttttaatttatctctgctgcccggaagttcctggctcaagaactccggaagttccaggctactcatcctgcccggaagttccggtgttcatcaccaggaggttccgggccctgtcaatttaaccgctacgattgttgagaaaatttcaggaaagcctattcaccccccctctaggctacatctctgatcattcaattggtatcagagcaaggtgctcttgattcaagcttcaccgctttgagtgatccacgatgtcagacttagggggaaagaacggggaaaatggaaatgaagatgaagcaagcagcaagggaactccaccacccaagggagctactataccttttgattacagcaaacttactattccctctcacaacttcgtctccatgccttctaggcgtgctcctcaatttgatgggacatattatgccgcttggaagcacaagatgaagttgcatctaatctctttgcatccaagtatttggaaaattgtttgtacaggtattgtataccccatgatgacatggagctcacttcggagcaagaacaactcatctaccgcaatgctcaagcttccaatgcaattctctccgccttgaatccggaggagttcaacaaggttgatggactagaggaggccaaggagatatgggatactttgcaattggctcatgagggatgtcccgccgttcgtgaggccaagattgaattattggaaggaaggcttggaagatttgtaatggatgacaaggagacagcacaagagatgtatgataggatgatgattcttgtcaacaagattaaaggacttgggagtgaggacatgacaaatcactttgtggtcaagagacttctccgtgcatttggtccatgaaatcccactcttgtatcaatgatacgggaaaggaaagacttcaagagactcaccccaagtgacattcttggaagaatagtgtctcatgagatgcaagaagaggaagctcgtgaagtgagacaaatgatgaagaatgccgccatgatcaaaaatcaagaagttgctttgaaggcaaaacaagaagaagagtcaagttgtgaagaaagtgaagatgaagaaatggcttttattgtcaagaggttcaagcactttctttacaagagtggctatggcaaagggaggaaggacgatgacaagggaaagaggcaatcaaagagagcgtgcttcaattgtggcgaatatggccacttcattgccgattgtcccaagtcaaatgaagctaacgctaagggaggcaagaagaagccggagcgtgctcatgtggcggaggcacacatggcggaagtgtggtacttcggagatgaagaagatcccgaggtcaagcccaagcccaagtcaaaagacaaggttgaaggagaaggtggtgttgctaccgtcgccttcaaatcatcctcttcaagcaaggagcgtctcttcaacaacttgagtgatgacgacgacgactcctaccactactcttgcttcatggcccaaggccgcaaggtgatgactcaaaagccctctcaaacttctcttgatgttgattctagtgatgaggaaagtgataatgaattagatgatgtgcttaagagctttagcaaacccgctatgcaacatttggttaagttaatgagagctttggatagtaaagaacaatcactcgaaaggcaagaagaattgcttattcttgagaagaaaagaaaccttgtcttagaggagagcttagctaaagaatgtgctaaaaataaacaacttgctaatgagcttaatttggctaatggttctttagctagccttagggatgttaatgaaactcttcaagaaaaatttgctaatttagacaaaagtcataaagatcttgaagttcaatttgacactctttggaatagcacctctcaaccaaatgtggtttctaattcttctaacccttctactagcaatggtgtgctaggtgttacaatattgatttgaactcttatgctactaatattgatgctatgcaagctcttaagaaagagaatgaaaagttgtgcactttggtgaaatatggatgcatcaagacataccattcaaaagatgccctttacaagaccatcaccgctcatcctaacaaggatggacacgggttcgggttttcgggtagaagtcctgtgtctaagcgtgtgatggtaaatgggaaagaatgcttgatgtttgtgcgagaaggtaaagctccacaagcaagtgaggtgactggtcttgtgagctgccagggacccggaacatccggacaaaccgggcgaaacctccgggtgggagtctctgtctctcaaaaattcccaccagaaagttccggccggtttgccaagaagttccgggccaatggccgtgcacaagacatgaccggaagttccgggcataatgccaggaggttccggccagatggtctttactatgattcatatgtaatttccaaaaatttagagggaaaagtgggtgcttattttaatgggaattacaatgatgagtaccgcacttgtgtgtgggtgccaaaggctttggtaactaacatcaagggacccaaacttagacaagtttgggttcctaaatcccaagcttgatttcttttgtaggcatactcctccggtggttcaagttgggttgtggacagtggttgcaccaatcatatgactggagagaggagtatgtttacaagtcttgatgaggagaacggaactcgtgagaatattgtatttggagatgatggtaaaggaaaggtaattggtctaggtaaaattgccatctccaataatcaatctctctctaatgttcttcttgtcaattcattaagctacaatttattatccgtttctcaattatgtaagttgggttacaattgcttgtttaccgatgaggatgtgaccgtcttttgaagggatgactcctctgtagcat

SEQ ID NO: 3181 - DNA, 1006 bp, Oryza sativa
cgtcctcctcccgtcggccgtgccggcgaggccgccttcggcgcgccctcgcggctgccaagtgggcccggccgtcagccgcccgcgcccggccgcgtgcacccggtccaccgtggaccgtggggctgacgcgtgggccccactcccgtggacccggtccgcgcgccccctccctcggctgacgcaataaatgggtttttaattaaaatttaaatgaagaaattcgtaaatatccatttaaagagcatataaacttcaaatggctttatcttggccatttgaactcggaattggaccgttcaagtctctaatttttccttaagaagtcaagaacccatttttgtgctttgttcctgcttgttgtatggagtttattagagtaaaagccttttcttttccgttggtcgtgtagacgctgcagcttcggaagatccgctcttcgtggaagttgaagccggtgtttgggaaagcgagcaaggcaagtcacatcatccttgaacatattgaatcccagtttgtaaaattatgttgatttaaattattgcattatcgctttatttaaattcccgcgttatcactgttttatttagccatgcctatttacctttgttatgacattattattgctattgttattattaccttgttcaccctagaataaacaaaaccccaactagtggacactctatttatggttccactagtatgaatttaggtagatgcttcgctgattaataggacaacattaggtggttttacaactttagactttgggaattctcatatcatttggacactatggaatggttggcttatgttggaattggacacacacctctcttcctctttcaaaacccctaaaacctgttttcggtggggtttgggtgcatgccagttgtgggaagtagcaccccggccactataaagattaagctcggcctctggtgcaaagcactaccgtacttccacatgtctaatgggtaaggcttagtttgtggctcagtct

SEQ ID NO: 3182 - DNA, 1899 bp, Oryza sativa
ccatgatcgccaacctccccatctccttcatctaaactccccgcgcctcctcctcgaagcagcggtcatcgacgttggagccccctccgttctagtcaccgacagtagccaccatcgtgtcggccgcatctctccccctctccatccgccgctgcccccgctccaccgtcggctgcctctccccccctccgtcgctgcgcccgctcgactgctcgagagaatcaacaagagaagagaagagaaaaagaaaaagaaaggagagatgtgggtcccataccaatttctctcacatacatataggcccccatatatttattttatattttttgctgagtaagatgccacgtcagcgaaaccagacttctatactacctcgggaccttttttttttgaatggttttacatggtttaggggtacatatttctggtatcgtggttaggggacctcagacagactcgggtaaagttgagggactactggtgaacttagtcctaatgttttatgatttacagcccgtccaaacgggctttttagcctacacggaaaagattttacggtcttgtgttttacactagcattgggccaattacaggccttccaaacaagccttaagtctcacgtttttccaaacaggccttccagcgagtgcctcgcatgaaccctcctctccattggctggtttggtttattcattcttcttaatcattttattggctttggcaggcatcccgttagtcaggcgagtgggttttgggtgaagctgtcagccgccaaggccaagttccacccagtgacaaaactagaatgaaaataaagtgtcaaaggtgggaactaaatgtatagataagtgaaccaagtatatatcgctatgtttgaaataaactcacttttctaattaatatttagattttaccccggttttcattagcatgcttttcaaacgactaaacagtgcatttcgtacgaaaactttttatatagaagttgctttaaaatatcaaatatatctatttgtcaaatttgtaataattaaaaattaataaatcatgtgctaatagctttcttgttttacgtgtgtcaacttaatcttcatctttattaatttcaagcaccactgaccatcaaacaaaaatcagatcattcatatgaatttgttgataagtaattaacaatgaaaaccacattgtcttactcgttaatttcacaccattccccaatcatgaggtctcagcccataacaatagctaaaatattttcaattgggccatatcatagcaaataagactagattaaaaggcatccaagcgaacaaagcagtacttctatctagttatcttatttctccaaaatgacatgtataccaaactatcacagagctagtgaagtaaggtgcttgggatctagcggatggatctagggacttgcgtcccaacaaggcccaacactaaattcttccatggttccaccaccacctacctctctgtctggtgagcttcctcaacttgaccatgtatagttcgattcacttcgtcaaaccgttaggaactctccactccctgcatatttacaccggtttccatcacgatcttgcaaattagtggtggcgtgtggctataaggatcctatcatgtgattgttgcctcgttttgtttcatggttgacatggatagacgttattttaatgattcgtgttctagacatatgtaaagcatcgtgttctaaaaacattcttggggttaggctacatgccatttggattatttgatgcattattaacatttgtcatatcctcttgtcgtgttttaacctccagatttttttgacgggaatttaacctccagatttacttcacagaaacgaacaggggcgagaatagagataccggacatacacatttg

SEQ ID NO: 3183 - DNA, 1516 bp, Oryza sativa
  unsure (1)..(1516): unsure at all n locations
tcctgcagcccaagaattatttcgcaatgctgttccacatgttgatgaccagtatatagtttataatctgtgaaattgttcaagcatgtacggaaagcagagcataaacatccatacctctcgttgttgttccgggttcgcagaagccaaggaagtctgaaggttattgcttggagcttgcaattcccccacgggcaccacatgcttgacagcttgttgcattggctgcattgggctagagaagcgatggtgctgatgcaacattgctgggttggccacaccattcctacgatttggcatgtgtctgaagccctggttggcattttggtgaaacatctacaaagtaacaagcaacgatgttaagtgaagtgaatcctagttaattattaattgctccctccattttaaattagtacttctctttctagacttattctaagtcaaacattttagtttttgacaatcattttttctaaactcatgtagtttgacatcatgatattcatggatttagattcaataccttcataatatataatttacttgtcaaagtacactgttttttaaaaattaatggtaaaaaataaacatgtttgactaagagacacctagaatgataagtaattcttaaacgggggagtagctgaagttgcgagtaattgacaacattagcaaaaataagtagatatgataattggatacaattagatgctggatctattgtgttaaaaaagaaaaaaaatatgacaatgatttagccaacaggaatacctggtgaggattatgcagatgtntaggcattcctccatgcgaaggaccactcctctggccaggctgcctttgcatgttatatggcatcatcatgtttggaacaaaatttggttggaaccccaagcctgcaggtggtggtggtgggaacaaggcaggcacaccatggccaaaattgaactgatggggagcaatgtttggccctaatgtaggtgccattgttgctagggctctaacacgagcaaaatgtgcctggcaaacaaagaagatatgaatatcaagcttaacaaacgacctttgtaacatggaaaagttcaatgttagcatagcacacttagtatcaagtgtcaatgttaagaaacaaaatgtactttcagttttttttttcatgaattacaaaactcacaagaaaagataacaagatgtacaaaacctaccctaaaaatcaaattcaaatgtaatagagttagtacataccgctaaaaatgcctttctctcctccttccgttgagctacggcaacatataatggctttttcccaaccattttcccgttcatttttaaaatctataatatttttaaaaatattaattgcataatactgaaaaatatttagaactatggaattgggagtatgaggatagcacaaaagaatcattttttaacatacagcattgttagcgtcttcaacagttgcaaaagatacaaatccacaacccttgctccttccatgcgaatcaagcatgac

SEQ ID NO: 3184 - DNA, 715 bp, Oryza sativa
ccaacgccaccgcaacacctgtcccaccctccccgcctataaatccccggcgccggccgcgtcccccggacaacgccgcatcattgtgtccggctccggctcccgggacacgacacagcgcacgcccagagcgcgctactacttgctttcgagagggttgcgtgcggctttgcatgaggaggaggaggatgggggcactgcacgtcggcgagccgcgggtcagcttccagcagcagcagcagcagcaggtcggcaagaacgggcagcaagggcatggccatggcgccgtggtggaggagatacacgggctcatcaaggtttacagggacgggttcgtggagcgcatcccggcgatccccgacgtgccgtgcacgtggggcacgacggcgtcggtgccgggcgtcgtcatcgcgcgcgacgctgtggtcgaccgtgccacgagggtgtgggcgcggctgtacgcgcctgcggcggcgacggcggcgggaagggtgcccgtggtggtgtacttccacggcggcgggttctgcgtcggctccgcggcgtggagctgctaccacgagttcctcgccaagctggccgcgcgggcggggtgcgccgtgatgtcggtcgactaccgcctcgcgccggagaaccgcctccccgcggcgttcgacgacggggtcacgacggtgcggtggctgcggcagcaggcggcgatctccagcgcggccga

SEQ ID NO: 3185 - DNA, 527 bp, Oryza sativa
ttgggaagaaaagaaaacatagcaagaaggacaagaagaggatgtggaagaaaaaatccatattttggcggctaccttacagggaagatcttgaggtccgtcaatgcattgatctgatgcacgtagagaagaatgtgtgcgatagcttgctggggctattgctgaatatgcttggcaggacaaaggacgggttgaatgcgcgtctcgatctacaggagatgaacattcacagtgaacttcagcctgttacagatgagaagacaggaagagtgtacctcccaccagcttgccacacattgtcaaaggatgagaagatcaatgctatcatgtctggcagatattaaagttccttcgggctagtgcacgagaataagtaagtacgttaaattggaggatctaaagctggttggaatgaagtctcatgatcgccacgtgctaatcacacagatcttactagttgctatcagaggcattctaccaccacaagtccgtcacacgatccaactgctttgtgccttcttcaatgc

SEQ ID NO: 3186 - DNA, 601 bp, Oryza sativa
gtgcgtggcgtacatgtagtgagagtgggtctatgcgtgaattgaattgtccatttttcgcagcgttcaaatgtgttgtgacatttgcaaattcttcacgccggatgcatccttaattttctcttgtaaaattacgttgtccgtgtatataataccacctctgttctaagatatatgacgttgttcacttttcacataatatttgactatttgttttattcaaagatttagtaatgaataggtagaagtataagttaagattatatttttatgataaaataagtcataacaaaataaataatatttttttaattagatgaatggttaacgttataaaaaaaagtcaatcacgtcatatatttttaaatggagggagtatatatcaaactgaaaaatgtttacctggtaaaaaaagggaaattttcatagtagtctacatagataggataatcaataggtttttcattttcgtttcttttcgttcaacatatcctatctatgcatgaattgaattgtccattttgcacgttcaaatctgttgtgatttttttttgcaaattctgctcgccggatgtgtccttttcttttgacatggaatgca

SEQ ID NO: 3187 - DNA, 1786 bp, Oryza sativa
  unsure (1)..(1786): unsure at all n locations
atgatcgaagatgatcgatagaggcgcaacacggcatgagaagtgagatcgaagacgtaccaccgttcagggcttgggagttgggaccctgccgcccctgcagcggcgaatgtcgcagccgcagcggcgcagccgttccaccgcctcgtcgatcaaacgctgccgctgtactagctccccgcgcgacaggttgaatagaaaggggagcctcgtcgtcggcgccggcggatcagcgtcctcctctctcgaatgttgggatcccatgtcgtcgtgatccagccaagatctaaagttttacaagaaattctcaaaaaaaatagggaagttttacaagggaggctaaagtanattcggcccatttaagtgttcaggcccatttaagacttttaagtgctcacgtgtgctgcgcgtcgtgacccaatggaacgggctgacttgcaactccctctcctccgcttcctcccgacggcgtcccgtcctggatggcccgaggcggccgttcgccattgacaggacgaggagctacgtgcatggcgtgagtacgtcgatcgttgttttccgaggagattggatcgtcggagcaagtactccttgaatcagcccaatccataggagagatttttttttataccgttgatgtgttcgtgttggacttggaggaaagaaaacgctcgatctcaaggcgcgtagcaacggcgcacgtgcagagcatatcaaactcaaacatgcatgccgttgtcgacagccgacatggcacgggcatgctctgtgcacagccgcatggcgagaagattgcagtcctatttgatgcatccttgagccttcccttcccggatttcagttccagtgagcaagataagccagcttgtcatttgtcaagacggcaacagggagaagaggacgcatatcgtactggacttctggggacgacgaaagttaaacgcctcaacgtctcgtcatttgtcctgtatggctggcttggctgtataacagtatgtcagcataagcggtcaagccacggcacgacaatttgagaaacaaagcatgtggatgtaatgcaatgctacttgggccatgtggccggagtgcctgacacaatcacacacgagaaaagactcatacttgattttgtaaggtaagtttctagtgaaaaaaaaaggggctgctatataacggaatcccgttttcgaacgggatgatcccgagtaggtatcaagtgtgatacctatcaggtatcagacgattctacacacgtttcaggtgatatctgcaagtatcatgtgatacttatcaggtatcatgcgatttctaccacgtatcgcgtgatactagtatcatgtgaaacctgtcaggtattagacgatttcaaccacgtatcgcgtgatactcacgaggtatcatgcgatacctatcatgtatcagacgatttctaccacgtatcgcgtgatactcgcgaggtatcagacgatttctaccatgtatcacgtgatacttacgaggtatcagatgatacctaccaggtatcaggtgattcctattagatatatctgggcatcccgttgggggaggagcatcccgacacgcgcggtcgccccctgcagccgtcccttgtatacgacgatggcggcggcaggggatgagcgcggcgacggcggtgggggacgagtgtggcggcggcgggggatagcgacggcggtggtggaggatgggcgcggcggcgacggcgacaggggacggacaccgcggtggcggcgggggatagcgacgacggcagtgggggatgggc

SEQ ID NO: 3188 - DNA, 684 bp, Oryza sativa
ctttggatcaacagagaacatggtgctcgcttcaatgaatggttcaaggatcgtgtagcacggtcgaccgatggcccaagtgagatattacaaaggttggcaaggggtccatcttgggatgttgacacatggcaagggatgatatcaatagatacacattttacaccgtcacacaaaatgaaaaagcacagtgcaaaacagtggagtccatatagatgcatatcaggatcaggctggatcgagcacatactacggccgcatagagcagatatgggagctgaactatctgaactttaaagtccctttgtttcgttgcagttgggtgaatatccgcacaggtgtcaaggtcgacaaggaaggcttcacattggtggacctggccaaggttggatacgcagacgaaccattcgtactagcgaagcaggtcgaacaaattttctacataaacgaccccgcaaacaagaagatgcacgtcgttagggatggcaagcaaagaattgtgggggtggacaacgtcgtcaatgaagaagaatataacaagaatcttcatgtcagacctcagatcgaccttgacgatgatcccgaagatgaagtggcttacgttcgttcagaccattcggaaggcgtaccactgtgaatgatgcatttaatttgtattggagccttaatgaatgaattacatat

SEQ ID NO: 3189 - DNA, 9626 bp, Oryza sativa
caggcatgcaagctttgggagcaaagttcataccaaaggcttcttttcgattgtgtcaatgttgctcttgttgagatcggcgagaacaccttgctaagtacattcccatggagcaaagcacactcaagaacatggatggacgcctcctctcctgcattggggatagaagtctggagcatcctgaaagattggatttacggggcacggatgttcgtggtgagcaggagagataatgctgggatcatgatagagagagttgtgaagcaggaggttgaaggaacatgctgggtgaaaacgatgaggacgcagttggttgacatcaccgagcaaattgagggtggagtctgggaggagctcgtgggagaagctgtgctggattttgttcctgcctgtcaacgatgatatatgtctttgcaagttacaactggtgaatttctgccctttttttgtacactgtttatgtcattttacgccaggaacaaatgtgtactcgcttcgtcccaaaataaatcaacttctgtaattcaaactttgtcctaaaataaatcaacttctatcttcttatctactctcggttcgcaaattgagaaattttatttattaataccccttaccacctacccaccaatactaatttgctatcaatagggggtattttagtcttttatcctctcctttaattttgcactggattgctatgagttgcttctttgtaagacagagggagtatgtatttctagctgattggaagcttgtagtagcattttaaacttttgacaaattttgctatagtacaatcaaagttttttctgcataatttgttagtggacatcgaaaaacgtgacatagctgaagaatctaataatctaaagttggctcttttgctagctttcgattggtccacgtggcgcctcttactttgaaggaaaatcataaatttatactacagagaaacacctaacaatcatatatgaggaaaaatctagagaaaaatattacataatcatatgtgaggaaaaatctaaagaaaaatattacatatggattccagaggcttccaaaactatcttccctttccaatcacacaaacttctactcattttccttctataaatataccacacgtccacgcgtactagtattactcctaaaactcttgaatatatagtaaattcaaaattattaagtaaacaaaaatctaaaacaacaaatttacattcattttccttctttaaatatactacacttactcggtactactcctataactctataatatattgtaaatccgaaatcattattaaaaaaattacaaaacaaagaaagaagacaacattgctttcgtatatcacggaatatgatcgttaataactcatcagccaaaaaagccaaaaaaatcattaatacatcgttagccaaaaaatgtttttttacacatgatatattaaaaaaaatctaaatataccaatgattaatctttcaaatattaaaattcacaaccatgaatatgaattctgagtcagtataatattttaagtatataatatgtgcgatttggttgcctaggacatgaagaaatgagttaaatagtaaccatgagaagtgtgtcgagttaggttgtaataggcttcgttggggtaagtgatccttaatggattcgtttggtatggaagtttgatataaccagtggtgtctgggttgggtttaaactcatattctgccttgtattacgtagcattactgctaaatacttcacttttcctttataccttagtgaaagctgtcactatctgtcatccatagatagggccagcaatcacctttctaataatagcaatataagggtatttttaaaactttcttcatttatatcactaaatagcatgataactcctataaaacatggccaccttcctaacattgccaacacacagtagttgaaaggcggtaagcattccttttgcaataagtaacactttttatatgttctttgagagcctaagtcaatgtacagttgaaatccccaaattcgctctaaaattcataatgataactcatggtcactttaagtagattttttgatgccaaactaagttttagatgagatttgtgcagtgcgttgctaaactagctaaatataacactgtagctgaactaacccataaatatcgttttcttttcttttatttttcttacatagaggcttaaatctcatctaaaagttcagcagaaaaatctgctcaagtaatcgcaagttgtcaaacaaatataacgttctcacaaacaaagatactgttgtaaatattgattactattaaccatattatatgtaacatcattagaactgtagttcttaaccggttttttatttaagaagttttatgtatgtcgttccttatttttgcttatttagaatataatgtaatacttcaatatgttcaggaattgtgattgaccaagacatatgccatccttcgggttttgatttttatttgtgtagacatacttattaggtatatacattttagaaaatcatactgtaatttaagctagttattccaaaaatctttagttccgtttatcagatagggttttgatttttatttgtgtagccaaacttttcaggtatataaattttatgaaacaataccgcaatttaagctagtcatttaaaacatctttagttctgtttgtcagataggtttgggcagccatgtcatgcgcacgtgcagtaatccaaccaatgcacattcggcccacatattaaacacaagtacggttttagtctttgataaatcgtgtattattactgtagttccgcaaaatgtcaaattaaaattaaaggtaaatgatagttttcatatttacaattttgtgaaatttgctgcgtataattcggtacttctatgatggtataagtattaatgaatatttgtttataatctattgtatataatgtcatttctagtgtaatatcagacctacgcattatacaattatcttcaatgaaaatcatttcactgctgacaggcttcaactgcttacacgcaacctaatgttacatgtaagttaacgtctacctttggttattttatttacttttttgtgctcatcttgattgttttttccatttaactctaatctttttaatatgtagttatgcacgatgcacccgtgctgtttctataggtgagacaactttcggtttatgtttgatgataatatcttttatataggtgtggttaacaaaatatagattgggtaccatttgatagcttactttattgagacacgaattagggtcataattgtgccccttctaaacattatagccactttttgatctatcctctcagtgtactgtatttttgctggacaaacttgtctgtgaacttttctgaaactaatgttttgtgtctttttatttggactattaagggctactgattaggcttgaagtaatatactttttaactttgctatgcagttcccccatatactatcttgctgtagcccgagaacgaagctatttcgggaagtttggcgatggatcaagcatcaagaatgaagtttcttcagagttgcctgagtttctaaacgttccaaagattgctggtcgtgtcctaggcgtgatgttctactgttaaatgcttgtggactgtggtcgataggacctgtctcccagggttgtactcccttctttccatactataagatgtttcgacctcaacatctcttattcagatttactaacattcatccatatgaattgacttgtatataaagcacatacatcgatccacatatctatttaaaactcaaaacactttataatatgaaacggaggaagtaggagtgtggtattgttgtggagatcgatggcttgaatgaacctccagctagctaactcaccatcaccaccgttgcctgaaggctgagcctctagcatcaatatcacaaagacgggagcagagcgtcaccatcatgggaacatttgctgctctccatttatgcgactgttcacggagttaacgcttgggaggatttgggagcacgatgggctttactctgggcctataccaactccaggacatccaattctgatccacctaaaatcaactgggttttacgagtttggaaatgaaaaagtacatgaaaggtccctcaacttatcactgaattataaaatcgtcactcaaccgaaaaaccaaatatataacatatcttagcttacaaaatcaggtcactctgggtccttatacggtattaaccctcgatcttctctcccctcatctcccatcctacttctctccacgcggctgaagatgagcagggggtgcgcgtggtggccaacggcaggcaatgcggccgcctgaggacccctcccctcctcctcgccggccagcctatggtagtgcggaaaagcagccctcctcctacggccacctcgccgccgcccaccaattcgtcatccccaacgccatccgcctcgtctccaccggcgccgccaaatccccatggcggcggtgcaacccaccatcgccggccagggtcccctcccatcttgtgcctggagccccgagcagtaaccgtcgcaacgaactcctctcctctttgcgctctctcctcgccggagcaccaagaagccaagagctcgtcaccttcgctgctcgccgatcggagcaccaataaagcaagaacgcccccctcccccgcgcgcgcgctatctccgtcacttcactgacccaagcgccaagaaaccaagagcaccaagctcctccgcccgcctgctaaccggagcaccaagaaaccaagagccccgcgccgcctctgctgctcgccgaaggcaatgaagcagttccacagcaggcatcacatctggctgtggagccgcgtccatgacacatacctctgcgcagacgacgacgggagcagcgtttccatgtagttgggctgtgcgtttgtgcacgtgacgtgggcggtgcataatggcggatccatagggtggtccggacggcaatcggtcctactattaagaaaaaaggagaatagcgatcccgcgcccgcacgcgcgtggatcaaaaggaaggaaagaaactgaagcgtcgcggtcgcgcgacttgcgccgggcccagacatgcctttctcctcctcgccctgacgccctagcgacacgtcgagccgccaacgtgattagaatcacgcgatcatatcagactagcgtcgtgccgccgccggcccatgcgctgacgtcatgacgcgccatgccgcctggcccgcccaccccagtccgctcactgccttggcagctgcagagccgcagtgctgtagtgtgtgcccgccgcaatgagctgttgtcgagccgaggaaaactagaaaggagccacggactcacagagacttgcctcctaacctccttgctgcagtgtgccgcgcgcccgcccgcgtagacccataagggcacccacaatggttatctataggctctctacaagagatccatgtcagcatattttcttacttggaaagtattaaatgaagagagagagcaaagctatctactaacatagagatagtctatagagaaaaacgagtcaatgcataagagagctatagataccaatgtagacatactattaaggtggtttactattaatcgagtctattgctgatatgtacatgttttatagagagcaccttactttaccattgcgggtgctctaataaacaaaaagtagtacttaattttctttaaactttcatagtcttataagcttcgttaaatgaaaattttaattaattaataattttggatgttttaagatgctttaatatatcattgtaaacttttggtgatttagtctattctgtgtattgtactccatgtattagtatcattagatttattgtgtttagaaaaaaaaattaggtcggaccacccatatcctaaatccgttaccggtggtgcacatactccactagaacggcttccccatcctcatgctccacagcgccgcaaatggatgatacctcgtggccacaaacaacaccaccatcgttcatctttgtcgactggctcgctatgctatcaggtgaggatacacacactactctcatagaagcacaccatgcatgggctcgaatgagtagagtagcgtccaattaatgtgtcgacgccggcaacccgcggcacgttgaccggcacggcgccgtacgtacccacgatgaggttgaggtgatctcgtctcccgcgtcatcgctaccgccacggcttcgcccgtcaccaccgccgcctcgcaggccgccggaccttctcctctcccacctcgtcctgccgggtggcctgcccagagaggagaatagtgagagagagggagaggagggggagagatgatgatgtgtcatcctgatatgtggggttcatgtagagtctcacgctaactcagctgccatgttggataaaaccgcggttaaaaccgtgcaaggaccaaaagtgatcaggttttataaatcgagggatgatatatatctagttttatggttggacgatgattttataatccgatgataagttgagggaccttctatgtacgttttccatttggaaataaaacagcatcctagtatcctacacgtctgtaggttggtaatatctcatcgcgaaaaaaaaaggttgctgatatcggatacggaatacccaaaggatctcgtatacacacgcaaaacatgaatatagaacgaggggttcgcgctagtggcatggattcagttgatcggaatttcatcccaagtccatccacgtcgtcaacggaggctcaatactctgtgaggttgttatatggaagacggcgtggagttagatcgggatttggcggcgacgagagaggaagcagagcgcgagatactcaacacctggatatgggacaaggagatcgacttattgcaaagggagatcgaggagcaagacgaactaagagtttaatagtatcgcccgttgatgggctgaaaatttatacacgtaagtaatagatggtaccaatagatgatacgtataataactagctgctaagttacctacccacacatccctaagcagttgatttttatttttttaatcagacttgtttccttctacccaatctttgatggagcaatggttaagtcattggacaaaagctaggactgagggctggttctcaggatttgcatcgtttcctgtgctggagctcggcgattgcattagcgcccgctgccttctctctccggttttctctctcttccacctatgatttctatgacgtggatgcttgtgtcgctggcttatcgtactctattatacctgctctaagtcgcctttgacgcgagcaagagagagaagacgacctatacgtgtggaggatgatcgaggagcgacacggagaaccctgtcatctcgaagatcatgaattggagaaaatatatgggccgcccgcatacgaaactgataatgactctgatgagggtggagtgtctttttacagcaatggaaggaacattttcatgaaatacggcgatgggtttaggtatgaagacgggaacccttattatgcagctgatagggaggagacatgggagaagcaaattctcagacaaatgaagtttcccatccccgatctttcagaatcttgggaggggtctcttgtggttgaagggccattcaacttagatctaaacctaacatttacggatcatttgagtaagtccactagtccaattcgtgtactaacaatccaaatgccatctgttatagaaatagtttttatcagtacagactcctttatctaatcacatttagatcacaaacaataattcaagatgtactgatttgactttttttttttgattttctacttctagtgcctgcactccccaagtgggaaaggcgatggttagatagggacgggaaggaaccatgacgtcgggctatccaagtacttggtctgaatctgtcttctcctagtaatgttccattggagatctatggtatatttgcattcagagatacacgcaatagtcagatgcgcaactatgtctttgactactcaagagaaaacccatgtaaacttaagccggtaagtacttgacgatgccataccggtttctctggtacttcctgaacaattaatatatactacatattgcaggtctaatctttttcaaaaatatgttaattacaatccagggtgctcattgcctccaatctctgatgacccctcctcgaggcatttatgcagttgggattgtgctaattgagtatcgcctaattattaagggtcaaaaggaggaagaagatcaagtgttaatagatggatactctatgtacgctccatctttctatgcagattttcaaaagctcatatggcacatcaacactggtcatttcggcaccatttatctgacaatttttgctatcccgaaagctgtcctggttgatttggagtttgaggtgtgtcaaattgaagataaccacgagcatgattcactcgcaatagttgcaacctactttaacattaatacttcttttattatcttcaacggtaagctgggtgttggcaagctacctccgctcacattgagcgcgagacatgataaacatttctccataaaagtttataaatactacaaccattcgggttgccatcccgatggtgttgtcaggaactgtagattcggtacagaatattattttgaggattttctatgtgaaagcttgtcttttacacctcaaaaatatggaaagagttcaaaaatattgtcccgtaatctggacggcattcagatggctatgaagtcgacatggtttattatgtgtgaaccatgtctataaagatcaaggccaaagttcatgtaaagtggtatgctgtcatatatattctctattctctcatatataattctgtattttataccacagtttttagattgaatatataaataattgatacgagtaccagctggatatctttgtactctgtatttgatgtcacagttagcttttctttttctttcctttttcttttcaattcattcgtgatggttctatgcgacccgtcgcgtctcggcctggcttgcttgtttttcaacgaagcagaggcactgcagagcatcgcaacacgagggagcagaggcgctgtgaaatccaagtgctcgctcaacgcgcttgttcgcgtgaaattctcgaggggatcggtctcatctcagtcgtcatcgacgacggatcagcggcccaaatcacgtgtaggcgtaaacggacctgactgaaaccgcagggcagttgaacagggcagggctaatgggcgatcgatcgcatccccacgccccattacacacctctccttcctttctcctcctcttcttctcttcctactacgctataaatttaaaaaaataaaaaaaaagttgaaaaaatttatgtatagaaatactatatatataaaaaatatttgaatttaaatttaaatttgaatcgggtatgtaaacttttggtttataaactttgggtctataaactttaggtgtataaactttagatgtatagacatactatgtatagaaaatatttaaattcaaatttaaatttgaattag

SEQ ID NO: 3190 - DNA, 10840 bp, Oryza sativa
tgtataaactttagatgcataaaaatactatatatagaaaatatttgaattcaaattcaaatttgaatcagatataattcaaattcaaatttgaaacgggtatgtaaacttttgacttataaactttgggtctataaactttaggtgtataaactttagatgtatagaaatactatatataaaaaaaatttgaattcaaattcaaatttgaatcggatatataaacttttgacttataaacttttggtctctaaactttagatgtgtaaacttaaggtgtataaactttaggtgtataaatttactaaaatagaaaagtaatgtggtgccaaaaaagaaaaccaggtagagggaggcggagacccgatccgatcgcccctggcagcccctagcgatcaatcgcccaataggagtttcgagttgaacacacacctggccctatctgggccggttctcctgcactactaagggcccgtttagttccttaaattttttttcccaaaaacatcacatcgaatcttttgacacatgcatgaagcattaaatatagataaaaagaaaaactaattgcacagttatggaggaaatcgtgagacgaatcttttatgcctaattagtccgtgattagccataagtgctacagtacccacatgtgctaatgacggcttaattactctcaagagattcgtctcgcggtttccaggcgagttctgaaattagttttttcattcgtgtccgaaaaccccttccgacatccggtcaaacattcgatgtgacaccaacaaattttcttttctccaactaaacacaccctaacatacaggcctactgccatgtgaactttcccaagtccaataggcatgttcatttcgtgggcctgatttcaggttatgtccggaaaagcccggcactgcaccaatcaattttgacatggtgacaaaagctttgcatcaatcttgagataacaagagatgcatgcggtggcaaagagctaaagagtatgtacggttttaactctgaggtgtcgtgttcaatcctcaatatatttacaagaaaaaaaatgtttggagtgtaatcccactcttcaaatctcgttttttttcacaagcggaagaatcattgtcccagtgaaccatcgtctccacggtatatgaaggcgtattgttgcctgcaataaatctggatgcaggctgtcttgatgcacactgttcgttggcaccgacacttatgttctagctacaaccacgggaaaacttcaaaagcgattttcagcacggcacgggccacgtacgggcacatggtgcatcccagctttttgttgatcaatgatcatgccaaggtagcgtaccgcgtagcgatacatccaaatgagatttttcaggcgagaacccccccgcatcacaagcaaccacggcatacggtccctaacgcacatggtgagatgcacgaattaacgcgtcgacacgacacgcacaacggacgacgacgagcagtaccagcaatccaacatgcatggggcggcgctcgtactccgcgacgagcccacggacacgggcgatatgaagccaaagtgccaaaacaccaccggccggggcgcacggtcccatcgtatacgtagctgcggcgtcgcagtcatggagagtggatacgtcaatactggttgaactatacgaagaagtacaggagatccttctaaaaaatggtttatgttacaggcccagcctgtacaccttattagcaggtaatcacgcaggaggttctgtcattctttttacgttttctttttttttttttacgaaaaacgtatatgctgatataaacgcgcgccgcgcctactcactccggtattcttaaatgcataattctcgatagttgtatcttgtttatttttatttatttatttttgcaatgagggtgctcgcatatagaaatgcattactttgggaaaagatgtgaaatagcttgttgggatttccaactttagtatattctggtgttcgacaatcgacagtagtgtaacaatcatggccatgtatatattaacaataactagaaagaaagcccgcgcagatgcgcgggcatcttattgaatgttttataaaaataatgctaaaagaagttacatctcactatttctacttaaatgttataaaataataagaatatatctcagattaaaaatacactttgattgagtgacataaattctcatattgtcaccactacttactatgctttaaaacctaatacatcattaatacactaaattatccactacttacgttttatgtctcatttttttctaaatacatttataaatattgtaaaaataccaccacttctatccattaatggaatagcaccattaaagttaaacacgaatactactctaatgggtgaagttgattgtagccaccaagacttcctttctctattgccttgaaacatgggtcccgcatcgatgtagccatgctcctgaagaccagtttggagcataattttaatatacttcctccttccaaaagtctaagttatatttctttttcactaaaaccaaggtgtagttaactcattcatcatgtaacaaaaccaatgaacatgcaaccaataagtactaaaatgactttttgggttctgataaaaaatttaatatagtacatagtgactacaaataggacttagacttttggaaaaatcaaagaatgaaataggacttagatatttggaaggagggagtataattcattatcacacgctcatggagtattgcgttggtaagtagaaagttgagtactattagcgatggtggcctccactgggactgtcttaacttagccatatattccatgctatacttagtacaccatagtaaactttgttgttcatgtttggtgtcctttaggaaagaacaaagacaagatggaggtgaccaaagtagtttttaaaaatgttttgagcatatttgtggtgcagtgtagatacgatttgtttatgttgttgatcattactactcattttttttatgatatagatagaatactctcttttgaacatgactgaggttaatggttcgacgatattttttaaaaaatatagctaatgagacataccaccacgataatatccagagcatcatgttattatttatattttgacaaatatgtatagtaaaatagttctaataatataaaactactttgagaatcttaatctcaaacaaattataatttaatcagacctacttgaaaaacacaactaaattgtgttgtttttatttttacatatgcagatttaaattaatgttgtatatttgtgaagtgatatttccctccctaaaatatgatgtgatttttttgaaaaattatcatacatatgtcagcctcatgtgccatggtgtatttaggtccataatataacttttataatttaattaaagaaatacaacatgattacaaattggatatataatttcaaaataatttagaagatggtttaaagaatatttattgggtattctatgtttttattatagatcttagtttaacttatatatatttatattatatttgtgaagtaatatatttcatatttatattgtggaaaataaccgtccgtttttatatatctatgtttcttttctatctatgctcatatggtttttttccgttccgtgaacaggagaaatttaaattgcacgcactactcataatagatctaatctaatggtgtagaataacgggtccaccaatatcggagaacggttgtagtgtttgtttctaaacaggaggaagttattattttgcaataatagatctaatctaatggtgtagaataacgggtccaccaatttaagtgaaaatcaacgatgagattagatagtgccacatggcggcttaggagtgtttatagaaataccacatggcggcttaagagcgtttataggaagtttaatggacttttagtatataatagatagataaagatagatagatagaagatagatagatagatagatagatagataatagatagatagatattccaacaatgcttgaatggtgggataacacgacagacatgaaaggagttcccaaagcaccctaacactgctaatgacatgagagatatggaatgaaagaaaccgtaaaacttttcaacgtaaagagctctcgccaatcagcttgctagcaaaaagaaaagaggaggccaaaacttggaatttgacggacgtaagaagtcttggtgtctgggtaactctttagttcactcggaccaaacgtcctgagcttgtacagtgttattggttgtaaaactttcattgtattttatcctttgtctattcaataaaattgacggcttgccgattcgttaaaaaaaaaatcggtggacagttcaacacaccctggccacgtttgggtcagctctatcatcccattggccctagcaaatggcactcattttgcaactagaatatttggatgtcctctggggcacaggtaaagcggaatatattaggccctatgtattactaaaatgtgaaccttccctagtcaatagacatgatccttcgtgggcctggcttcatgttatcgaatttcacaaaactatacatatatttgattaaactattacaaaacaataaattcgaaatggtgtaccatggagtaaaagatgttagcattaatttatcacagaattataaatttaaatcgaagtatcacaaaactacataatgaagttatcacaaaactaagtgatgtatttagagaataaattctgagcactaataatgctcttccggagttacaaaacatgcaatttcaggataaaatcggtgcttctgtagttttgggatactatgcgataaatttggagttccgtgataaatttagtactaaactatagttttatgatatattattcatagttttacaatagtttatttaaaatatgtatagttttgtgaaatttgtattcaacctattttgacatagtgaaagctctaccatccagaattgaagtacacttcaagtggaaaaaccattctcgatgcagcctgtcttatgcacacgtcgttggcaccgacacttgcatttctagctaaacggcatgccatggtgaaaaacagaaaagcgatcaacacctcacgggcacatggtgcatcccaacttcattggtcacgcaagggcgtaccgcatagcgtacatccaaatgagattcgcaggcggaatccccccgcaaacacggcaacgaacagaaaatgcacatgctgacatgcattatacgcactggcacgtacaacggacaccgagcaccaacaaacccaacatgcacgacagcacgagtggtacaccgcgacgagccctacgaacgaacacgggcgaaatagccaagcgcaccaccgtggtggcgtgacgcaaggtcccatcgctagctgcggcatctcagtcgtgcggagtggcatatcatgtcacgtagctggagaacgaccgagccggcgcctctctacccgtctccggcaccatcatgtccttatcgatcgccagcaacgacgcacaccgcgtatgtcatggccgattcaggtgacttcacgtggtgcgcgcggtcgctggggaagtcctgcggctgtgcggggctggacgatgctgagctcgtcccttctgatggttcagctgttgctgcagcgaagcagagcagcgcgacgaggagatgggtggtccgcaatttgacgtggctcgctatttctaagatgttgtaccgctcacaacgcgcgtacagtcacacctataaacacacacatacactctatccttataagtatctccggaagactggatcggtatttcttaagattgttaaagtcacccatacccttataaacatcttcggaatactgagccggtatttcttaaaattgatgaaatcactacgagtatctcgctttcacacaccctacctctgtgcacacctctggaagactgggtcggcatttcttgagattgacgacgtcaccacaaccggtatttcttgagattgatgaagtcaccacgggtgtctcactgccacacaccctacccctatgtgcacctctggaagattctaccactgataaaattattagccgcaactgtgagcacccgtgtcaaatctaggatgtgaacttgggtgggctgattccagaagaagtaacctaaccagtcgagttacactcacttcacttctaagatgttatttgatgataaaatagtattgaaatgggggtgttgcttattatctataatacttgtgtgttcgcatggctcgatctgtatgtaatgtcggtatgtcaacgctatgaagttttacatttaatttgtattcacaatggagaagatttaaaaaagacacgaatattagggaatgacctaatatcaaataattagaaagggtaaggttttgaatccaggtcgtctagcccaccatctttgtggagctagccggaaaacctctgggtgtttctcacaatggagaggatttttaattgcatgttattatcttaaagataatggacataaatttgtctctatatttacaggtgaatatacacagtccaatattacataagtgaatcacgtaatgtagatcgtcgctagaagattaagcttcaagcattttatcctcacctaaaacttcagggagatgcggagctagaccaccgttccgccgccacatccactcgctaccactgcagccatcacaaaagctacttcgtttcgccttgggcgaacgaaagggatggaagtagttcgcctagctaccgtgcgaacaacctacgcaccctacaatgcgaacaaatctgttgccgcaacgttgccatctcctcacctagcataccatagcctctgctgagcttataatttaacgaagataaaagatctacacaataaagattttccattttcactactaagattatgctaaatagaggaccaaatatactagctacagaagaaaatataatctagagtttgtacttgcgtgaaaaacagagtaactctgtttcatgcgtgaggtccttgtaaaaaacagagtaactctgtttcagtcatttaaaaagaaaagcgtgacgttctcgtcgaaaacagaggaactgggtgacagtctttaaaaatagcgtacagacgtaccgtacgtgatatgttcagccccatgttcccaatgccaccgacattttggtgctttacatgatgttattttgaaagatacgctttatatgatgtaaactttatcaaacatgtagggcagggcacacaccaaactttggtaatcaccaatgattttcacatagtacaggtacacaagagtacaagaggtgagatctagacgtgacagccatagctagccacacgtgcagagaaaacaaaccacaatgacgactcacgagaacacgaaacgaacacaagaatacaaagagcaaataccaccgagacgctagcttctagctgtcccctactgcatgcatgcaagcctcacttgtgaagtgtagcgtacgtcacgtagctggagtagtcctttgccaccctgtccgccggcgccgccgcggcgttggcagctgcggcggggcaggccgcgtgggtggcgctcgccgccgggcaagtcttcggctggctgtggaacgacgcgcactccgctggccgccgctggttggcgaagcccggaatgcagttgttcttgacgttgaggacgccgtccttgatcagcgacaagcacgccggcccgaccgacgtgaagtagttgctcgacagcgtgaggttggcgaggcggccggccgggccggcggcgagcttgcagagcgcgtcggggatctctccgtagaggcggttgccgcccaggttgagctgctcgacgctggtgaggcatgagaaggaggagggtatcgggccggtgagctggttcatgccggcgtcgatcacggccgcattgatgagcatgccgagctcgcgcggaaggcagccggagagctggttgttcaggagaagcacctcatggagagtgtcctgcaagtgcgagattgatggcgggattggcccggtgagcttgttgttggcgagggcgaggtagctcaacttagagaagccaagggtggcgggaagaggaccagctagattgttgtaattcagaagaagcgcctttgaactcgtggctccaggaaatcctcctcccttcttgtcaggagttccaatgaaaaatttgaatcttatgctgccctgtaaacagtggagaacatcgaggtctacgcctcctcctccagatgtataaacagaaggatgggctgggagatcgttgttgacattgatcttgtacatgtaagtgaggcctgccagacgaggaatgtcgccaccaaaatagttggaggcagcatggaaaaatgcgagatcggggagttggtcgatgaagccctgcagtttcggggcacgcatttcatatccattcaaaatgactgccgtgactgtgagcatcttatcttgtccaggtgtggaacagtggaacccgagatatgacgtatcgccgcagatgtcatggccactccaggtggatgtgatgttcttggggtcggacgtgacggtgctcttgaaacgctggattacaaggtaggcgtggtacagccggtcgtttgggaaatcccgtggctgcaggctgtgcgatgccgaatattggctcgtcttgtagggtatttcttcggagagagcattatcagctaccagcacagaaatgtaagtgagtagtaggaagaggaactgagcaaagggccttttatgttggctggccatgtcgatctatttcaactcagatggtgttctgctagaggagatgatcaggccgtttcgaatatgaaatgaggcctaattctcatcacatatatatagagagagagagatacagggagggccatatttcaatggaagccatagtatgacttatcatgtgcggtgtctccttgccaacaacaataaccttcgcgatcagtctccagcgaatttgttaaaacttaaaacttaaaagggtatgttttgtccccaagtatcaggtgcacccagtcctgatacgattttgctatatatttgttgacaaattttttccccaaaaatttgatagatgtaattacagtacaatcgtagtgtaattacactgtaacttgtatgtaattacacagtaactatagtgtaaattatatgtaacttttaaaaatctctccataacatattatttcggtaaaatggaggtcgtgggaacaaattctttcatatatgtgtgtgctatgatttgttttcttcctcaccaaaacaaatcgtgtaatagatttaacgattcaaaattatgtgacacttacatataagttacattgtagttacatgcaagttacagtataattatatacaagttacagtgtaattacactacgattgtactataattacatctgttaaatttttggggaaaaatttgtcgacaaatatacaggtagtcccgtcctgataatgcacacatgtcaaacaatcagttcccttcaatcttcacccaaaggctagccttgaagtgtagaaattctgcatggggtagcctttggatggagaaggacgagggtcagttttttttcctagtaatatacccacgcattggaacaggatcataccgccgaaaatgggctaggcctcaaaaatggatctgatttttatcattatattttcctttttttcatatttcctttttagcgatttttccccataagtatagggtatctcatatttaggacaccgactacagcctccgaacttataatgctccaattttcgccccgtcaaaaaaatctatttttaataatgttggggaataaccccacggtatattgttggagaagacctcccataacttgggtgttgtataaactaatgtagtaatggactagaacgcccttagggcaatgcccctctgatgtaaccaattaaggatagtactgtaattttctattatatatgaataaaaggagccctccaagagcaggggggatctccccattccattcaatgaacaaccatcctcactctcttcctctcatcttatcccccatggatctaagcttaggctccctccaagaaaaggggtgcctttgccacgcttgttagactttgttccaacattcaacaattaaaaccctatattaaaaaaattggatctttgagtgtatctaggtttgtttgtgtgccggatattccaatttctttcattcattgcgaacttagaatagtggccaaatcttttatcctaaattaaatttcctatgatttgaaatttgaagttcaagttttcccctcctaaatctttcaaaaaaaattgcttttaaacttcaagcatcccttctaagccactcataaaatttacattcaaactcccgatgaaagtcctcgttacatcctatattttatttctccacaaatttatctaaggaaaaagtacacccgaggtccctcatcttatcatcgagttacaaaattgtccctgaaccgaaaaaccagatacaaacgcaccctccaacttccaaaactagtggaaacgaggtccctcggcggttttgccctgtttttggcggatgtggcgcttacatggctcctttgactaggtctttgttccacgtggcactgacgtgacagtttgatccaaaaataataatgaagtaataaaaatggtggggcccactagtccttcctttttctctcttcttcctctctttcttgcgttaggcagggaggaagggcagaggagggggcgccatcgacggcggcgggggggggggggggggagg

SEQ ID NO: 3191 - DNA, 3912 bp, Oryza sativa
cagagtgtcaggaaaccatcacaaatctaagcaggcagctgcgagctcttaagagtccggcagtttcaggcaatctagacagcccagtgtccaactccagaccaagctcatctgactacaagccccagtcacttgcatgcattcttgctgaaggggaggactccagcactgaggatgccatttctcctgcaaccaaagaggtgcactccaataaagaacctgatgctgcatcacggaaaagcgtagcacaagatggtagtgttaatgctgtcctcaaagctgtggaagaggaattaacacaagccgttgttcatccgatcttcccagagccatcccaagagactatttctgctgatctcaagaagaagagacggagccccagcttgctgggcaggataatgttcagaaagaaagtggaaggcagctagatcatgctgctgatctggtggatgcactgtgatggtaaaagcttgcaaaatctagtagcactccaccactatgctgtcactggagatttcgactttgaacgaacgagcttgttctgtttgttgagcattcctgttccttagggtgcaacctttttggacacgtattctgtcacagagactgatgacttgtggaagagactctgagcacatgatctgtatcggttttccttgacatggacaaattttctttttgtatttatggcctccatggttgtgtaaatgttaatttaataagttaaaaattcgttcttgttcactggaatacgtacatgcaattctttttttctgtctgagcggctccaagtttcaagacctctctataccgtttggaaaaatccatacaccgacatgagattacaggtacagaagtagagattttggaaaatatcacaaattcacaatggaaaagcattggagctggattgcttctgaattctgatacagcagtcagcagaggaagatatccattgtgccttttgaaaccacaatagagatatactgttagttgccctgtagttgtagccatttgaatgcaaaagcatttcaagattcttttaggtagggtgaggtcgccaccagtactcatcccaagaaggattctctcatcacagggatgtgaccttctgactttgtatacagaatactatatttgctttataaacagctgaaaaataccaatcatgctttcctttccaaaaaaaaaaaactaatcatgccggtgattgtcgtaatcatttacgaggtgtacagtacagcaccggcccagctgatctcaacagaaagaggcacaattggcctaggcctcatcatctagaagcaataccgtctaaactaatcctgagtcagcacaaaggatggccatattcagatattctaaaggcggccgtgacaggatagaaggcaacaccatcaagccactggggtttccagactctgaccgatcgcaaaaacaaacaaaagtctgaagcgctaatatgcttgcgtcaaatacaaaagaacggcatcactgcgtctgcatgctactgacaattttctcaaggctttatattcctcgagtcatttgcgttgcagttgcagacaactggatgcagttctgctccaataattagattatcattcaggttgcagacaggaactcatccaggcccggtgatgcctgggacggcaagagcttgtctttttctttcatttttttttgtgttattttctgctgctgatagactgatgatggcaattgtttgtcacttgtcagtcatgtactctgcctcgtactttttgttgctggatagcgttattcggcagcgtagccatgttatcatgtcttatcttgtaggctttctttgggttgtaatgcaggccaaatggcaacttgtaggatggtttcagatccttcacgccgcgtttggtttctgaaggggactgagatttcgtctcctcccatttggttatagctatctgtctatcaccacaagtttactgtttgcttgtgttcttggtccaattcagacttctgcagtgctgcttgcttgacctgcagctcatccaaattccatgtatacttttcttgccatggttatcctttgtaacactaaactgtctctgcacctgcgttgaaagttgatttgcgtgtgatgtgtaacacgtgttcatgtattgcaacttaaacttcatcacaaacttgtttcactaatttgtcaaagttttgctttttgcaagtttgcaaccctaggaacttcattacgagaggtgatagtacaaatgatcaaggacagaagaagatgccattctcagtcatgcaattttgtacttcaacaaatgagtcttttatttttttgaaattgaagctcttccccgatccttttctcatctttattccagattatagttatagaacctacctccaggctccagccctacatctttacaccccaaagaaaaagcaaaaagaatgaaaggggagaaaaaaaaagaagaacgaattacgaatcagaagctcactatataagacaaccttttccatctttttaatcttttgacctttttacatgtttacatctaggtaacaacatctagaagatacaaacatccatggaaaactgcagccgcgatgtcctaactcctaagcatattgtcagaatcagccattaactgctgctaattcctgtttgacaagtgagccacctgtccctctcatcagtgcttacgtcagtctcgtaatgagatctcgaacaggtcggagtcggcgtccgggtcgccggccgacgcgccgccgccgccgccgttctccttcctgctcttgctcatccgcgacgccgtctccagccagccggagtcgacgcggcccatggagaagaggtcgccgctgtcgtcgaagtcgaggcccagcgagccgccgctccggccgtcgtcccccgccgacgcggcgcggaggaagcacgggttcgccgtgcgccgcgcgttcgccggcgcgtaccggaacttgccctgcccgaggttgaccagcgccatcacgtcgaagctggaggcgaggaccgggtacatcggggccgagaacgcgtcggcgttgcagctcacggcgtggaccagctgcccgtccaccgtgaagaacaccttccgcctcgccggctcgaagccgcagcccaccaccttgtccacgcccgcccacgacgacttctccgactcgtacaccagcttcatccctgccatcgaatccgcagaattttcagctcaagatttccacggtcgcaacgcgaggaagattcttggaacggggggagtgattgttaccgtcgaggtagaccgcaccgttggagtggaagccgatggacgacgcgtacgttccggccagcgactgccgtggcggcgcggcggacgcggcggcggcgaggcccaacgacatgaccgtgtgcctctgcttgtcgtggtgatcgtcggctttcgtggcggctctggtttcttgggccgcgttcttggcgtccggtgcaaagctgatgagcttggcgcggtcgctctcgctggagccgtccctgccgcggcggctcgccctcgacgccgaccactccggccgccgcgtgttgaggtagatgatggtgatctcgaagtaggcgtcctgcgggaacggcgcgccggcgaggggcgggccgggcagaggcaggctcatcctggcgaggcacagggcgctgctgttccccgccgcgtcgtggtcgccgccgcggagcgggctcgggatgctcccggggagccacttcttggcggacgccgagacggccgccgtcgccgcggccaccaccgggttgagccgcaccgcctgcatccgctccgacgaccccgcgggcacctcccacgcggcgtccgccatgtcgcggctgtcccggagtcgcaggcggggcagagcccccagagcggcgacgacgacgccgacctc

SEQ ID NO: 3192 - DNA, 762 bp, Oryza sativa
ttttgcagctgaagtgttctacatatacgtgccaagactcaaaactcagagagccaacctgacaacctgtaaacaaacaaaagatgcgtgtcctgaaggtgctgctgctactgctctacggcgttggcaacatcggttgctcaacggttcctgacaacacaacagatatgctctctctgcttggtttcaaggaagccatcaccaatgatccattaggagtcttgaacaattggaacaaaagcatccacttctgcagttggaagggcgtctggtgcagccccaagcaccctgggcgagtcacggcgctcaacctcgccggccaaggtttgtccggcaccatcgccgcttcggttggaaacctgacttctgttcgttcagttgatttatccagtaataacttctccggccagatacctcatcttgccaatctccagaagatgcaagtccttaatcttagcttcaatacactggatgggattattccagacaccctcacaaactgttccaacctgaggaaactagacctctatacaaacttgctaaagggtatgattccttcggcaataggtctgcttagaaatctagtttacattgacctttcccggaataatctgactgggatcatcccggcaagcctaaaaaatatatccctcttagaaacaatctatcttcaagacaaccaacttgaaggaagcattcctatgagcttggccgattttcaaatattttggttctggtcctagggggaaacaggctatcagg

SEQ ID NO: 3193 - DNA, 2226 bp, Oryza sativa
tcctgcagcccagatcatgccggagaagtccagcgactggcaccgctcctccatcagtatctccttcctacacacaccgtcctccacgcggaagctcagctcttgccgcctccgccgcctaggaaagtcacgatggcgcacgacgagaaggacactgcgatccccacccgtggccgcaggtgcagccgtcgcgccgcccgggccgcggcccaggaacccggcagctgcacccctcctatcctccgcctgccctcctgcgtgcggcgcgccggctctaggctccaagcagtcaccgtctgccaatggggtgatggattgggaggggaatcaatggaggattggatagaagaagataagggcaaaaatgtcattttttatggtttctctcttattaattgggcgaatattatattttaatgcatccagtgttcagcagcaaattaccgcaattttgaaatgttctcgaacatattcatatctttgtgatgttcttcagctaattacgcattttctgagtgccctggaacaaattttaccataatcttaacttaattaaaggattcatatttttttcaatcgtcacctcgctttccgatgattttcgtcggtcgtcgtccgcgtccgatttgtgaacctggaaaatgaatcgataagattaattgaaatcgatctggtgcggtaattgtcatcctgtagcaaagtaatcggtaccattggctgggcctaacaagaatgggcttgcagcctgctgatgggatttctgcatgagagtctacatactcaactgatggcaatgcaaacgtgacagctcatgtcaaaatatatttatcaaaggttgataagcagttgtcaaaggtagaacacgggagtttttttcaaacgcgcaagagccttgcacgtagaagataaaattttgtataactgttaaacgtggataccaagtatttttttttcactagacgagtcattaacacatgaactatttgattttttaaaaagaaatttctatatagaaaacttttgtccgaaacgtaccgtttagcactttgtaaaacgtgctctagaactcagccttagcctagaagcattgagcactactcagtcgtaacaagaaccgctagcatgttgtctccaatttacaatccacaatcacttccctctaatactacctttgttctaaaaaataaaaagaagttctgcccaaagtaaatctaggggttataataagaaacatccataccaatcctggaaaaatctgaaacacatatataaaaaagatcccgttgcaacgcatgggcattttttttgctagtaaaataaaaagcagagtgaatggtagacacatgatatatatatagtaccactggtggagaaaccgtttgtaatcccgattggtaaccccctttagtcccggttgtccaaccgggactatgaatctgggactaaagatagctatatttagtcccgggtaaaataaccgggactaaagatcggtcagccacgtggccggccgagccatctttagtcccggtttgtgttacaaaccgggactaaagattggtgcactatttttttttatttgcatggccctgtttgctgcatggttgattatatatatatatatatatatatatatatatatatatatatatatatatatatatataggacactcatatggggcaccatggtgcccgggcaccatggtatcaaatacacaaaatatatatatatatatatatatatacacacatatatatatgcatatatatatatatacatatatacacatacatatatatatatatacacacacacacacacacatatatatatatatatgtatatatatatatgtatatatatatatatatgtgtgtgtgcacacacacacacatatgtcacaatatatatatgcataatatataagcatatataacacatacatatatatatatatacacacacacacacacatatatatatatatgtatatatatatatgtatatatatatatatatatatatatgtatatatatatatatgtgtgtgtgcacacacacacacatatgtcacaatatatatatgcataatatataagcatatatatatatatatatatgtatatatgcatatgtgtatatgtataaatcatatattgcacacatatgtataatttaaagcacttaacattttatgtgcatatatgttaccaaaatatatat

SEQ ID NO: 3194 - DNA, 1663 bp, Oryza sativa
aattcctgcagcccatacgtacatcgagctctcgtgttgtgcatatttggtttgataggcagtgggcatactcacatacgtagtagctgcataagttagttccctggttctgctttgcacactacataagaaacgatgagatatttaatatactatttatattaactgtaattagagattcaattcaatataattttggatcatgcatgtactcactggaaaatgaaacctccatccaagtttttctttccaagtcccgcggaccaattgacggaaccgatcccaagccatacatatgcagttgcaagctatgattaattaattattacccgagatcaacataatagcaatagattccccgcgactttggaatagatggcattatattacctgtctatcagttggaagaccttttcaaaaatcttctcctctttattcattgagtcgtacacagtgactctgcatgcgtccaagtcgaagaataacaggacccagtggaatctgaaatatgcgtgagatgatatatatatatatgaaaatgtacatgctatatgtatgggaacaaaatttgttcgaactacaataaaaactcactctgtgttgtacggcagtagtatgtacgtcttgaaatgctgctacgttaggagatggacgagattgtcctctgtgtctttctcgtacttgtcgatcatttcggtgttgattttccgagggtcgatgaacctagtatcgtagaccctccgccgtcgggccctttgaatctctattctacaatgatgaatggaaattattattgcttacatatatgccaggagctaattattgaacgaaacaaattgaactcaaagatactcacaaaatccatgcgctcagaagagagacgtcgagggcatccagatggtacagatcgaagagatccttgaaatggatccagagaacatcttctccttgcaagaagtcggggtttctgatcctcgctctgaacatctctctacccttggcgctcatttccatgtaccgttcatggaatttgtacatctgtgtcagtagggactgcagctgctcaggcgtgacaagcagtttccgaggtttaacttcgtatgccctttccgccttcgggattgatgcgcctcgaatcagctgatccacagttagaccggtgtctgaaatgaattccgttataccaaaatcttggctggtcaccaacggctcgacctcgtggtttggttgttctccaagctgaaggactggtttggacttcttgtgataggctctctgaagtgttcggtcatagtccgatatctgtaaggcctccttgtttgttgcggacattcccttgaagaagttcttcatgctcgggtcaataggtatcttctttttatgactccgaggcttgagttgcctcttcacttctcctgtcacataagcatcaagctcctcttgactgcaatcgtacggtggctccttgtttttggtggcgtcaactttcgccttcttcgttgtccttgtgcgggcaggcggtggagcttggcgagaccttgtcttgggaggtgcaggcggacatggtggaggtggaggagccagaggagccggaggagatggtgcaggaggaggtggcagaggagccagaggagatggtgcaggaggacgtggcggaggaacc

SEQ ID NO: 3195 - DNA, 2449 bp, Oryza sativa
gcgtctcaccgtctcctcctgggtagtccaactcgaggtcctcgtacgcggcttccaccagctcaacttcgaccctcgagtatcctgctggaatcggtctgcagtggtaagtcccgaaagggtccattgggatggccaatcccgacgccaccttcacgtgatgagaggttatttattagtaatcaacctaagcagcaacttgcggaatgtacaagtcaaaaaatcatcaaactacgagcataccttgattgataagttcttcaagggaatatgcagctcacatggtgtccgctgcatgatctcatcaacagggcaggtggtttcgtcctgggtttgcatggcgtccatgctctgtgattctacctgccccgttaaggcgcagctgctacgattgcctgatgggctgaccattgcaggaggaatgtacggctggggatcctgggaccgatgtgcggccatacgttcatccaccttccttgccacctcctcttgcatgctgagctcgtagctcgataccctgtactcaagatctgcaatcttcgccctggatgctcgggagtctgtagggcgagtgacagcttgtccttctctctgtcgggtcggaatgtgccctgagaagaggcttccactgcgtctgttagtcgactggcagcctcgtatatctgatcgttgaagacaagggagccatcaactgggttaagcgttccaccgtgagcatagtaccagaacttcaatcgatccggccatttagcggtggccggttcgatacccctctcaatcaaacttgcctctatctcctcccacttcggcattgcgacgctatatccgcctgaccccaagtggtgatggtacttcttcttggcggcattttctttgtttctgtccatcatcacttgcccttgttgcccagtcttgtaagcaatgaactcgtcccaatgatcccttagctttgggaatacatcaaaatttggtgttagtcccttcaggatgtatttcttatagagatctcccttgaagctctggaattgttctgccattttcctcagagtccactatttcactatgttctccgtacccacgggtagcgtgaacgtctcgagcattgtggtccacagcgtctctttctctgagtccgggacaaagctgtcattatccccgcgtgcccttgttctgcgccagtacaccgtgctgacaggcacgttgtccctcacaacccaaccgctgtggcgtacaaaattcttggctgcttttgctggggcactaggtcggccgtcttcgtccacctcagttatgatgtgacgaccctctatcttcttcgtggcacctcgttgtccgcgtgccctcttctgttcagtggagggatgacttccactagcctcctcctcatcgttcccctcctcgttcccctccgcatccctctccacgttcccctcctcgttcaagtactggtttggatcctcgttcccctcttcttcgttccagtactggcagcttccctctgcgattgtatcgtacagtatctgtttctcatcgcgatcagccatctgtgcatacaaaaaatatttgttaggtctataggtcatatttgctaaccgtaatattaaaactctactaatcttatattaaatctctactaatctcatattaaaattgtaataatcatatatatatatatatatatatatatatatatatatatatatatatatatatatatatatatatgctaagtataacagtcttatattaaatcgctactaatcttatattaaatctctactaatctcatattaaatcactactattcttatattaaaattgtaataatcatatatatatatgctaagtctaacaatcttatattgaatatctaacaatcttatattaaatcgctactaatcttatattaaaattgtaataatcatatatgctaagtctaacaatcttatattaaatctctaacaatcacttctttacgtcacttgtgtgctcgaattccttcgatggctaagtaccacttccgcttgagggacgacaacgacgtcttctctgcaacattaccaagaaaatgtattattctaaacgggccaagttacatatatataatcatatatgtattaccaggaaaatgtattagtctaaacgcgtccgttctcacacttttagtacaagtgcattcacgttcgtaagcgcttcgttcacattcgttcacgctcgttcgcgtttgttaacatttcgttcaagttcgttcgtgttcgttaagcgttcgttcacggtcatccatgtatcgttcacgttcgttcgcgttcattcatgtttgttcgcgttcgttcacgttcggtcacgtttcaatcatgttcgttcatgttcggcaatgttgggcgcgcgcggaaatggcgcggcagcggcgtgacggcacggtggcagcggcgtcggggtgccgtgggcc

SEQ ID NO: 3196 - DNA, 3175 bp, Oryza sativa
cagtgcaaaaaggaacaaaggtaaaataaaaggaaagtaaaaatcccaagtcctgcgtacaaatctatagttcaagacatacacatcgccttccaaccgaggtcgagttgccccggtgccatgtcttattcgtggaattctatgtccaagtgcatactttgcgggggtaaaattttctacacgtatgttgccaaaatttctgctaagtttttcgtggccaactcgagaaaattcttacacagccagtctataaatactcacacatttcacaaaaaaatacttgcaacatcaaagctacacaggtagaatcatcgaccgtaagtaagtactactcctacgtacattaagtgtgagcttgattaactatggaggtatccaagctggccattgctttggccatggtagccgccatggcactcccctcccaagctcaaaactccccgcaggactacgtgaggctccacaacgccgcccgcgccgccgtcggcgtgggtccggtgacctgggacacgagcgtgcaggcgttcgcggagaactacgccagccagagaagcggcgactgcagcctgatccactccagcaaccggaacaaccttggcgagaacctcttctggggttcggccggcggggactggacggcggcgagcgcggtgcagtcgtgggtgggcgagaagagcgactacgactacgcctccaacagctgcgcgcaggggaaggtgtgcgggcactacacgcaggtggtgtggcgcgcgtcgaccagcatcggctgcgcccgcgtcgtctgcagcaacggccgcggcgtcttcatcacatgcaactataagccggccggcaacttcgtcggacagaggccttactaagttatttatacacacgggcgtacgtactggctagtactacgtatagtagtgaataaataaagacgtgaaaatgtaaacaggtcagtgtctgatccacgccttcacggtccataccgaggattctataaagcgtcatgtcgtacaagtaaaaataaatagtactccctctgtttctttctgtttcaggttataacacctattaactttggttaaagttaaattgctttaaatttaactaagtttgtagaaaaaaaataatagcatttttaacctaagaaaaatttattatggtaatatattcaattattaatttaatgaaactaatttgatactataaatattactatatttgtctacaaacttaatcaaacttaaagtagtttgattttgacgaaagtaaacacgctttataaccttaaacggagggagttgtaaaaccgtctaaaagcatgtgccagctgctagctgatggtccattccatcgtcgcacttctctaatttgccttgtcagttgtcactgggtaagttttcttttgaattctttagggtacgctcaaagacaacccaaatatataattgttaaaaattctaaaaaaaaataccgacactcatacagtataaataaactatttaacaaaaatcaagtcaaaacttaactcacacatcgagaaataaaaatctctagtacaggatagctcatcttaatcggacggcaagcctcatctgtgtcagggagaagtcctgtcacgaaccaaaggtatcgtatttgttttgatcgcaagcgcatgcatactgttgtgagtattccaaatgtatcgtatttgtttttccgaaaggaaaacggcggtgtaaagagaaagttcatatatttgtaatcatgcatactataattgatataccatagtctaaacaggattaattgataacaatgataattgggtagtgtgatacaggagattcatctctaataaatatagactaggtagggtagtgcagaaggactaaagagagctaaggttcatatgcacttttatatgaacatatttagtatacacttgatatatacatgcttacaaggctagtaattaattctacgcatccaggtgctactgaaagatcactacctgctgatctgttagcgtggttattgcattttacgaactcttatgtcatacctagacaaaaaggaataaaaaaaaggacagggttgtcaccaccagctatctacctcacttttcgtagggcatacccgcatccaataccatttatttaacctaagcaccatattttatgttaataaacaatgtcactaattcacccgggacacataccatttggatggacaagttagaactagtgcaacccattaaaatcattggacaattaacgtagtatagatcgactagccaaatcaagcgaagcatataactgaaatgtaaagtattcataaaacacgtaagtaaaatagtatatgaactatgtacacaattaaataaataagataattcctttattacatctctagtcttacaagaagagtaacgtactaaagacatatcagaataaactataggacggaaggctgtgttcttttcccctctttcccaactcacttccctcattttccacacgcacgctttttaaactgctaaacagtgtattttttgcaaaagttttctatataaaagttgctttagaaaatcatattaatccatttttcaagttttttaggttaatacttaattaatctcactataatcgtgtgctttgttttccgtgtcgggaggcaaggttgggaacttgccctcccgaacatagcctaagcctagctccactactactagagagaatacagtatatggaatgaaagaattgctcctttaggtgtgtattgtgaagtgagagagctcctccttttatggttgggaaggtcggtaactcccataaccgtcattgagaagccaccaaggagcaccacgtggagggtggagatgagagggagtgatggaggatcggccgaaccctgggcccacccctctcaaccgcctttcacaagggactgacatgtgggctcctatgaagattaaggatggtttggccccacattaggttagttttaagctgcctagtgggcccatcgatctgtgtacacgcacgtgattcgctggcggagtgtttccttgcatgccgactcatttctccttcacttcagtgtttaatacctacatccatagtaattctccaagaaaagtggaactacattatttataactaatatacacatagaaaatattagttctctctttatttattga

SEQ ID NO: 3197 - DNA, 620 bp, Oryza sativa
attaagtaggttttaagaatttaaaacacaaacttgggtacattgctaggcttgcccataaccgagggcgcggctattcgaataggttttactctgatcagaggtgtacatctttacccacaagacacgtcttcctcacgtgcaaccacgtgccacataccaccacggcatatggacggaagacatgacatagtttccaacccatcctagccatagacaagagtaccgacccaacccacctacggccggaacccccggacaggcaggcagaattgagcccctagcagcaggacaccagccctgtgccatgacatctcgactaccggaccgcagctcgtgtagctttcatttgtcctagagatgtccatcgacccccgacttcgtccatctccatccatgtacttttgtttataaccagactgagccacaaactaagccttacccactagacatgtggaagtacggtagtgctttgcaacagaggcccgaagaccggtccttatgtggccgaggtgctactatcaaaaccatgcaccccgagcccagcctaaaaccattttgagggttttgaatagagggggaggtgtgcatccaattccacagtaatccaaccattccat

SEQ ID NO: 3198 - DNA, 653 bp, Oryza sativa
aaggggcggcgcacggtggaccaagtccacacgtggcctcgggtgcgcgtccaccaggtggacggcccagatcggccaaggccgatcggacggctggggacagccgggcggcgcggctggggcaaggcacggcacaaagccggcctagccaaacgacggcgcgaggcggcgcggcaagggggaggcggcaaccgtctgcccggcaccaccggcaacggcgcgggcacggagcgcggagcgcggcggcagcgacccggtcggacgaccaccggcggcggcagcacgtcgcgaggacacccgggaggcggccgacgaaggggaggaaaagggagaggaaggggagtgctcaccgagatgcacgacggcgaaggggcggccgacggcaaggaacggtggcggcggggctcctcaggaagacgtcgcgacggagctctggcgacgggcgtcgctcgggatggggcggacgggctcggcctcgatcggcgaccgaggaaggaggagctccggcggatttccggcgaagaggggcggcggccgaggtcctcctcgtcctagcggagctgagggaggcaacggcgcgggtcggcgtcgaccgaagcggcggcgcgacgcggctggagtcggcggcaagcggcggagagaggttacagggc

SEQ ID NO: 3199 - DNA, 2351 bp, Oryza sativa
tcaattgggtcaagaaacgatgcggcgcaagaaagattatggacaacaaaccttaatttggggcaattcatggcctgtcggtgatggctagggcgtggtggcagcgaggtaggaggacacgcggagaatcagaaggggaggggatggggcgggggatacaccacgggatgcgccggttggccttcgccctacttctttgtgcatgcttcatggaaacggttgagggagaaaaatctatactctcaggcatagttgggccggattttggtttggcccattagatgaagacgtggggcctcttgttcctgctaatggctaagcagttggcttgcctcacgattggattcggacgttgagaaagaattaatttggatgacgtggaagcatgtgaaggctggaaaatatcatttaactacactaaagtggggatgaattatgtaggtttataggatgcaacaatgaccttctaccaaactggatgagactttcttaaaaaggagactccttcctgttctggaaggatcaatggaacaatgagatactgaaaaaaattaggtccaattcacatatgccataaatgaggacatctctgcaagatcttttatgcaacaagaatcatatcaaaatttcaacctaccactgacctctcaagcattaagaaagtaacatgaccttctaccaaactggatgactttcttgattctaaagtgaatgatgtctagacatacatctggggctcagctgaacacaaattaaaaaacgtttaccacccctgctatcacattgatatggaagagcaaattcacaataaaagtaaaggtcttgttctgcctacttctgctagatagattgaacataagggatatgctacaaagaatcaaggttaatttgcatgaaggtgcaaactgtgtgcgatgcaacaatataatgctggaagatgtaatccatcttttcttctcctgcacttttgcccaacagtgctggcaatgccttggactgtactcggatccatctatggagttcatggatatgatttaaacaataaaatgcaattttgacaacctttcattgtcgaagttattggactgcttgttggaatatatggagtagaagaaatgatgccatcttcaacagcatacaagtatctttccatctatgaaaaagaattttaacgaggattttgtgtgcatatgtacatggaaaaggacatcgacaaaccccaatagcaatcattgcttgattctcttatgtaaaaccagtttgtaaataatttgtacaaacatattaaatatcacaaaactactacttaaagttagagtatcgcggaactacatataaagtaacaaagtgatcacaaaactatgtacttagcaccaatttaatcagaaaacttggaggtttatgatttaaaccctaaaatctatatttttgatatttttttaaatatatagtattgcaatacttttgcttaaatctatagttttgtgataaatttgttgttaaatttgtagttctgtgacacgtcaccttaagtctattgttttatgacaatatgattaatgtctttgtggttttgtgaaatttactctatatattattgtaataacccatcctccagaactgcatagcccagcccatttgatgagcaggtccacttacacatactatcccaattacacttttgtactcgattcgtgtaaaatgattaacacagaagtgatatggttgaagggacaagcctatatcagttggtttcgctcttactcaattagtaagatgatactaatcaagtgcacataacacgcatcggccacacaggtcacgtcgtaattagaccaggatatcacacacacccctcaaaggacgtgacgtctaattgggccagcatgtcacacatacccacctccaaggacccaacatccctcgcggtccaaattacccacagagccacataggcatacaggcaaatatctaggaatgcaacccctcttagcacacattcatatgttcagtgtcgatgccatataccatgacatgtgcattagacagagatcttacgcgtgccatgcgctatatgcccgcactctgacaagtgtagtgcaattgcgagggtcggcactgatactatttgggatagcatgtcctcgagaaccacgcagcccagtccatccgatgggcgagcccgcttacacataccaccctatttacactttcgtgcttgttcgtgtaaaatgatcaaaccagaagtgatacggttgaagggataagtctttataagttggttctactcttgctcaactagcaaggcagtattaatcaagtgcacgcaacacccctgggccatataggcc

SEQ ID NO: 3200 - DNA, 12695 bp, Oryza sativa
cggttggtaacatgtttagtcccgggtatttgaaccgggactaaagatagcgatctttagtcccggattcgtagtctcggttggaaaaccggaactacaggggttctaaaccgggagtaaagagcatttctctaccagtgaatagtacttgcgtaaaaatattttaaaagcaacataaaagtttatttcgaaaagaaaatctaataatgtcattctaacatatcaacgaaattacatatttttccatatcttagccagttaagattttggtgttttgtttcacggattgtaagatatcatttcgttgagaacgtatgaaggtaataattgcatgaggttgttattcaatttattggattactttatttagtgacattgtagaactaattagctatgcatctttgtcaatctatttacaatactccatgatttatttaggtgacatgcaaagggttacgatatgcatgctaaaataatattatttttacaagtcgaaacatagtcaatatcagtctgtcttgaattgtttatttaatcttaaataatacaatgatgcgaacagattaagaaattgaatatatgtcgtaggcactccggaccttccattatatttgagagatgaagtgaataattcaagtcatcaaacaagcataatgaaacatccgacgcctcgagagagaaatattggagacattgctgagcccttagattgccagtcaacttcagcctgatatgtgcccgtcaaaccactcgaaggcggcgaccagatgtgttacacattcaggagacttgacaaaaatggctaaagatctacaacctctcaaatattcctaactcatactcatgtaaatctagttcctaggatgtgcactagattcacactttcatcttaagcatgattatacatagcaaacacaactaagatgaaagaaacttaagacttacaacaacttaataattacataggccgaccggccaaatagacttattagagaacagcggaagcttgactaccctatcacaagcacaccaactaggagtttaccccattaagttctcatcctagaagaagcaatcggaacccgcatcactcaaagactaagtctaaacctgcaaacaaaaggttttatcaacagcaagagtcactacattaaacaagttaatgtactggcaagcacaagtcaatcctaccatactacatgtaaggcatatattcaaaggaaggcaatatgtagttcaatttcagcataaagcaagttttgtttcgcaattcttttgtaaaggagttgatgcttcaattaacaaagacaagttttaagtttcattattaacttcttcataattccatcataatcaatctcttattgccatacttaacaataagtcataatgtatcaccacacacacaactcaacacatttatcaatttcaaaccaatatcacatgatcacatttttaaaacatagtctatactcatgacacatcaccaaagcactcatgaccgtgagcacggctaattgattagtttaaagaactctgcagagtttgtacagctttacccacatgatatgaactctctagtttgttttgagtttgcaagactccaccacactcttcatgttgaatgtgatctagaggccataacgaagcctttacactacttagagcctagccttgcaccagcacgatacgtgttcctccatcctaggcatacttggaatatacctagaaccgttaagtggcgggcccacgccttaaacttaacgccgtggtggcggacacgacgggaacccaccacgtggcacaataccgttgtattggacacgcttagtcacctaaactaccacgtcagggtaaataggaagctcctctgaattatacgaactcatacacaccggcctactagaatgcaaggctagtcctaaatagattaatcagcttaggccatcccatactagcacatgtggatgtacgaataactttaaatgggtgacacaagttcggtccttatggacttgggcaaacactccccctatcggtatgcaactaacaccatatgcacaccacttgccgcccaagtataaaatcacattttacacattttagttcacaaatacccatcatattaattttattccaacaaggtttcatgtatcaaaatcatattttaattatagatggaatgagcatttacatagttctaagcatggctaagcaagtagttgcacatagagcatatataaaaccatttgagcacaaagagtgtactctaaccatttctaggggttcaaacagcaagaggatcaattattcaaggtaggatatgcagcaaatatgtcataactaccttaaccaaattttaaataccgatataggctaagttcacatgcaactttgcaaacaaacattttcattcctcaaatcatgggattcaatgtgttcaaaggatgggaggataaaacttgccttgatcagataaatgttagcacctaatccactccttcaccgattatgcaattatctagataaaggacacgatatgcaattaaacaccgaaagagctgaaaatccaaaatgctctaaaatgcatgatttatgcacagtggcttggtactgatctaaaatgaatttaggtgaaagaatttttattttatcttattccattagggagttatgaatttttagaagttttatcggtttatagtaatatagtcttaggtagtgttatgaaatacttttgtaaagtgatttttattagattagacttcacaggggtgtagagatgtgttttctaagactaacacatttggtttcaccatttttggagttataatgattttcttatagattttacaagttacaacgtgtttttggtatatagtgttttatatgttcatgacttttgagttataggttcaaaatatgctaattcctgtttaagttgaacaaaaggaataatttggttaactaaaacatttttatttcacatgtttatggtctttactactatggttcatattttataaactagagatgctctaatctaaactagcaatatattatattaacctagaaattgtcatatgagctaagttcttctaagttttagtggatgaggatggaactatggcttcactggtcaatcagtttttatttaggtttaattagacctaaagtgtatatatacttatacatgtttatgtattacttaaacaacactatgtgtttaaattcttatttcactaagttaaggttttgatctatgttctctacaaaaggtgccaaattttattttactatgttgaagataactatttgctggttctatggaaactttgttcatttcatttggactaaaaatgaattttctacaagttttacaaattaaaggttgctctatgttagtaaatccttatatgaatatttagagacttttactacacagtaagtatataatcttatttcataacatggaaatatgtgttttggtgatcctacagaacttaagtttattcaaattgaagctaaattgggttctacatgaatttctaaagtttagcttatctaaaactaatcattttagatataatagttttagaggcatttgatgcaaagtaagtaattacttttatttcacctaatcagagagtgcatgatgatgaatctgcagtttttgagtttgtttcaaaatgagttgagatgaattttctatgtattttataagtttgtacatgttttatgtatgacctatcttagataaattttagagacattatttgtacagtgagtgtcaagttttatattcctggaataaagttcataacttcaataatctacagcaactggaatcacttcaaaatgagctatatttgattttatatagattttacaactttgtgcatttttctgctaaacatatatttgtttgggcattttcttaattattcttcagattttaaaggatggggtccacatggctgtgagggaccaatatgcacaaagactcttgaggtttctaggaatcaacccgcagtcctaggcccatatgtcagtgtgtttctacaattgtaaacggatccctgcacttaatctgctttagatagagcagagctagccatggctgagctcgatctcgagctcgccagcggcaaacggtggctcgtttgaggttgaggtcaagagataaaatgaagagcaagctcttgtgattccattcctctagttttcttggttagaggacatcggagtagcgccgatggcgagtgtgagcggcggtggttcttggggtgaaagtgcatgtgtgcatggaagtcgattccgaacgaaaaggatgcatgcatgtggtcttctagccttcaggatgctcaccgtgggtcgagctagggttgtcgaggtcttggtggcagcggtgacttgtggaacggctcggcgacggtgctcctcctcgggtgaacgacgacggctcgaacgggacaatgagctgcttcaagcaagcatgcacgagggttgtgaggtcaaggagatggtatatgcgcaaggaatcgaacaatggctcaccgaggcagcggtaatcgatgatgacggcggaggcgattctagatcggcgccggtaaagaaaagatgcgttctccgagtccttcacatctccggctagggttcttgaggcgtattgaagaggaggttgaggcgatgacgatggcgcagcggcttcctccgaggtggtcgagaatggccggacgacgacgatggttgaagcggcggcgctccggtgcgtgctccggggcgttgtcggtgtggcttgtgttcccggcgatgcactgcacgagaggggtttaggtcaaaagaggaaatgcttggcattgtgtggagagatgggaacgcaaaagagatggaggtgaccttgactcaacggagatggcgaaggtcgtcgtcactacaaccggcggcgaggttgaggatgacagagaggctgaggacctctccctcggcttcttcagctccagagtgatgtgtggagttgggcgactcggtctggaggagatggaggcatgactcagtgacttgaaggcgtcgacatgtcgtcaccacgtgtcgacgtgtccaagactcggttggctctcgatctctccctctttgtgtttcttagtcggctgaggatgagggacagaggaagggcgagctggagatgctgccaggtggggccaagtcgatggaagctaggctaggaagagaggtatgggtaggagtttggatagacttagtttttggataattttcggaattatttctttcccctaagtttgcaactcaatatcttaatatgtggaccagaagaattagtgtagattttactggtggtagatctttatatctagattccattttctttggttgcacataaaaataatgggtagacttctcacagaaattaaacaaacatcggctattagaaagctagattgaatttttaggaggcttaaacagaggaggaaaattctagaaaaattatatttaggcatgataaattatctagtatttgaataaattattttgcatgttcacttatgagcagttaaatgtacttttggatgaagtatggctttagccgattaaaatttaatttgattccttttagttttctgctttgactgattaatttgtggtattaaacttagttattaacttgtaccaatattatagtgaattgcttgtgctaaacattgtctatttaattttttttccatggtttttaacttgcacataatattttagagaattaggattactttactttgtatatgtgttcctacttcataattgcacctaatattgttacagggattacattaaacttcttttgggctgagaagatgatatttgagtttaatattaagtccacatgttatcacccaagattaactataggtttgtttagtaattttaacccttttagtttatgctcacgagaccaattatgaaaagcgagaccataatccaaatgcacaagggactcgagcctaggcatgcattatgcacatgtatgctcaaatgcttgatgacatttctagtctaatgttgggaatgaaaaggttttattttgttctcaaattttaatcatgcaatggtttaagttggtcatcacctaaattaaaacggaaatttttggctctcaaaaattggagaagttaacctctaactattttgacaagaaattttaagtcctagaatttcgggtacgttacaatatgatttgattgtcatgattatttgaaatacttatcagaaattatggtatggtattcccaaataaagtactgtagagataaaagggagacgtgggggtgcctacatgccttggataagaggatggttcacgtgggggtggatgaatacagggaaataaaggggagtgagaggaaatcgagtggtctaagataatgtgtccattcgtttaagtgaaaaccgacgatctgagagttttgttgtttttatgactttctcaactttttaaaaagtataatagaagtcctaggagggctcggatgtttaatagaccttttggtgatagatataaatatgtagatagagacatatatatagaagttgatatagatagacatatagatatggatatagacatagtaatagatatagatataaatttagatacaaacatagatatagatatagatataaatatagatatagatatagagatagatatacatgctggttgattgattgattgatggacaaataggtagatgataggaagacgtaatagatatagatatagatagagatagagatatagatatagatacagtgaacgtatcctacgcacaaagtcttctcgtgtacacgccgtacatatcaactagcaaatttcacaaaaaaaatagaaaaatttggacttttacttttaatagcaatacatctatgtgtaaagtctcatattcacattatatttagggaacaacaaaaaaaagactgaattttaatacatttatacttttcaaattgtcaaaaaaaattgatacggctaaaatataatgaatgaggttatgaatttacgcatcggtttaatactattggctgtatagttttgttttaaaatttctgataaaatagttcgttgtcgtgcatgatgtgtacacgaaagctttgtccacaagatatttttcatagtcatagatatagtgtatatatagatatatataaagaaacatattgatagacggacaaatcaatagacatgttggctgaatgattgatggatagatagatagataagcatagatagatagaaagatagatagatagatagatagatagatagatagatagatagatagtttagaaaaactgcttgacctcatttgttagataaatttcaaattcgtgccacataggtccttttcctcacatgcatgcctcttctatctgttgaagacttcccctctccttcttaacatcaaatcttgaacatacatccattggtcctgtgtggtgcaactagttggagcaatggagatagtaggtgagtgcatctacaataatccccccgtgctggttaccccaagcaaaccaacgcccaagcttgctctgtacctctcaaacctcgatgaccaacgcctcctccacttccccatccagtacatctacgtcttcaccggcacccttgacatggatactctgaaggtggcactctctagagtccttgttgactattacccactcgctggtaggttgagggctagcaatgagcacgatggcaaactcatcattgactgcaactcagagggggttctctttgctgagggatttctgcccggcctcactgctggggacttcatcctagggcatgccaagcctcataagtcttggaagaagctgctctataaagatgagcagagctttgtgtgcacgccaccactagtcgtacaagtaagtacttttatatagttacttccattcatataattaattagagaagtctatgaccataccttatatatttatcatacgatgcagatagtctatatatggtcatatatatttgcttcgttttttgatacttacaaatattggtaggggtgcaagtgggtcacccgcgaacccacttatagatcaaaataaacgagttcgtagattagtttagcatataagtgggtttttacgggtagccgcttgcacccttaaatattggacatcgagtaacacctgccaagagggtgcatgttcgatctagtagatggttggacagagaatacgtcacaggttgatctaacgggttgtggggatgggacatgaagttggacatatatatacacaggacggaattaattagaattgttcagatgggtgaaacttgtggtgtgtatattactagaagttggggacgattcgaaccattatatgtagctgtatgtatattagccgaatgacagggatcggtcgaccggcgggggagcagaaatcgggcgctccccccgtcccctgccccccacgcgcatgcatgccacctggccccaccacagtctctacccccacctgcaacaaatcacccacatattttggaaactctctattaagtggatttggtttattttttgtttcaccaaaaatattttacctagtgtactcacaatgttttactatgtatagatctaatgttgcagtgaactgaaatattccattgcaacaaaaaacccatatattttggaaaccccctattaagggaattcgttttattttttgttccaccgaaaaatgtttcacctaatatacttataatgtttcactatgtatgtaccaaatgttgcagttaactgaaacattctttcactatttgctgaaacattgtttttatataaggtgaaacaacacccgatttaaacgagtgaaacattttcgatctacttagtgaaacaattccgatatacctggtgaaatatcgtgcaacatttaaaaataattcaataataagctattttttttcatcggaatatatccatgtgtggtcttgttttggagatttaattgcaatgaatttaatggtgcaatcggatcatgatttggataagtaatttaagagaaaaatctgtttaaaatagctttgcacgtaaatctgacgctgacgtcatgctgacatccgtgcccgattttaatctcctcccatcgggcgcccgagctggagtcacgtccggtatattaccaataaatttccattaaattatatgcataatttaaatcgaacttctatacatagtgtattgcaaggaattggatttgtacatctcgagtgcaggcaccatcatttgcttctcactgacctcaataatctagcaaattttgtggaccaaaatatattgatctagtatataaagacatactccctccgttttataattttatattaatagaaaaaatatccgtgcgttgcaaagggtgaacgttattttaatcttattattgttatatggtttaatcaaagtgaaatacactgtgggaattcgcttggatatatatgttatttttagctaatcatgagctgcaattagaaatccatcgtctcaagttagcctgtgagtttttttaagagatttcttataagactcctaaattttcaaaagcgaactaacttaaaaactgactcaaatacggatatgtactttcaaaagaaaacaaacttaaaaaactgactcatacacggatgacgtaccaaaatactggtaaaaatatctttaatttttataatagtagagataggtcattttgacttttaaatttaaacttcttcaaaattttaccaaatttatagaaaaatagtgcaattattatagcacaaaattagttttattaaatctaacattgaatatatattgaaaaatattgctatatttttctacaaatttagtgaaagcgaaaaaagcttgacttaggaaaaaagtcaaagccgcttataatatggaacagaggtattacaaaatagtcaaattcacttatgaataatgccggcgctattcattgaaaaaaaatgtgtctttggtttgatatgtgtattggattaaatttcatgttggatggctgtggagtgacatacaacattttaatctatattctgaatttgttttaatttagaattttctgaaagacggatgagttgatgtgtatttaggctgcaaatggacctatgtggttgaactttcatgtttttcgtaaagctattagcagtcacatgcatttctttcgcaacggaaaaaaaacagacatgctatatttatggcgacacaccttgatcacagtcggttaatctgaccgttgaatatcatgtagattcatgctacactattgatgcttaatttaacgaacgtttgattcgcttagtctactacaaccctacaaccctactgctcctgttattcattagtttcccattgaatttatactaacatctcttttatttatatcgacttacgtatgtaattttaagacttacattatatatacataaaattacatatgtaatttagggatttacaatgtaattatatgctgataattttttagaaaaatatgatggcataaatatagggagttccagagaaaatcattaattgtaagtcaatgtgacgtaacctggttttcgtatccacgtggcacggacatgttcaggtaactcacctcagctgcggtggcaccatcctctgcaccgccatcgcccactgcgtctccgatgccttcggtgccgcgcacttcctccgtgcctgggcgcgcgccgccatgtccgaagactccgaactcgcgcatcccgccgtcgcgccctgccacgaccgccgcgccctcgcgccgcgctgcaccccgcgcatcgcgttcgcgcacccggagtacaccgctgccagcgggggcgatgacgcctccgccgtcgcggaggcctcgtcgcgcctcttcgccccgccgctgtcgccggtttccgtgaccttcacggccgcgcacgtcgcgcggctcaagaagctgtacgcgccgtcggcgtcgcctctcgagcagtgcacgtccttcgaggcgctcgcggcgcacgtctggcgcgcgtgggtccgtgccctcgacccgccggcctcactccccatcaagctcctcttcaccatgggcatacgccggctggtcaagcccgagctgtcgggaggctgctactgcggcaacggcttcgtgctggcgtgtgccgagtcgacggccgggcagctggcggcttcggcgcccgacgcggcgaggctggtgcaggagaccaagcagcgggtcgacgacgactacgtgcggtccgtgatcgacctcctggaggtgcggcggggctgtttgccggacttggcggcgaccttcacgatctcctcgctgacgcggcaagggctggaggacatcgacttcggggcggggacgccggtccactttggcccgcttaccagcgaggtctactgcctgttcctcccggtgatcggcgacccgcgcggcgccaccgcgcttgtgtccgtcccgcaggccgccgcggacagcttcgagcgttgctgccatgatggactggatgacgtggacgtggaagacaagaatcagctgcctaacataggagatggcatggcatcctaaaatcctaggcgtttgaatgccatatctcttctagaaacaatatattcatatgtctctccatttggctccaaaataataaaataactagtatggtggtccgcgcagattacgcggctagtatcattatattttctctcatataataacatatatgttttctcattatattattcaaatatattaaaatgacaacataattttaaattttgcaataactttacaaaactactaatgtgtaatattcatattatattttatatacgtgttagttattaattatttttaatatcaaattttagttatttgtaaattatatatattcctatatggactctagactcgtcttttaattttttttaattccgaattttctgtaaattatatttctatatattatatttctatatagactctatgctcttcttccaatattatttatttttatttttgaattttcatattatattatatatacgtgttagttattaattattttgaatatcaaattttagttatttgtaaattatatatatttctatatggactctatactcgtcttttaatatttcattttttaattccgaattttctgtatatagactctatgctcttcttccaatattatttatttttatttctaaatttttattatttctaattgtatttctatgtggactctaaacccatctttcaatattctttaatttttagttttgaatttcagttacttttaaattgtattcctatattgaccttaaactctccttcccatgtttttcttaattttaaattttagttatttgtaaattgtattttcatacggactctaaactttacttttaattttattatatttattccaaattttagttagtttaaaattcctttatggactctatattctacttctaatattccttattttttaattccgaatttctttttttcttaattgtatttctatatggactctatactctacttctaatattccttatttttaattccaaatttatattatttcctaattgtattcctatatggactctatactctac

SEQ ID NO: 3201 - DNA, 18393 bp, Oryza sativa
ttcctaattatatttctatatagactctatactcctcttctaatattccttatttttaattccaaatttcagttatttcctaattgtatttctatatggactctagtctcctcttctaatattccttattttttaattccgaatttcagttattttctaattgtatttctatatggactctagtctcctcttctaatattccttatttttaattccaaatttcaactatttcctaattgtattctatatggactctagtctcctcttctaatattctttattttttaatttcgaatttcaggtatttctaaattgtatttctatatggactctgatttttctttttctccgattaatgtgagaatttctaggccatgagagcgaacgtagagactcttttttctattcctttaataatataatagatagatagttgtggtgccctagcaaattacctttttttttggcgtagtacaacagtctcacatttttttaagatgtccagcaactttaaaagtcatgtagtaaattttaccataaaaacatactagaattttggtagaaatgaaagtgtaaattaaataattgcaaaatagagaaaaatataaaaatgatcaatttcaatagaccgcaatgagaatagaatgagcgagatagactcattgggccaactttcctccaaacctccataccttgacacaatgagccatattctttacgaatttcatataatttcaaaaaggaagcagtcaggggcatcacagcatgttatattcaggtttaagcattactctgaaatagttcagtgatttactatgatgccaactgattatgtttgtgcctgatatgtatgtatttgtttaccactgtaaaaattcaaaactaaaagtgattgagggaaaggggggggggcggtagcttcagacatgaccagcttttatattggtaatagcattcagaggtcaagacctgttgcatgattctatttgtaaatttttgtccacgttatctgaaatcagcgaagaatatgggtaacacatttgttgttaatttaggaatcattaagtgaagaatatattatttccacacgttatgttcttctgtatataggattgtcatctctcatctttcttcatgcgtttagtaccaagtgttgatttaattgggtaattgatccattcaaatcaaataaatttcaaggctcattatgctaggaatttgtgtatattcattctcttatgggatatcagtgggacgaagagttttgagaattaatccatttgattaatgaattggtaacctatatcaattactcctaattgatggttggttgatggttgtgtactggatgatggttgatggctagttgatgacaatcagtcactctattcctcttcctattctattggttaacatatatcaagtacttgatataggttaccaagtactctcctaattgatggttgtgtagtgaagaatagttgatgacaattagttactctattcatcttcctattccatgactatcttactcttcatctttcatttctcctataaaatgagaatggatttgatctcatgcgtgaaaagagatatacacacttttcatccacttctaatgcggttgctgccacgataatctcatcccgacgagtgtgtgcacatacgttgggagattaggcctccgaaaccatgcactgctgcgatgtttgcacggacgagcgagagatcaggtttttggggagcgcaaggcgcgactactcactattcgtcaatgtctacttcattcatcaccatgtcgactgatggaggcgtaaacggtggacatgtcggtggcggtactggaggaggcgagaacgacaacatcaacggaggcaacaacaacaatagcaatatctcattctctggagcattctctaggtatattactctattcaccttagtgttaaacatgttgctagatgatgctattactattactagcatgttcatgtttagcactataactaaatcatttcgtttttcacatgtcatgtttattatcttgtttttctagattaaaatatgtcaaattatgaccatatttccaacaatccaaaaacctgataggtctttttcggtagttagctttgccgcatcactaaaaccacatgccttcgatggttcagactataagaggtggaaagcacgtgcactattgtgtttgacggctatgcttctctgtttcttggagcaaaccgagtgaaccgcctctctctcctaaggaggaggctatgttcgagtctgcggattgcttgttccatggagcattgatcagtgtactagctgacaatatattggacgtttacatgcacatgccttcagcgaaggatatgtgggatgcagttgaggccaagttcggagtttccgatgctggcagtgagttgtttgtcatggagcaattctattactacaagatggtcaattattgttttgtagtagagcatgctcatgagatttaggcactggcaaaggaatttgagaataaaaactgtgacttgccgggcaagtttgtggcgggtggcattattgcaaaattgctaccttcttaatcggactgtgccacttctctgaaacactggcaagagttcggtgttactgatctcattggctctttgggtgttgaggagaaggtgagggcaaaggacaaccccgataaaaagatcaagagaggttctagcgctaacttggtgcaaaagaagaaccctaatgcaccccacaacaataacaagaaagtcaaacgtgatgtcaaactaaaggcaacaaccaattttaagaagaaatgcaagggaaaggcgaagggcaactgctttgtgtgcggtaagtctgggcattgggccaaggattgtcctgatcacaacgacaaaaagtctgcaaacatggtcattagcgagggcgaaggaacatcggggtacggtaaatttttacctacagttctctctattttccactcacctgattggtgggttgatacttttcgacattttaggtcacgactacggtatttgcatggtttggagatcgttggtgccagggtatatgcgagattgaagtaaaagagatagagacaaggatttttatataggctcgggccccttatctaacaggtaatagccctactcatgttggtcatagccggtattgctctatattcattagaatcacacaagtacaatattttggatagcctatctagctgtcatcgacttggcggcatagataaccaacacgtagtcgacaacagggtagtcttcctcctcgagtacaaactcgtcgagatcagagatagcgctagattcctcttgtcggcctccgtaggcaccatattgggttcgtccaggctaatctctgatgtcgatgtctgacggcgtgtgttggcttctgtgtctcgtgtccattgtgtgtctctgtatctcccctctcctcctagggggtcttgtatttatacccatagatgtccccttgtccaagtcgaactagggagactaatatggatacaattcgagtagtccttgttgtttccatatagaactctactcatccttccttatccggaactccttctatatacgagatataattctgtataagacttggtatatgatgggccccgctgagtttagtcgattactattgggtatgtggtatccataaccatgacaagaaggtggagcactgttatttgtggagtcaagagaaagaagttacagggatagcgaagtctctttattatggtgagcttggtgaaggttcatcggggtggcttgacgtaagcaacggaagaatcaaccactactacagaaaagtccattggtgtcggttgggaaccagtcgtaggtgccgggttttccaataggcacccagcaggcggcaccgatgacttcagccatcggtgctggttgtagaaccagcacctataataatgtataggtgccagttttacccaagaaccaacacctacaagaatgaacatgagaaataaaaaactccaactcagctcaatcaagccgacccaagcacatcaagaacataaagaacacattaacatcaagacctaaaagaaacctcgccctccgcaccagccttctccaccactgccgccgtcgtcggatggaggggaggagaaggagggcgccaccgccgcctcccctcccgccgtcgccactgagagagggagagagtggtgtagtgagagagaggtgagggagagagagcggtggatggaggaggagagagatggagataagatgggtgggtgaggaaatgaggaaagagggggttgggtgggtgtggtgatttttcaggtcttggctcgatttttcaggtatcggttttttaataaaaccggcacctaggtgctggttttaaaaaaaccgacacctatgtgtattgatggtggtttttatttagaactagcacctgtaattgctcaaatgcgtcggttctatatactttaagccagtagaagtgggaaaagatctataggtactggttttagtacttccgacacctatagtgccaacctctatgtgcatttttgtagtagtgaactcaagtcctaggacactgagattcaagcaagtgacagattcaggttggcgtggtatattcgtcaaggtagagtttgttagagtttgtttcgaatatatatacatataattgatcgattacagtttagaacttggagttatactagatacaggaatagagtaatattatatagaaaagagcaagacgcatcgatcgtggttttgtctttatttcaatccaagctgaagtacatcatttactcacttatttgatttgactaatgttattattactccctctaattaagacataacacaaacacacagcgcgtgcatgtaacgagcgagggacgatgcatgcgtgctagacacatatatatagcttgttgcaacaacgtcgtatgatcagtagggcctgcggccaacgatgttgccacggggctcgtagttgcagatgatgaagatgccgcggttggcgtcgcaccgcacgcgggcgcagccgacgttggtggagtcgcgccacaccacctgcgtgtagtggccgcacaccttcccggcggcgcagctgttgctggcgtagttgtagtacttcttctcgtccacccacgaccgcaccgcgtccgcggccgtccagtcggcgccggcggagccccagaagatgttctcaccgtacggcccgcccgagtgctgcagccggcagtcgcccttccgctgcctcgcgtagtcctccgcgaacccctgcagcttcgtgctccagctcatcggacccacgccgacggcggaccgggccgcgttctgcggcgacaggtagtcctgcggcgagttctgggcatcggagcagtgaaacattgtagcggctaccacggcgagcacgaacaagctgcagattgctagcttggatgcctccatctctgcttgtaaacgtagctgctttcttacttctgtatatagctggtacatgcatgcagaggggtatttatagtcgacgtgtgagagaattttcttcgttttgcatggaaatgttggcgaggcgtgccggtattttccttgtgctggcaaagaattctacgaacaggcgatggtactgcatacttatctgcagcctactcgattctgttatttagatgaacgtacaaagctccagtcaagtcatggcatgtttaattgatttgttggatagagaatactgtaacgtgtaccgttaagataagaacacgtatatatatgtttggactctcagctatagtgcttgggagccaaatattggaccgctccggccggtggtgtgctctgaagaatttcgcagagtactggagtatactagccggatggctcttgtgtgcgcatgcacgtcacattctggcaggaattaagttaagacgagagatgtatctatacgtatcatggaaataactttcgtgatacatcatataagactgttaagcaaggtttctcaaggcatatgtctgctaatgagagaatcggcctaacttgatcttttttgggagtagaccgatttggccctggtcattcaagcaagccttggaccatcatggtgttttattttggagtagaataagtctatcactagaaaatatttgccgcgcattagtatatataggctagctcaattggatggacccagtgcactgttaattatgaagtcaggtaaataagaattgataataactaaatatgtatatccaaaacaaaaaaaaagagctacataatcacaaaattttacattcaacttacccgataatctagttttacataccatcaaactcagttgcttttgttactgacaatgagagatcaactttgtttctccttataaaaacaatatgaggttcatatcaaatatgttttccttacaaagatattacatgatcaatactttgtgattagcatcaatgatgaaataaggagatttaactatttgtaatgaatagaaagtaagacaatattttcagtgaggataataatataacttatcattgaatccaccgtcttgtgatatctcatttactacagccttgtttggcatgagcattgctctctcactgaattgtacagtggttaaagtcccagttctgcacctgcatttctcagtcccagcactctatgtcaacttaagaaaatgtaaataaggaacagaaaaaacatgtgttctgaagaaacggaacataacatgaaacataacatggaacataacataacattaacaatgtagccccttgaatttgagctatggtagactttaattcagattttaatatctaaaggataaggcagtgactcggttatcagaatataacatgaaacaaataattttgagagagcataatacaagtatatgtgatctaaaagaaatgcagcctgttatcaagacaaagttctttgtgactatagggtagcccaagcagaagttctggttgtgatcttcattcatgcagaggtgaaaatggaaagcaaagaaactctagttttaaaagcaaaatagaaagggcaatttctttctgctgttcttataggtcaaaattgtcccactgatgtgagcatagtagaaacgatttcttggggttagttttgctagattactccgtgccataaaaaagataaagaagattttataaacaacttgacaaatgtccataaaattagcatcaggtaagcaaaaggttttggatcttaacgaacaatcatgtgctaactttttttaactaatgctaactaaatttaagctcaaaatgccttgctatgttttctttttctctctttctttctttttccttttgcagattagtgtagcagctacctgaccataggtgaaagcatcgctgctaacaaagtatacagataatgaaatgatttggaggtcatttgatcgatatctgattgacgtcctcaaccgttgacacatactcatcagattataatatacatgaaggttacgggtcattaatctgctgattgtatgcatggaaagcatgaagcatcatgtcagatatggaaaccttgctaatagattaattgaactcagaaaaaatgcatttttccagatcaattaagaaagtgtagatgagtcagtattcacctaaagaaacgagcaccggcattggtaacttgtgtgcatctccggtgagctttattgcctctttgccagagaataaacaaaattgaggatgacggtggatgaaaggctgccgccgtctagctcgttcctccacagcgaggtcagggagaaggaggcctaaagatgagcaggaataaagggggaaaagctgcagcagctgtggattaaccagagaccgtcgggggtggtcgactggagcatctcgctgaggaggatgtcgtcgtcgtcgtgtcatcgacagcgtcgccgctcagcccgtgcatgtcgtccgaggggagcccagaatagggatgggcaggaggcagcgtcggcgctcgttctgcccggatctggcacccttgagctcgtccgatgagggactggtggcgtggcttggatggtgcagcggtgacgtctgaaggggatggataggaggcggtgatggggaggagaaggttgccgtggtgcctggcatgggaaggagatcaggagaaggatgcagcggcggccggcagcaataggaggcggagcgatgaggagggggaggcggcggcgtttcgggatgggaaggggcggataggtacgggccgtgttacgggataggacacgtggcacggttttatcatatgtaaaattgcttccagttttagccacgtggccaatcaacggtaagggattggacccaaaaatcagtataagagatgcctccctcaatacttgctcctgattgaatagcctccctcaaccgcaataccaggtataatgtctccccactcttcaaaaatctgaccaaatcaagtcccttggctgtttggatagcggtttcatcctatgtgacgctcatgggatccactgtcagtgataaaaaaataaaaaaaataacgcccccacataacggacttcatatatagttgagaacttgtgagtacaactccccaacagagattggttcaacccgtgcgcacatagctgaaacaacttcattgtatccttcaccaagttgagttacgatatactggattagatcttcttcgtcatgtggacaaccgctagccatcgtcatctcctcggcaagggactccatcttcgcaaagtactctgggactgatagggggttcccttcatggtgttcatgagcgcaattctggtgttgattgatcgtgcccgggtgtaagttgagtacatcacttcaatcacacctgatgctttagtcattatctcacacgtcgcaacttgcatatggacatcccttgatagggacgagagcaagtaacccatgacctattgattggtcttcttctccgtcttgccatcggtggtgacggagacctcaacaatagctaggtttcttgctggcattaatgagatgcccttggagtcaagctccttggacagcagtgatgatctgcaccttctagaacacatgattcgccttcccttatttctttgaaacacagtggccttgaagcggattggtggccattgtgtttgaggatgacgacaccatgaggatcgccctagatggatcgacactctgataccatgtgagttttctggatggaaacgatcgcaccaatcccgcgcatcgcctttgtgttaatatagataggaacaacacctattgtgtcttacagagatatgcgctgatagaatcggtaggaccacaaaatcaggaaaggcgaccaatgatctatatgttctgctattatcaggtgtgaccaatgatcttatctaacacttaatcgtgactgagctaggttcaggttgttcttcaaattatccagaagtctaactgacaatggcttagtaaaaccatctgcaacttgatcactagatgaaacaaaatcaatttgtaaaagtttatgacttacccgttctctgatgaagtgatagtcaacctcaatgtttttttttgcatggaaaattggatttgttgataagtagttagcacctagattgtcacaccaaatattggttgcctgaggacttataattcctaactgcaagcaaggtttgcatccacatgatttttgttgtagcatttgcaataaaattatgctctacacaacaagatatataccagattgcgcttctctggcaatgtcatctggagttcaattattacaatacaagtttattgcagcgcatagtccaattaagacagtatgacataatatacaagtttgaataatggaaaaaataataagacgatgagaatttgttgtagtgttgttaacaatggaattttgtatcaaactcggagaagaaggaacaagatcgaagcggatttggtgcaagatcaagttggttttgaagtcggactccgcatcggctagacactgtatcggctgcaaactgagcttaagtcgataacagttgataaggttgatagccaatacagccgatacggtataacttgggctcggtttgcacctagattaagataaccgtcgttgccaattagagatagaactcgaataaggtaattgtatctaataattaggatatttaagtcagttttgttagagatttggcaagagaccaccgtgtagtcttgtttgtatcttatttttaggaaaatttgaatcgagtccataatggactaagtttgtactcaggcataaatatgaaccccatagcattataatcggatggacaatctaatacaatttcggcacaacaccaccctttttacttttctattgttcaacgagtttatacttgtcatggttatttgcatcggcagggttagggcttcgacactctaatcttgtcaatgtaagtacctatctatcatatatcttagttaatctagtttgttagttcaatttatttgtatcagctaagattcgttttagggtttatgccgatatcggctaaattgctttaccagattagattaactaaggtgtctaccaccctgaaattcagtcaagggcttgattgtctacatattatgtttattttcatactttgcgctgcatcagccccagtcgtgcttagaaccataacctctagcctgccttttgatttccaataagggtttcatcggggtttcagccgatgagttatctagatattgcatcggcttataaagattatattcaagttagatttagccgatcgcgacaaaggtttcactgtttatctattcgttttgatttaatgacatcggacttctagccgatgcatgttttaaccttcggatcaatgcttattctatcatattgttagccaattggtttctactggattatattgttgttttgttgcattatcatcagccgattgtctttgtttacatcaagtgtcagactctacatcaaccatatagccgatagctcaaaatcctatcgctatcggttggtatcggcatcggccggaattactccaccggcttgtcagccgattggctcattgatctactatttgtatatcttgtcagttataggatcaaactgactggcacacccgtatcttatcaacttttggacctgcactggagctaagcagatatcccaggccgttgtgttcatcgacttagttcgcgccaacacagttttggcaccataagctagctaagcgcggattttttgtcaacaagtgtacaataatcccagtggtttactggattccttttaatatttattattctattagaacccacgttttggcatggttatgtattcatggatgttgctctattaataactcgagggttagagctaggtaaggctaaactggaatctacagtgggcttttattttgtttagaggatatcctatcttccgatatagttggtactcactaaggattatttactcctataaagcaagataatacaagaagccacatcatcaataattttaagtcattagatcatattggtacaaagataataaccgttggatcaagaagctatacttattcattcaattcaatcatttattagttatccattcacctccctttgctccacctcattgtgcataaaaccatgttttccgaatataactcaaattattgtttaatatgtgtgttttattttattatgcacgataagatagcatataattattaggtatcgttacctaaatctatttttagaaaaaacttgagtgaagtagagagatgcaaattgtctaactataacgatacccatattgcacatgaaaataatattcatatattataacaatacacaattgcgcttggaaaaataaagcatgaattgtattgtaatagcatatataagacatatataaatccacattattatatattttataaatacatagagttacacctaacaatttaaactatgattttgtttgacgataaaactacaaaacccgtggcaaagacgcggaatgccaactagtttatcatatgactatgtaacatgaggttctattgtctcctatagtgatgcacgggcattttttaagttaaaggaataaaaaacttaagtgttgaaacacgttcttcttaattagaacagaggtcacaaaaaccaagtggactcagaagcaacataacactcattgctaagccgtgggcaacaaaaccggaggccatggcatctggtactgaaacacaggctcactcgcactaaaactcgcaacaacctctaagttgctgagacgaaaggcaatgtagcggtcgttcaggcgtcgtggcgagtggaggcacatcagcacgacgccggcgtttacggcgacaacgcggcacgctcgatcataatcccatagcatatcagcagcgtcttcggtcgacgtcgtcagcgatgtttcctgttcttggtccagcacccacgcgcggccgccgcatccagactttccaagaagccaaactctgaggtgccattttttcttagacaacatgaccagcctcatcgttcctctctcctccatgttgaccaagcacatggagccgtcgtcggtgtcgccgacggcgtacgacgggcccaggaggaccccgggcggaggcacgacttcggggaaccccatggtttcggcgtccagggagacaagactgttaggagagccgccgcgtagcctcttccagcagatgcgacctggcgcgtgcatggctgaataacgtttcactttgagaggcagcggcatgtcgatgtcgctggtgttggtccacgggcgagcgctccacgcacccgtggaggagtcgtacacagccagtcgctccatgtccagccgttgatctcctcccgaggcgtatattactgtcgtactacatctctgcatggtgaccacacggaacgacgacgacgacgctgcctgatcgccgacgcggccagggatcaagaagctgccggagttgtgatgaaatgcccgcttgttgccatgccgcggtggggtgagcttcgccaggacacggcgggctacagggtcgaaaacggtgagctctcgttggtgtcgcaattcctcagtaggaggcggccttggtggcagtcttcaacttcaaggcggcccatggacgtgacgggagtgaggaagaaatcgccatgtcggacgaccgcggatagttcggggtcggagaaggtgggctgcgctggttggaacaccggccgcgaagagcattcagtgtagtagtagtggccgaggagaggttgggcttggccggggtggagggcgtggaagcggcggaggaaggcgggggacgaggccacccggcgccaccgcttcacagcgcaggcggcgcgagccagcgacgggactgacggcagccgcacgaggaactccgcgatgacatcgtcgcagaacgagtcgacggttgtgggcgatgcggccggcggtggatcaccggaaaaactggagggtgatgccttgcgcttcatgcctcaatacacggtgcgtagtacggcatgacacaactcggtcgatcagatcgctctgggactcaggaaaacttgacttcatatatactataaatattcttccttgcagagaaagagttcgttctggattggaacagagctctcgtatctatcgaaactactaaaaaatattggagatatatggaaaactcaatttatcccttaagaggatatcccatcatttttcatgtcaactaaaaagtcataaaaaaaatttagtagaatagatcaatatgtgatattgtcacttcacaaatatgcaaattcaaattcaacttatacaagtagaaacaaaaataaaaaatttactatgaaaaaaaaatcagtagaatagatcaatatgtgatatgtcacttcacaaacatacaaattcaaattcaacttatacaagtagaaacaaaaataacaaatttaactataaatagagcggtcaaatttattgtttttgtttcaaattgtataagtcgaattttaacacgtatgtttgcgaaaagatatatcacatattgatctttcctactaattttttttaaaaaaatttgatgactctttgaacgacatacacaaaacgagggaatgtctctttgagggacaaaattccacttctgagatatatctgctattttcaaaacgaggggatgttccctcgagggacaaaattccacttctcagatatatcgctatttccaaagaaacaggagaaaacttgcaaataccatgccttcaaattgattcgttccttccatcttccgacccgtcgtcgctgccgtcgccgatcgctttacgcgatgagacgcggcaggaaacgcaagcgcgccggcaagccgacctgcctcccgccggcggacgcctcgttcccttcaattgattctctcaacgacgacgtcctcgaggagatcctcgtccgcctcccgtgcatcgcctcgctcgcccgcgccgcctgtgcctgcgcgcgcttgcgagcgatcgcctcctcgtgggcattccttcgccgcttccggacgcttcatccttcgctcctcggccacttcgccaccgacgccgacgacgagtcagtgataccgaccttccaccccgcacgtgcccagtttgatggttgctccgacgccgccgtacgaggcggcgatttcttcctcacccgcgtcgacgcaaacgctgggtggcgcgtccaggactgccgccacggccgcctcctcttcgccaacgagagcgatctcctcgtctacgacccgctctcgcgccgcggagtttccatccgtcgaccatcgtggtacccctccagccacttcacccactgccttctcgccggctacggcggtgacggctgcccgggctccttccgcgtggtgtccgtcgagcacaacggcgagcgcgcggcgcggggcgcggtgtacagctcgtgcaccggcgcgtggcggcgcggccggtgggactacgaccgcgtcatcaacccgaagcgccccagcgagtactcctacttcccggggatgcaggcggcggggcggatctactggaagcaccgcgacacgacgaagctgcaggtgttcgacgcgggacccatgcggttctcgtacgtccacctccccgagggcgtgcacccgcggtccaagtacgccgtcggcgaggcggaggacggcgggtgctgcctcgtcgtcctcgcggacgcaccccacggcacggtgttcaaggtgtggcgcctcaggacagggaaggggtcgtggccgtgggcgtggacgtgggagcttgagaggcggctgccggcatgcgaggtgatagggaaagtacaataccctccgattcgccacgtgtgcgcggtggtcgccggcgtggtgctgatctgcttccagaatcacgctgggcctcaccggcacatcgcattctggctcagcaacatgcaggtggaggccacgttcaggagcgctggatgggcttaccctttcctgatgccatggcgccactcatcacctctcttgttgccttctgcaaaattttagtctagcaaatacaaactgcgttgctttttctcgataatctgagactcacaaagccatgtttggccactctttcacgtcataaatatgtgaggttttgttaaaacttttgagttttttttatcttaaaaatacaagtccatatgcccatatgggtgcatttttttaaaagaaaatataggtgcatttaccacaaggtataacgagatcggtggaccatcaacgagtttgattggagaatcatttaacagatttactaaaaatgttgccaaattttcagcttgatttcagtgagtttcttcgcctgttggatcacacattcattctttcaattttgttatatatttgcagataaatttgctgctaaaaatttgatagatactagtataatttttattttgttttgtgttcatttgggctaatctctttaagatccagaagcctttgctagctggctctataaagtaaatatttaacctctccaagtgctaaccggccggatggctaaactcatctgggcattgacgaaggccgtgttgagttcccaactaaaaacttcacactatcacatcgaatatttggacacatgcatgaagtattaaatatagaaaaaaccaattacacagattgcgtgtaaattgcgagacgaatcttttgagcctaattacgctatgatttaacaatgtggtgctatagtaaacatttgctaataacgaattaattatgcttaataaattcgtctcgcagtttccaagcggaatctataatttattttattattagacaacgtttaatacttcaaatatgtgtctgtatatccgatgtgacacgcaaggccaattttttttttgccaacagggtctaaatttggccacgatatttcattggccaaacccacatcgacggcggccggcactaagctattccatcccattgtaggacagtgtagttgtcatctcattcagcgccaccgttgatccaccccccctcgcttctctgacatcgtcgctcttgtctcttcgacaccggcaccctgatcaggcgcatagttgactcagtttgtatcattgacatccagtgccaccgtcatcccttgtagcctcccagtcctcccccataccgacttggccttaaaagtttagatgggaataaaacttttaagtctctatcacatcggatgtttgaacactaattataaatattaaacgtagactattaataaaacccattcataatcttggactaattcgcgagacaaatctattgagcctaattaatccatgattagcctatatgatgctacagtaaacattctctaattatagattaattaggcttaaaaaatttatcttgcaaattagcttttatttatgtaattagttttataagtagtctatatttaatactctaaattagtgtctatataaagagactaaagttaagtccctatatacaaacactacctcacaacctttgccttcaactgttcccaccgccaccgcaattttttattggctccgtcactcctactgttgcatccttctcaaaattgcacgctgctgatcgaaggttgtcctgcatcgccagcatacgggtttttttttttttagataatgatcgccagcatacgggtgggtgggaaaaacaagagaaaagaaaaacactaagacactaacaagtgggacccaagaaattggagagtgggaggttgaatgactgttgaaacaaagagggttcactttatttttcgatcttgcgaaataggcaaaatgaagatcaatattttgcctcggtacgaaatagaccaatatttgacagggctcttggagagctctaaactgttgattcgatgttattttgatgaaaatacctattacagtacatatttatagcacttttatataattaaaatgtagtaatgtctaacatttacaaataactagtttttcaaagtgagcataactcaattgattaggttttttaatggagccagtcaaagaaatctttttttttaaagtaagcgtagctcaattggttagattctttgtaatggagccagtccacccaagttcaaatcctacatttaatatggtgctcacatttacggctaattatttttttaggggtaggcaacgtacatgttggcagcgagacacctgtggtgacttcgtcaatctcaagatatacttgcccagtcattcggaggtactccttctggtagaatgtgcgacttcgtcaatctcaagatataccaatccagttattaggaggtactcctccacgtagaatgtgcgtgtgtacgttcataggggtgagtgtgcatgctgtcacgcccggaatttctatccaaaattccaaacgcttacatgtgtgtgaaccctcgtccaggaatcagccgaggcacacaataacaaattgataatagagtacaattattactctagttaataagcgaataaaatgtcattacagaggtagatagttcctctcaatcaataaagatctaagcagcggaaaataagataaacggcgcagacggctccactccacaggcagcttgaccagggctacacctaatcctccacaccatcagcatcattgtagaactcttcctctgatgaatgattgcatggtgagtatatgacatactcagcaagccacgcagcaaatatgcaagtgcacaggataacaaaggatggcatagtagggtttcatttgcacaaacagcatttaataaacatttcagaatttaataaaacagttaagtaataaataaacaatattaatccaacgctatacaacataccctgttgtataggcccaacc

SEQ ID NO: 3202 - DNA, 8828 bp, Oryza sativa
gtgtgagactaatcacaaaagacattgttagacccgcccataaccgcgggcacggctattcgaatagttttactctgatcagagatgtaccactgtacccacaagacacagccctacatcatgtcaccatgtgcctcaataccaccacggtacctcggaaaggagctgtgacaataccccttgcataacacaatccaccgcagcgcaccattcctggattataaatcacccccttataaacaaggcatggactccccagcgacccccgtgggcttatctccgccacttctcagtctggtactccgcaataaaccatgctatacaaaaggtaaagccgttgcccacgctggcttgtggttggcacggttaatgtttcacaaccgaaactcgtgaaccggtccttaattgtcatgagcacgactctcaaaaccatgtgctcacaacccaccattatcaggttttaattggctagtaattaattaaccaatcacgattgaccatcgtgaactatcattaagccatcattaattaatagtgaatcataagttatcccaatagtgtgctaatgtttctaagcatggctaagcaatcacatataatatctagctgaaccaatatgtatagcccaactagtcaagttataataacccaaggtatcaaggaataaagtaatcaagaacaaaagggctataacaaacaataggttaattccacccaatgacattcgaaaataaatgcaatagttgaatagaaacaatagctttaaacaggatcaacatgctcaaagggttgtttgggatctgtgtgacttgccttgctggccttagaactcttcaaattcttctcctgcgaaaacggactctccggaaacgtcggaatctaaacagaaaagagcaaaatcaccaaaacagcacataaacaagcatgaacagtacatgtggatatttttaacatgtagatctcaattttagaaaaatttagagacttgaaccaactaaatccgagctaagatgaattagttatgaatttttgaagattaaatcggattaaaacacttatatggattttaattgaattatgacgcaataatgaattatttttgaaaaggaaaagagatttattgcgtcagcggctagggtttgcggtggaccgggtgcacggcagcggttcacgggaacgaacggccgagatcgatccatccaaaacggacggccgagatcgatcgggtctacggcggctcacggagacacgacgacgatgacgtcggcgatgacgtcaccaccggcggcggctcgagcttgcaaactcgccggcgaacgacggcgcggcgacgcgaacggagggcaccagcacgtagagggcgacgcggcgaactcaccggtgaccaaagaagcggcggaggagcaacggacgacgtcggcgacgaggtcgaagcggcggagaagatcgggtcgacggcggcgacggtgctccggcggttgacagcgacggcaaaggagcggacgaggacggcgacgacttggcgaccatgatggcgatcttcccgagcgacaacgacgaccggaacggcggcggcgcacggctggagcggcggcgacgacggcggctcaaggttacacggcgctagggcgcttccgacggcgagagatgaaggcgagggtggcgacgggtagcggcgggcttggggatccttttataggggcaagaaggcggcggcgaaggcccacggcgaccagcgacgcgaaggaaacatcggggttcggaggaaagagaccgatccgatttgacctcgaatccacgaatttccaaacgattttagccggtgattccaaaagagaaaaggtagaggagatcccgaagattgtttcccctcaattgatttcaccggataaggaaaggcgcggccgaatttggaaggagacggcggcggcgcggcactagggtttcgggcggcggcggccggaggttgacgacgggtccgacaggtgagccccacctgtcagcgacagcgcgctcgcgcgggcggctgcggctgcgtactgggccgactgggccgagggagagagagagaggggttttgggctgactttcggcccaaagccaaaagagacttttaaaaacctttttcgatttaaattattcatgaaatgcaattccatttattaaaaatacttccttagctcaaataaatcccagaaaaatctaggaattatagaattaagcgaagtatttaataaaattttatctggccccattttatattggaatttattaattaaaattagatcttctcttctaggcttttaaaataaattctaataattccaattaaacaacaatttatatatttaggatttttagggtgtgacacatgcgttgagggcacttgcatttgtaccatgtttttttataaaaaaatagaaatctattttttatttatgataaatatggcagcataaataagaaatgcttagtctaaaaatataaaaaatggtgagttgcctcgaagagtataatactcttcgaacaaaattatcgtaagcatcacgatcatattagattatataaacttatttagttttaatttattctattataaagtcggtgattaaaaaggctgctctaatcttactcttaaatatccatttatgctgtaaggaatttgtttttcgagaaatccctgtccattgcgaggatgtgtcattcccacataagcggccaatcaattttttctacgtagttttttttttgatctttctacgtagaagtatttggtttggataatgtttggctgctcggtttattttaccagcctcagttcttcggcctccacgtgttaaagatgatgaggctgggaagggcgccctgctgctactgcttcaccgagccgcaccccgccggcggcgtcgcggccgccgtcaggctgcgactgctgccgcctgcccgcgccgcgaatacctcctcagagccggcggcgcggctgagggcggttctcgagcaggtggacgaggagctgcggaaggggaacgacgaggccgcgctgtccctcgtgcgcggctcgcagggggcggatggcgggctccggttctttggcgcggcgaggcaggttggcttttgttgtcatgtaatatttgtcctgatgttgtctcgcgattattagcagctgtgatgatgatgcattcacccgctctgctttcgttcttagattggagcatttttatgtgcatcttaaactgatttggcaaagaattcatgagccgagagggcgataggatatatttagtgctgatttcaactaatgctattcataattttgcctaaataaaatgaagctttagccttttccttttctctacattttgatcttggtagtcttttttttttctactgaaatctatatcaggtacctcaaagactttatacattggatgagctgaagttaaatgggatcgatacttctgctttcctatctcctgttgatctgactttgggatcaattgagagaaatctccaaattgctgcagttctaggagggctctctgtatcagctgcattcgagctttctaaactccaagttctgtttctgtttttgggtctactatctctgtggtcggtggatttggttagttacatcataatgattctttccaatcatctaaataaattttcatcattatatggccttttagatcatcgactttatgacttgtagctgttgatctactgatttattcaagtccatgttatggttaaaaaatctccattgctaatttattcaaggagtatttaatcatctgtaactgtggaaatatgaagtctaacatattgttccattcatacagtaatgtgctttcaatcgatgatcttgagcttttctataatctctaactgaaaaatcttagtattacttgcatacacttcttagaactctaattcatttttttccttgagctcatttcatgtacccaaaaaattaattgtctattaatgtcatcttatcatttgtcccatgtcatgaccatcagacaacccactgtttcttgatcttacacaactacagctttctaggtatatttcggtggtggagtgagaaacttgattcttgatacaattggtcacaatcttagccagaagtatcgtaatagagttattcaggtatatatatgtcatccattcttatttacatgagcttaagttctgtgagtttagaaaatttgacaatgctttcttctaattgattaaagataattcgccatgaacccaagttcataaatgataaaatataaatgtttacccactttgttcctttaccactgttggatacaattttttaatttattagtgtacaatatagtcacagttaattatggcatctctagtttatgttgttttgctgtcagaggtatgagggttcaaattttggaattgtggttcagagagaaaaatctaccaggattacaacgattaataagtgtgtcagtttgatgatctgattaatttcttatcaacagttcttagtataatctatttatgttggtgagtttatactaaaaactcgggaagtccacattagaatatatttgtaaattggtgcattaaatgggtgttaagtctgaagggataaacatgatcattcccaataatttacttggttgcagagccaacatggctggcataattttaaggaaaactaactgttgcctctataagtctgcttcacaggctttgatgcctggtataacatagatatgtatggggaaatgttttactatgagtacattgcgcagctttcgttgttagatcaagctttggcaaagtgattagcggctgaagtagcagttctttttcccccttcatttcatattttatcataaaaaaaactcatagtgatcaacattgtaaaaagtaacatgggtatttggaccaaatggtgaaggaacacatccaaatagcttacttccagcaataaggcggttgaatatcttcaaaacaacagcttgaaatatggcagaaaaaatgaaaaattccaacctattgaatgctgacgttgtggtttattttacataatctaagctaacatccttttatgtaaaattttgaagcacgaagctggccacttcttgatagcgtatttgcttggggtccttcccaaaggatacactatcacaagtttagatacattcataaaaaagggctcactgaatgtgcaagctgggacagcttttgttgactttgagttccttcaagaggttagttttcttatcacctccatttttaccaccactattttggaaaatgatgatatcttattgtctgtaacctttaagtttcgagatgccctgtttctatcctctagatttgtgaagtgtatgatgcacaatcttgtgactcgctgttgctgttactctggtcaaaggctttcttcagacaacccccctatcgactagtttgtcatggatgtacaaaatggtgaagggtaattgttagagatattagctattctagcaaaaccagagtcacagtctgaaagcagtgtactgataagaaccagcattacctatccttttttctccattctcttttgcccataataaaggatgaaatgttattgttattgcatttttatgacgcagttaataatctattgaacacgaaaaagtggatgaactgtatcaacataacacatctttaagcatatggtgaacggctgttctgatataaatttctgagcaggcattcagcttaacatgagtacatgacttctgttttatgccatttcttcctggttaaaacaaagagttgagaagataaaacttgaagtgtgtcttgatgtttgaatccttcatgatgcttatgttacagtaattatttatagtataatgcccaccagttcagttcatcatattaaaaaggaatgcaataatcatgcaatgccattcatatgttatggtttaaaaagtattgccattatgtgatcgcaaaataaatgtagtgtgcattttatattgttattgttctacgccttttttccaaaaaaaaaaaatattgcatgttatatgcggactaggctaataattatcttttatacccaggtcaattcaggcaaactatctgccacggtaagggtttctaatcaacattatcttgtataaagcatgtaaaatagactgagatgtgattcgttcagcttcaagacctattgttggttggtgataatccttggattatcttgggggtaaacacttgtcggaagtaggtcagacagcggcgacttttggtagaacggtgctaggtggaagagtgcactgattgagggagaaacacatctagaatagctggccatggaacggattagagctgaagtttagaactaggacccatttattcatttataaaagtatgcacaaccccattcttacatagttatggaaaggaatatataacagtgtaatctagtcttatatctctaaaataacaaaatgaagatgctgctggactaatgtgcatttctgtttgcatacatgaacaatgtcagaactcaaaaagagtccgtaaagcatattctgataaaaatatatttactttaattcaaattcgacatgattttttccatttagtgttgaataatgaaagtaacatcgaaataaaacagtctttattgattcaggagaaatttcaaggccttaggcctcccagtagcccccaagaaatttccatcatccatttaatacataaggcgtattatgtgtagatccattgattaaggagtggatggaaccaagagaaagggaggagaatttacgaatttacgttatccttattattcaacaatttaaatatcttgaaaactggaaattgaacaagaaaatcattacatataaacgcaggttagatgggatggagtaaagtggggggaaagaatgttaacgtcaataaatttgcacacatcttacgttttgaaattagagaagactatatgcttcataaaatggggtactttgtcaataattgatcattccctttttgaaagctcccttttgcatagttgtatgcatattactccctttgtttcatattataagatgttttgattttttttcttagtcaaacttctttaaatttgatcaaatttatagaataacgtatcaacatttgcaacaccaaccaaacaaactatcaaaatatatttaatgttagatttaatgaaactaatttagtgttatatgatttgttacatttgtgtataaacatagtcatagtcaaacttatagaagtttgactttgaaaagtcaaagcgtcttatagtataaaacgaagggagcaactattataacattgtaacttaatattcaaatgagaacatttgcaccatagcattcagtgttggtgttaagtctggatttttttctttttgtgatgatgtttgtgatgaacagttgactatacgttggatctaatggcagatgttgaacaagttctcatgcattgccttggctggagtagcaacagagtatcttttgtatggatatgctgaaggaggactagctgacattgggcaagtatgtaggcatgggtagtcgacagactctgaattttgatagccattgtggaaccacatcaacattgtttattttatgcgtccttttttttttttttttgcaattacagctagatggattgctcaaaggtctaggtttcacccagaagaaagctgattcacaggtgagatgggctgtgctgaatactgtacctgcactgcgtcgccataaaaaggccagatcacagctcgcggaggcaatgtcctctgggaagtcagttggatcttgcatcggggtcatagaagagaatataaactctgaggatatttagttagtgactataaagatgatggaaaatatagatcacatatgtacaaactttcacaatggactgtaccttttaacttgggctttgtatttagtctgttagcaggaaatacatgtcaaaatcatggtttttattcagtttcatatattaaacgtttaagtctacgttccggaggtgggataatgatattttatggtggatgcttgatgatatatactgttttttatgtttttgctatgaaggtaatgaaaaaagtaccgtttgtctgaacaatttgtattttctgattttacgtaaagacatgaaggggggagggaaaggataggttcgctggctggatgcataactgccatgattttaattcaatagtctctagagagttggtcagaattgtgttccacagcatggcttagagcagagatgtaccataggtctaaaaattacttagatactacatccgatttaaaatatagtaatttttagctatatatttggacatacttctcagataagccagaagttattatatttagggacggaagtggtagctaccatacatttttctcttctgataggtgctatactccaacgacattaatgggagctcctgttgcatcgacggtgttcatcaatttggtcaggcaaatctcctgttgcaaaatacaccatcaacgggagtatatacaaacgatgatctctttttccctgcacgtttctcacgctgaagttcagttgaagttttttttttttctaatcattattaacaagttcttggatgtccttggtaatcactatccactggagcacagagaagctggcaccgtagccaatctctactcgtattagacaatcaagactaacagaggagatcaaacaaggtgttgacgcgaaaacctgtgtcgaaaggttcacaggaaagtgtacttagtagatgaactgcaaaatttcaagacctaaattat

SEQ ID NO: 3203 - DNA, 1159 bp, Oryza sativa
ctacccactatctcgcgaatgaggtgataccgccgtaaaatgtgtttggacttttgatgcgatctaagctccttggcttgcgcaatggcaccactattatcgcaatagaggtccatagggctagaagcactagtcatcacacctagttgagaaacgaatttctttatccaaacagcctcctttgctgcttcagaaacggcaatgtattcggcttctgttgtagaatcagccactgtatcttgcttggaactcttccaactcacagcgcctctatttaggcagaacacaaatccaaactgcgatctaaaatcatctttgtcgatttggaagcttgcgtcagtgtaaccatttacaacgagctcttcctgtcctccatagactaggaacatatccttagtttttctcaagtacttcaggatattctttacagctatccagtgactctcacctggatctgattggtatcggcttgttgcactaagtgcatatgaaacatctagacgtgtacatagcatagcatacatgatggatccgattgccaaggtatatggaatcacactcatcttgtttcgctcatcagtcgtttgaggacactgattcttgccaagattaatgccatgtgacatcgttaagaaacctttcttagaatcttgcatgttgaacctcttcaacaccttgtcaatgtatgtactctggcttaatccaattagcctctttgatctatctctatagatccttatgcccagaatatatgctgcttcccctaagtccttcattgaaaaactatttttcaacgatgtcttaacggattcaagcatatgaatatcattcccaatcaataatatgtcatctacatataggattagaaacaccaatgcgctcccactaatcttcttgtatacacaaggctcttcttcgtttttgacaaagtccaacgccttgactacttttgtcaaaacgaatatttgaactccgagatgcttgcttcaacccataaatggatttctgcaatttgcatatctttttagctgattgtggatcaacaaaacccttgggttgtgtcatgtacacatcctcatcgagatttccattgaggaaagctgttttgacatccatttgccatatctcataatcgaaataggcagcaatcgctaaaaca

SEQ ID NO: 3204 - DNA, 620 bp, Oryza sativa
aacaaggcatgcttctaggttctcgtactcctcaccacgatatagaatacaatcattcggacatgcgtgaatcttttgaacatccagtcctagagggcagactatcttcttagcctgatacgttgtctcgggcaatttgtttccccccggaagaatgttcttgaagagtttcaataaatcgccaaatgccttgtcactaacacaattttttgccttccattgcaagaactccagagtggtatccaactttttgtgcccctgctcgcaacctgggtacaacaatgttctgtggtcctctaacatcttgtccaatttatgggcccccttttcactttcgcagtcctccttggcgtcctgcaacatctgaccaagatcatccgcaacgtcgttaccatcagcatccctttcctcctcgcccatttgatttccttcaaatccagtgtactgagcaaagttcggaatattgtcgtcttccacttcatcttcttctatttcaataccttgctctccgtgggatgtccaacaattatagcttggatgaaccccgactcaaacaagtggaaatgaatagtcctggatgcagaatactccttctgattcttacacttattgcatggaga

SEQ ID NO: 3205 - DNA, 909 bp, Oryza sativa
aagaagaatctagttagcgtctctactatgtagagaaggttttagacttgtgtttgaatccaattaatatgtcctatctaaatttggaacttttattggaaaaggttatgacagcagaggcttgttccgcttttctttggatgacatgtgtaataataataatgttgtgaaccatattagcgagaatgatgagtccaatgtgtggcattcgcgactctgtcatgtgaatttcggttgtgtgacgcgcttggctaatatgagtttaattccaaaattcactttggtcaaaggttccaagtgctatgcttgtgttcaattgaaacaacctcgcaagcctctcaaggcatctgaggcgagagatttggcacctctagaacttgttcattccgatttgtgcgaaatgaatggcgttttgactaaagggggaaagaaatatttcatgacactgatagatgattgcactagattttgttatgtgtatctattgaaaacaaaggatgaagcattgcattactttaagacctataaagttgaggtagaaaaccaaattgaaaggcaaatcaaacggttgaggtctgatagaggtggggagtatttttccaatgagtttacatctttttgcgaagagtttggaattattcatgagaggacgcctccctattcaccccaatcaaatgggttagccgaaagaaagaaccgtactctaactgagatggtgaatgccatgttagacactgcgggactttccaaggaatggtggggtgaggcagttttgattgcgtgtcatgtcctgaataaaattccaatgaagcataaggaagtaaccccattcgaggaatgggaaaggaagaaattaaatctctcatacctacgaacatggggctgtttggccaaggtaaatgtatctat

SEQ ID NO: 3206 - DNA, 636 bp, Oryza sativa
gaatatgaattcgttcatttgcatcgaagtcagggcctcctgtcagggttatgggtaccacatatctaatagtagtggactaaatctcggtagtatccaccacatcccatgtcctatacggaacaaccctgtggatatagaaggagttcggaataaggaaagacaaccagagttttacatgaaaacgacaaagactactcgaattgtatcaatattggtttcccaatttctacttgaacaagagaaatcttatgtgtataaatgcaagctcccttagaagaaaagggggtacaatcaacacacgaccacttcaatcaacacccaacacaatcgacatagaagccacaacatagaagcctacatacgccaagacacgccgtcggatatcaacttcagggataaacacggctagtaccctacggtgtctccggatactgtcagaaaagatgaaagcgctatctctgatctcgccgggcacggattcgaggtgaaaggctaccctgttgtcgactacgagtcagatcgtcagaccgccatgtcgacaacagttagataggctaccccaagtattgtactggtgtgattatcatgaataagagcaatactggcttcggccaacaggatgtagggttatta

SEQ ID NO: 3207 - DNA, 800 bp, Oryza sativa
ttttttttttgacaagaaaacttgcagggctttgcccagcagtgtattttaaataaagaaaatatttacaaggttacaaagatacatgcggctcacacagagatactataaggtttgtacccaattaaaaatagtttgctttaaaggatcattcattctacacatatgcagaagaacttctttgtgaaaagagatctccatgcctggaaagagggttgaatgttctgaaatatgaagccatttctttgtttccagatgtgccaagctgccaaaaagaaaatttccaggaaacccttctgagaaaatttgattcttgctagggagatcatttggaaaaactccaaattgttattccactcaattcccaggtattgccaacagctgatgctgaaaggacataaaaagaagaggtgtagccttgtctctctgcagttcgcattgcacaaaacacacgtgagatcatcatcttctttggcacaatgtcttctatccagcatatctcttttattaagtctatcacaaaacattagccaggcaaagactttgatcttcatgacacattttgttttccatagccaaatcatgggtctggggggttgcaatgcagaataatttagcttatagaatttcttagctgtgtacttatctgagccccagataaaattccaagcatcccccatccctgattgtaaattcaaactgtccagaaccccctgaagttgcaagaattccgagtaagcctcatccgagaggggtagagcaaaagaatcttctaggggtcttgaacacatggccttgac

SEQ ID NO: 3208 - DNA, 603 bp, Oryza sativa
acccaatgttcacagcacatggatatgcccaccaacaaaccccttatgtaaacaagggaaaacagtcagctacatcctgttatctttgtacagcgtgatggtagtacaagttaacgcataactcaatgcctctgcacacagggggaaaaggaaacaaaaataaaaggaatacatacacacacgaaaagccaactgctcaatacatgaacggcatctgtctgttatatacagatcgaatgaatgaaaccagctcatccaaagagatacccatatgatacacaaaacaatatgatctagtggttagcatcaatcggtgcaccaaaccttgccttgtgatatcctgttgcatagattgatactaggcgcagctgcgtgctattaagcccctctagatatggtacaaatgctttctcaagcataatgtagatatccaccaagcagaatacaacagtctgaaagaaagtgaatacgatatcagattccaacacaggacattcatttttttaaaggtgatatgtattaacgtgcacataagcatatattattacacgtagcttctgtaaacaaaagctggaatgaatttaattatttaaaacatattga

SEQ ID NO: 3209 - DNA, 601 bp, Oryza sativa
aagtataaaaggaggaccttgcccatagagaaggggttgattctggccagatttagagcttagagcgggggagaagtgggctcacactttgtagctcattcatacacaaatccacaaaaacacaggagtagggtattacgcttcgcagcggcccgaacctgtatacatcgccgtgtctcgtgtgtcttgccggggagtaatctttccacatacagttaaatttttgagagagagcttgagattgcaccctaagcccccggccgaaccggcaaaggggggcctgcgcggtctcccggtgaggagcctcgagctccgtcagcttgtttcttcgatttgcttgcaggaataaggttgatttgcaccggcaagatcaacaacccacggagaggtgtatcgatcgctaaggcgcaacacaacgtctcgtacggttgtagtcggatcgttaacgtttctcccaaatcgtagttatcacaactctcatcatgatagaccccccagcagccttgagtgttgaaaagtactcagggttcatccagtggtatcacatcttgcgctgttcggtgagtttttatcatcctatacctagacaatagccatccaa

SEQ ID NO: 3210 - DNA, 506 bp, Oryza sativa
tactagagaaattacccctgtgatccgaagagtctaaccgatttccacctttttgtagttcgctgtcaaatgagctggtagttggggtgcttgacttaacataagctagaaaagcagaagactcagcaaccctcaagttagtctttattggacgtgaaaacattactccgggagatgctggcataaaagcaaaggcataaaccttagaaactattcttcaattgggggatctgctaaatcagctaaaggaaatggtttaaggctcaagatacttacaagcttggtcgccgccttcagtagagactagtaaaccctctggtgtgcctttttgtttaggctcagcatcagaaggattagactgcaaacatatcaagaaatgcaagggcatttaacaagtagactgatgcaaaaaattcagcatcttatcatcatcaattgaacatatgaggcaaaaaggcatgctctagcatctaaacagaacacaaaggtagaaagatactaaatag

SEQ ID NO: 3211 - DNA, 586 bp, Oryza sativa
  unsure (1)..(586): unsure at all n locations
ttgtttagcacttttaaacttagcatgccggttttgcattgagacaagcaaacttctagtcntgatgcatccttttgagccttcgtttgcttcatatgcctagatttacacaacctacataatttattggtgttgtagatcccagatgtactagctatccttgacaaaaatctgatattactttattcagtgttatgttcttatgtagagtcacttctgttatttcagttgacatggatttgtgcccatcttttgtgcaggttatacgcaaaagaataatcgagaaaggacttagagttgatggcaggcaacttgatgaagttaggccactctactgtgaatccagcacatatccaatattgcatggatctgccctgttttcacgtggggatacacaggttctctcgcacacactttaaattgaaggaacattgcaacatttgttttccagtaaagtgaccacccacatggactactttatttgtaggttttatgtacagttacccttggtgctcctggtgatgctcagcgattggattcaattgttggtcctccaacaaagcgtttcatgcttcactacagcttt

SEQ ID NO: 3212 - DNA, 678 bp, Oryza sativa
caccctgctaattttatccttacacgacagcaacacgtcgtggatgactcggtcaaggttggtgtccccgggcccacctggcagcgtcactcgtacagccttctctttccactcttgtgcacgccgccgtatctcacgccccttcttcccctccatggcctcccgtatcatcgccgccacctcccctcgccgcgcgttaccgccgatctccatcccgatgccccactccgtcctcttgtaccggcagttcgtctgctgctccgcgaagaagggccagctcagcatcggcacgccggcggctaggctctccagtgtcgagttccacccggagtgcgtcaggaacacgcccacggcgtcgtgctcgaggaccttctcctgcgggcaccacgccgggaggacgccacggccctcgacggcggcgtggaactccggcggcagcgcggcggcgtcgccctctccccccttgacgaggtctgggcggacgacccacacgaaggcgtagccgctgtcggcgagcccccacgcgaactccagcagctgctcgctcgtcatcaccgcgatgctgccgtagctcacgtacacgacggagctgggccggtggccgtcgagccactcgaggaggccgtcctgctccttccagaggttggaacccacgccgtgcagcgggcttccggtggg

SEQ ID NO: 3213 - DNA, 1993 bp, Oryza sativa
gtaccccattgagccaatgccccttgcaacatccaccagcaatccctccctctggattggtacttccgtgctcgacaatgacacggatgcaggtatgaggccttcctcacggagcttcttgaggcggtcgttgacaatcttgaggtgtgcatttgccatccatccgaggctggtaatttgctcgatggtgagaccctcgaggctcgggcggtggccattgatggcttcaatgaggagtagcttggtctcgctttcatcagcatcacgtcccaccttgtgcaactgctctttgagcttgttgacctgctcgttgaggatgtcctctaggtctgtcatcttcttgtatctgaccagatgcggcatggccttgaagtgctcgagaactctggtcgcctcccacaccgacggccaaaccttcgttgcttgcacctcaacctcaccgtacaccatgaggaatagtgttgcgaactcactaaccttcttcgtcaagcccttgagactcttcatgaatgtcacccgctgcttcacatcaatgacgatcccctgaagcttcaccttcttgcgagccatggcctacgcagttcactactttctagcaagaatgcacctgtagattgaggagagatggttagattgatgtgaaatcaaggaaaggggaatatggtggatttatagtgggagatcggattgcaacaatcgccatgttgtggaaagaaattatttcgcaaatccaaaaatatcaaatgaatcaatgcaagttaatgctttcctgacaaaaatgctcgggttaatgtgtagctggcaagcatatctgtcaacctttaatcgtgcctgtcaatagccaatagatattactcgctagatgataatgagttcccaccaaatatacattcatgcccagttattcatatatgtttgagttaatcctctttgatatgtgcaattggaattcaatttacaactacagaaacgatttttgctacattcaaagagttccaaggattgatcctgtcacgatagctgccatcggatgggccatatctgccacagaatggatgatttcccccatcactcataaacttgtgaacaagggagccgccttcatgctcgctcgctgtcccagcttgcatctgttaaaaagcatacatagttatcttgttaagaaagagaacactagataactcgcaaaccgtatttttatcaactctactattattggattatttatccatttattgcagttgagtggagagaacagtgaagctagctatgtaatttgaggctcctattaaagccccattggtctaaaatctcaacatatttgttgcaagtcatcaattatattattaaaatttagtaaagccacaatgctcagcaaaaagaactagcaaaacagtactatattccaagggaaaaaagaatttacatctttgatcatgtagaatttagattgtatcaatttagactattctaccacctccacaacatcaattggagaaaaacaagaaagattaacaccgctatgttcgatgggtccatattttctcactatactgcagtaaattggtctgcctcaaccatataagaagtatactagtataactctattttacagcgaagatagcatgaaaacctcgactagttcgtaaattttattctcaaatctgttagtggatttcaggaagcacataagcacatataaagttggcttgcaaattgcacaagaattacatttgggagtttccgtgccgcgatcatttccttcagttcttggacagaaggtgacttttatacctaaccagatcaactttgcatgcatttgtaggatgttgttccaagtataattaagtccaaaaatagcttgaagaaacagttggagaaaatagaaactcccaacgctgaagcacagaagattgttgacctgacaaacttcataagcaataaaaaaatgaaaaccataaacccaatgtttttgccctatatacatcgattc

SEQ ID NO: 3214 - DNA, 611 bp, Oryza sativa
attaaactcattattgcaaccagttttgctctaaactcaactacaataaatccaatgatatctaaaatagatgcagcacggcggagtaatatgttgtatatagattggagagcaaagaagacgaaatttagcatatgttagtatgtacaataaaaataaccagaagaaagaaaataacagaaaaaaaaataatccactcactttccacatccaattcaacagccttgtaacttgctgccagctctgccagcaatcgcttcactcgggcgcagaaagggcaataagtcttgctatggccagtccaggaagaggaatgacacgaagaaagatcaaaattggagtttaggacagcataggtcacaattttgcagaagtagggagataatcatgttaaactctgttttatatgattgcttgattgggtttaatttgcatgatgtaatatggtgtatacagacaaaagtaacaattatttctcatttctttcagaagctacttaaaaagtgagcgcatattaaatcaactcgttccacattatacctgtgcatttcttacaaacaaaatatttcgatttcattatcagcagacaacgacgtgatacaatggtaaca

SEQ ID NO: 3215 - DNA, 937 bp, Oryza sativa
tcgtagggttgccccattgccatccaatgctaccctgaaatcactggggttaattgatagaaatggagttgtcctgggggttagctttgcatttgttaaactcggcttccctggagtaggcctcaggagtactattctacttggcaaggagggattttcttccttaaaattagaactctgatggaactctctcattgctgctccattttgctcttgaatttgctcagttccagtttgtcttgtgccatcactctcaaaagaaccaagtggctttagtaccgtaatccgttttttctgaggtggtgctagattggtgtgagaccctaccaactgtcttgagaaaattgagttaggttcttcaagaaatttcagaaacaaatctttgtttgaacttacaaccctaagagcttcttgtaagtcctttgaatgaagcggcttctctgccatgcctaagcattttttctccatgacacttcctcgcaaaatatccactctgttacttgtgttcccagaagaccctcctttctgcgaaattttgtcctgaaaatagctcatccgtgtttgtgcttcagatacttcatacacatcattatattgaactgcttcctgacaaaatgggtggatatcttgtgtcgttgactttatgagacgatgctgctcttgttgctttaagtctttgtttagtgcttttaactggttacatgattgacttttcctgaaaccacttttggcctggtgtaaaactggtccattagcaggtagatcctcctcaaggcccattaatcgggcaacgacacctggtggctttctctttaattccacttctttagtcatctcttttgctaataacacttttaataaagttgcatttgattttctacgtgaagaaccatcacaaggtgcctggcgagaaacccttttttattattaaaaaaag

SEQ ID NO: 3216 - DNA, 1169 bp, Oryza sativa
ggtaaatcttgcaacctaaaaaaaaaatctgataatcaaaaccttaatatttatgtttataatcagattttggaaaggcacctccatgggtaagaaatatcacgagagcttccacactgcaaacatggccaataaatgtacttcaatttgtatttgtaacgcttctgaaaataatcaaccacagttgtagtaaaattttctttagcgccctcagcaaacctaaaaataatataaggaaaaattttagtaagcataattaagggggaaatattttgttggatagatgcttagcgtatgagatcaaaacttacatgaggtcttccaagggaacgacagaaagccctttaatcttgtatcttatggttttgtctgttcgatgggtggtttcaacaaaaacaccctgcagtgctttctctacctggcatttacaagaacagcaatacaaaatttaatattgtctaaactgcattataatagcaacatgactaatgattaaaaattaataccttgtcatattcctctgtagaaaatagttggttgacatcagttctattcaaaagctcagccacaaattccaccactggaagaggtttataaaatggtgctgctggtatatctaaacagcaacattatacctaaattagtcttcaaagatagagacaaaaaaatagatagaaaaattaaaaggcagcatttgttactgtacatccagaaaatacggtgtttgatgatggacaccacaataacgaagctttgcttctggacactaccaaaacatggcctttacaacaggacactaccttcatttttcttaatcatttttgtcatttagggctggtttggtttgtggcctaaattggccttaccaatttatgtcaatgtcaaattttggtaacttttggcatggctaattttggcaaaggaaaaattgtgtttggattgaagccaaaatagcctaaattaactattgaaatggcctattttcttaggcatgccaaaatttggctccaaaccaaatagcaataaacactattgaaattgccaaatattggtaaggcccaatataggcctcaccaaaccaacccttagagagatctttgttaaaggacaaaaatgcccctagcccactacccgtcctcttgccttggcctggttcattggacccagat

SEQ ID NO: 3217 - DNA, 714 bp, Oryza sativa
tgtgtaaacctaagtaatagcaaagtacttatttaggtagtatataattcgcatcaatattgaaatatgtttcagctaggagcgagttcacctcttgttgtagtttctttgcacggctacgtgtgatcggtccttgaaatggtgtaacggattgtctctcatcagcggctaagtcagatgattgtcttgagtgttcatgtgacagggctggggcacatcatcctcccccctcttgaaaaggagtcgttctcgactctgtttcatcaaaaccataatagggtaagatcggcaacattgaatgacgcacttacaccatattcgcctggaagatcgattttgtatgcattgttattgattttggcgaacactttgaatggcccatctcctcgtggcatcaattttgatttgtgtctttctagaaatcgtttcttacgtagatgaacccaaacaagatatccgggttcatagaccactttctttctatgcttgttcacctttccagcattactgcgcaccttcttttcaatttcttcattagtcttttcatgaatcttcttcacatatgcagcacgctttgaagcatccatgttagttctttcctgcaatagaagaggtaacaaatcgattggtgcagtaggtttgaactcataaacattttcaagtggacacatgtttggattaatttccctaatttcaatggacggttccaggaga

SEQ ID NO: 3218 - DNA, 642 bp, Oryza sativa
tcgccgccgactggtgtccccgcctatacgtcggttggtcacaccaccgttgatgggcatcgtcatcttcaccgccggcctgcctccgtcgccgccgactggtgcctccgcctacacggctggcctattatgccgccgctgttgggcgtcttcgctttcaccaccggcctgcctccgtcgccgccgactggtgtccccgcctatacggtcggttggtcacaccaccgttgatgggcatcgtcatcttcaccgccggcctgcctccgtcgccgccgactggtgcctccgcctacacggctggcctattatgccgccgctgttgggcgtcctcgctttcaccaccggcctgcctccgtcgccgccgactggtgtccccgcctatacggtcggttggtcacaccaccgttgatgggcatcgtcatcttcaccgccggcctgcctccgtcgccgccgactggtgcctccgcctacacggctggcctattatgccgccgctgttgggggtcttcgctttcatcgtcgaccgccttcgtcgccgccgactggtgtcttcattgttattgatggacgactttgttcccacattggccacttctgccatcaccaaggggaatattacaaagctaagtcatcatttatttt

SEQ ID NO: 3219 - DNA, 888 bp, Oryza sativa
atccttcttttcagctcgcggacgagctgctcgtcgagggggggagagatgtcatgtgggggcgccactaccaccgcaggagcaggccggaggcacagttgcagcaagcagcatgagtcaaggttgcaaacttagaaagaatcatgcaaggaaagtattaattaggaggaaataaatgtcattccttgtatcagaggccaagtgcctataaggcacgtaatcagcaacatttgaagataagcaatttgagatcaaaattcctaatctccctccttgttccctaacctccctctgttcaccattgagcgtgcagggaagaaccctgccgccgcccctgatcccggctacgaactctatagccgcggtccggctatcctcggtgtcaacgcacttgacatctcaataataatttcatgacttcagctttattttctaattagactttatgactagaaaagaagtatagggatgcacaatcaatatcaactatgtttaagaagtgccaattactcatttgcatgtcaaaattttggattccagggtcaaactaaagttgaggatttaactaagcaagttgatatcaccttattgatcatgttccatcgtccgccagtaggcacacacgttttctcattcccggagacatggtacttcagctgaagattgaacaattaaattttggaataagtgacaaattttttcttcaaagttcaaatgaaatgcatctaaatgcagcataaatacctcaggtgtaggcaagatgcggccacacacaatggcaggaagaccattaactctaattccaaactcctccacacacctctcaacgttacagttgttgcgaacctgccagaaatccaaaatttgagaatacaagtatcgggcatg

SEQ ID NO: 3220 - DNA, 18824 bp, Oryza sativa
cgatttctggatcactcgatccccacaaagattcgtgccgtgataatttacatgatatgaatcaagcacgacaccggatcgggttagctaaaattatgtcgacacatgctataatcgacttttttaagccatttacacagaaattacacctcacttacaccacatttacatcctacttacatatatagttagtatgtaatttttgaatttacatatgtaattttaggaattacatatgtaattttgagacttacattataaatacattaaaattacatatgtaatttaaggagttacaatgtaaatacataccgactattttttggtgaaaaatatggcgccataaatatagctacaccctagaaaaaaacatgtccaactgacacgaaggccatatgcaagaaaaaagactaggaaacaaccacactgaatgcccctgatttttggtagccatgtacatacatacatatacgagaaaagataataagcaaaaatacctcattaaatattgattatatttttgttagcattagatcaaatcttaaatctacggtccacctgtttactgtattatataaatttttttttaaaaaaaaagtcttgaaaggagacaccatattcgttgtggaagctataaattctcaaattaattagagaaaaaaaagttcaggtagaaatacattaaaaaataactaaaattcataataaaagaagtaatactgaaaaaggagtccatataaaacataattaaagattaactaaaatttagaataaaaataaaataaattctgaaatttgaaaaataaaaataagagtttaaatagaaatacaatttaaaaataactaaaaattcaaaataaaaataaggaataatgaaagaatagtacctgcataacataatacgagattaattataattaagaattgaaataagtaaattttgaaattacaaaaaaaaagcttaagtaggaatacaatttacaaataactaaaattcagaataaaaaataagaattgttgaaagaagagagcatctagaagacaacatgagattaattaaaataaatagaataaatttcgaaaatagaaaaataattataagagttcaagtcggaatattttataaatagaaaaatattggaagaaaaatatggaattttcaaacacaaaaattcatctagaacacagatgacaaatgacaaataacaataaagataggagaaacaataggtctgtaaaagagtagagtggtgacagttgatgggatatataaaaactataaataaaaccccaaatagaatcccaatgacgattaaaaggagtgacgacaggcatgccgttaaacaacatgatcacaatggttggcaggacttctaaaagtaaaaaaaataaaataaaccccaacaatcatcatgtttgattttaaaatcccaatgacagtaaagagagaaatagcgggcgatccacggaggagtacaatggcaaagccgctgatcgtttggcgagacatctagaaagtaaaaaaaatgaacctaaacaataattttgttcattttaagaccccaataacaataaagaaggggcagcggacgggtcatagaggcagcgtttgaccgtacttctaaaaattataaaaatgaaaaccaacaaaacaataaactctaaaaagtacatggtccgattttaaaggtttgagacttctaaaagtaaaaaatatataccacaatgataatcatgtttgattttaaaatcctagtgacaataaagagatgaggcaacgggcgagccatatatagtggcgaacccgctgacggtttggcgggacttctagaaaataaaaaaaataaacccaaacgataattatgttcaatttttaatatcccaataacaataaagagagtagacagcggatgtgccgtagaagagtatagtggcaatgtttgacgggacttctaaaaattgtaaaaaggaagtccaatgagacaataaactctaaaaaccataagctccagattttaaaggttacaaggagaatgaataaaaacagtggtagatcgagaaagcaaagaaagaaggggtgatagaagtaaggggtagcgactagcgtgacttttacaaaactataaaattagatatacaaggatgataaagtttagtctttcaaagtctgaagataactagctatttaataaattttaagcaaaatcatattaaaaatagataattttgtatgaatgctagccacgcaattgcgcgagcaacccagttagtttataaaacctagtcactttgggtccttacacggttttgaccgcggttttatctgacgtgtcggctgagttagcatgagaccccacgtggaccccacatgccaagatgatacgtcatcatctctctttccctcctctcactctctcccctctctctctctcactattctcctctctgggcagactagccggtgggtggggaggaggccgacgggagaggagaaggtccggcggccggcgacgccgtggtggtagcgatgacgcgggagacgagatcacctcaacctcatcgtgggtacgtacggcgtcgtgccggtcatcgtgccacgggttgccggcgtcgacacattggacgctactcgactcattcgagcccatccatggcgtgcttctatgagagtagtgtgtgtatcctcacctgataacgagccagtcgacgacgatgaacgatagtggtgttgtttgtggccgcgagatatcgtccacttgaggcgctgtggagcatgaggatggggaagccgttaaagtggagtaatccctccatactcgtaaagaaagtcgtttaagataatgtttaagtcaaaccttagaaatataaattatgaataactttcgagttgttaagtttgaaaatgtaaaaattatatgaatatatttgtcttgaaaaatactttcataaaagtatacatatatcacttttcaataaatatttttatataaacaagaagtcaaagttgtgttttggagaccgtgtcgctgtccaaaataacttcctttacgagtactacgagtacagagggaatatgtgcaccgccagtagcggatctaggatataggatatgagtggtccgacctcaatttgtttttctaaacaaagtaaatctaacgatactaatatatacaatgcatataatagactaaatcaccaaaagtttacaatgatatattaataaagcatcttagaacatactccctccgtttctaaatatttaacaccgttgactttttagcacatatttgaccgttcgtcttattcaaaaacattttgtgaaatatgtaaaattatatgtatatataaaagtatatttaacaatgaatcaaatgataggaaaagaattaataattacttaatttcttttaataagatgaatgctcaaacatgtttaaaaaaagtcaacggcgtcaaatatttagacggagggagtataaaattagtaattaagtaatattttcatttaaagaagcttacacgactatgaaagtttaaagaagattaccatactattttttacttatcgggtctatgcgggcggacgggcgggcggtgcactgcagccaggaggttaggaggcagttctctgtgagtccgtggcttcgttttccagttttcctcggctcgacgacagctccttgtggcggcagcacacactgcagcagtgtggcactgcggcggccaaggcagcgagcggattggggtggtcgagcggcggcgcgacgctagtctgatctgatcgcgtgattccaatcgcgtcggcagctcggcacgtcgctagggcgtcagggcgaggaggagagaggcacgtctgggcccggcacaagtcgcgcgaccgcgacgctacagtttctttccttcccttcgatccacgcgcgtggggggctcctaagagcatatacaagagtgtctcgaaatcttaactctccaaatatctatttagctaactctccgttcaattagcaagttaaatttttttatttacttcagcctctccattcatcctctctattctgattgcatgatagtgggacccgcatgtcagcctcaaccttttcttcttcctcattttctcccctttttcccgagcagctacacaagcagagagcacggcggtgaggcggtcccccgtggcggcgccgcgggtggcgaacggcggcggaggagggccgcgcggccgccgcccatggtgccaaggctctcatgcccccgccgccgccacaatgctccgcttctgcctccgccctacgcccctacgccctcgtccgcctccacccctacgcccctcctcccctacgcccttgtccgcctccgccttttgtttcatttggaagcagctggtactgtcggcacaaaccaaccaactaggcgttgcgagtgatcaaagatactgtcttttgttatcctctgaaactgaaaggaatgcgatatgatttgatctgacgagatgtgttttcacctgtcacttggacaagatcgtagggctagatgtccgattattcaccagctgtgcaaaccaaaccatcacacaccgcattcaaagttcacaccgatcacaagttcacaaccatcagtcgtcggctacaaccttgaacaagaaaaatgctcgatcgaagctcgtttgactgacgtaagtagatgacaccaacctgaagaaaaaagacgtgtagagctaaaagctaagggcagggaaaagaaaatcgatggctgctgttcgtcgcagtcgacgagcttagccatcctccaagcgccgccgcccgaaggtgctccccgtcctacctcgccaccccctccgtctccccctccgcctccacctcggccctcgccgccgccgccaccaccacctcctccaagcgccgcagtgctccccgtccttccccgtcctaggtcgacgaggacgtcgaggccgcgctctcggtcgacggtggtgaccgtgccacggcggatggggctgggaccgtgcgctaggaggtgacgcggcgcacttttttttttgacgctaagagcacttaacgctaactaagagcgtctttcttctttttcttaagttgactaaaacaaactttcaattccagatttgaactcagatttaaaaatttcaagtcaagatttaaaaaattttcaactctgatttttaaatttgagttaaaagttttcaaacctgagttaagttttcaaatcttgacttgatgtttgtaaaatttgaattgaaagcttcaaatcttcatttgaaagttttcaaatccgagttgaaagttttcaagtccgaattgaaatttttcaaatccgagttgaacgttttcaagtttgaattgaaagttttcaaatccgagttgaaagtttttaaatctaagttcaaagttttcaagtttggatagaaaattttcaaatccgagttgaaagtttttaaatcttgacttgaaagtttttaaatctgagttaaaattttttaaaaaatcttgagttgaaagtttcaaatcttgagtcctgctcctacacgcgtgcggtagtcaacagcgaaaagaaaaaaaaaggaaacaatggcagctacgaaaaaaaagaaatgacgtcacgaaaaaaagaaagaatcgcgctcgcgcgcgtgggccttgtgggccagaagtgcgtgccagcaatgcgcgcgaattagcatttgtggcgtgcgggcgccaggatcgagctttattctgttcttatttttttaatagtagggtcgatcactgcacggacgaccctatggatccgccattgtgcaccgcccacgcctcatgcacggacgcacggcccaaccgcagggagacgctgctcccatcgtcatctgcatagaggtacgtgccgtgggcgcggctccacagccacacatgatgcccattgtggaactgctttattgcctccggcaagcagcggaagtggcgcggggctcttggtttcttggtgcttcggtcagcgagcgggcggaggagcttggtgctcttggtttcttggcgattgggtcggcgaagcgacagagatggcgcgcgcgggggaggggggagggggggtcttgttttattggcgctctgatcggcgagcggaagagacagtgacgagctctttgtttcttggtgctccgacgaggagagagcgcaaagaggagagaagttcgttgcgacggttactgcacagggctctaggcaccaagaggggagaggaccctagccagcgatggcggggttgcgccgccgccatagggattcgatggtgccggtggaggtcagatggcgctggggatgacgagttggtaggcggcggcgaggtggccataggaggagggctactcttccgcactaccataggctggccagtgaggaggaggggagggtcctcaggcaaccgcattgccgggcaccgaccaccatgcgcctctccccaccacacgccaccccctgctcgtcttcagccgcgcggagagaagtaggatgggagatgaggggagagaagatcgaggtgctaacatgtggggcccacatgggtcccacgctgactcaaccgccacgtcagatataaccgaggtcaataccgtcttaaggacccagagtgacccgattttgtaagataagagatgtcatatatttgtttttcggttgagtgacgattttataattcggtgacaagttgaggaacctttcatgtatttttttcctttccaaactcgtaatccagttgattttaggtgggctagaattggatgtcctggagtcggtataggcccagagtaaagcccatcgtgctcccaaatcctcccaagcgtcaagtccgcgaacagctgcataaatggagagcagcaaatgttaccatgatgttgacgctctgctcccgtctttgtgatattgatgctagaggctcagccttcaggcaatggtggtgatggtgagttagctagctagaggttcattcaaaccgtcgatctccacaacaataccacactcctacttcctccgttttatattataaagtgttttgagttttaaatagatgttatatgagtcaaaattcatatgaatgaatattagtaaatctaagcaagagatgttgaggtcaaaacgtctaatagtatggaaaggagagagtacaaccctaggagacaggtcaccacagtccacaagcatttaacagtagaacatcacgcctaggacacgatcagcaatctttggaaccttcagaaactcaggcaactcagaagacacttcattcctgatgcttgatccatcgccaaacttcccgagatagcttcgtcctcgggctgcagcaagatgagcatagtatagtgggggaactgcatagcaaagttaaaaagtttatgacttcaagcctaatcagtagccctcaatagtccaaataaaaagacacacaacgttaatttcagaaaagttcacaaacaagtttgtccagaaaaagtacagtacacgaaacctgagaggatagatcaaaaaggctacgatgtttagaaggggcacaattatgaccctcattcgtgtctcaataaagtaagctatcaaatggtaccctatctatactttgttaaccaccctagataaaagatattatcatcaaacataaaccgaaagttgactcacctatagaaacagcacgggtgcatcgtgcatacctacatattgaaaagattagagttaaatggcaaaaacaatcaaggtgagcacaaaaaagtaaataaaataaccaaaggtggacgtgaacttacatgtaacataggttgtgtgtaagcaactgaagcccgtcagcagtgaaatgattttcatcgaagataactgtataatgcgtaggtctactgtttccctgaaaatgacattatatacaatagattataaacaaatattcattaatacttataccatcatggaagtaccgaatcatacaaagcaaatttcacacaattgtaaatatgaaaactataatttagcttcaatttcaattggacattttgcggaactacaataataatacacgatttatcaaagactacaaccctacttgtgttcaatatgtgggcccaatgtgattattgcatgtgggaataagttcatctgaggtcccttaacttgtcaacggatctgattttcgtccctcaaccggaaaaccagacacaacggatccctcaactatcaaaaccggtgcagatgagatccctcggcggttttgagagcgattttggctggcgtggcgcctatgtggcgaatttgactcggtcttcatctgacgtggcactgacgtggcgcttacgtggcaatttgatctcgaaaaataataaaacccataggaccgacatgtcagttccacacacaaaataataaaaaaaaatggtaggacccacgtggaccccacatgtcatcctctctccttcctcttctctcaatcccctttctctctctagccgatggagcagggcgagcggcggtcgacagaagcgggagacgggcagagcggagaggctggccggcgaagcggggcgagcaacggccgacggcgggctaggtcaggtccgcggcacatggggccatagagcgcagacggcggcgactgctggcgttgtggagaagggcgtcaacggcatcgtcgggagtatctcctccggtcacgcctcatttcccttctcccctctccctccctaaaggcgagcagcgagcaacgggatagaagctgggcggttgcgggtcacagccgggagaggacagcgggtggggcagggagggaggaggcgagagggcggcgagcggagcagggagggaggaggtggagcgaccacgggggaggcctgcttcattgcggcagcgatgctgtcgaaggtgtctccaggcgacggtcgcgatggtgggcggaacccggagatggaggcagcagtcgcgggggagtctggccttcccgcccctctcgctggcctccttcctcccccgcccactcacctcctccctcttcgcgcgcttggctggctttggttcgccgacggagagggagaagagcaacggccagccattctcccacagcgcctccttcgtggggagggcagcgaaggcggcctccatctcccatatcgtcattcggattgccagcaacggcggcggctagtcccgcccccgcggtgaggtccatcgcgacgccaaatgcagccccgccccgctccgccccgcccgtcgctcgcttctgccggccgccgctcgcgccgctccatcggccggagagagagagaatagagagaggagggaggagtgaggatgacatatggggcccacgtgggtcccacgggttatattatttttggatcaaattgccacgtaagcgccacgtcagatgaagaccaagtcaaattagccatataggcgccacgtcggccaaaaccgccctcaaaaccgccaagggacctcatgtgcaccggttttgatagttgagggacccgttgtccggttttccagttgagggacgaaaatcagattcgttgacaagttaaaggacttattccttgcatgtgtgcatgacatggctgcccaaacttgtgacattttggcccaattaggatatggcttgtgtagcccatgagagctgtgtgcgcatgtttagtaccaccttgctagtctagcaagggtggaaccaacttataaagcatcatccctccaaccatatcactcccgggttaacccttttacatgaagcgaggacgaaagtgtaagtggattagtaaatgtaagtagacccgcccgtcggacaggctggctacacggacgtacggacagttgggtcctttgaattaggatatggcatgtgtggcccatgaaagcggtgtgcgcatgtttagtaccaccttgctagtctagcaagggtggaactaacttataagacctcatccctccaaccatatcactcccgggttaacccttttacatgaagccgaagcgagaacgaaagtaccaccttgctagtctagcaagggtggaactaacttataagacctcatccctccaaccatatcactcccgggttaacccttttacatgaagccgaagcaaccttttacatgaagccgaagcgagaacgaaagtataggtgcagtggtatgtgtaagtgggctcagttgtatgtgtaacccttttacacgaagcaagaatgaaagtgtaagtgcagtggtatgtgtaagtgggcctagtggtatgtataagtggacccgcccttacatgaagccgaagcgagaacaaaagtgtaagtgcgaagcaagaacgaaagtgtaagtgtagtggtatgtgtaagtgggcctagttgtatgtgtaagtggacccgcccttacacgaagccgaagcgagaacgaaagtgtaagtgcagtagtatgtgtaagtgggctcagtggtatgtgtaacccttttacacgaagaaagaacgaaagtgtaagtgcagtggtatgtgtaagtggacccacccgacggatggtggtatgtgtaagtgggcccagtggtatatgtaagtggacctgcctgatggatgggcttgctacgcggttctagagggagggctgtcggatgggctgatttttatctaacaaacagaactaaagatttttgaaatgaatagcttaaattgcagacaaaataggtatgtttttctgacatttatatacctgagaagtatggctacacaaataaaaatcaaaacccgaaggatggcatatgtcttggtcaatcacagttcctgaaaatattcaagtattacattgtgttctcaataaacaaaaataaagaacgaatatacaatatttatagtaaggtccttctgcaaaaacataagataaaaatcctatcttgctcaggtgcatgcgttctatttggctacaggggtttcccttgcatacatccagaactaaaagttagcaaaataaacctaataaaactacagaactactaacttgctctttctgagttagagagcttccactgtgcctgaggttaggttttgtcttggcagcttatagggctaaattaggctgttgccaccatgaagattccatccagcacgtgttggtcaagtttttattatttttattttgtggattttatgttgttatgtataactgcatgtgtgagttgtacagatataaccatgtcatacaaataaagtttttgttgtattaaaatcactgagataaagttttaatttagaaccactgagtttctgaaattgtttattgttgggtttgaaaatatttaaagtcacccatttcaaaatcttgaaataggacaatctggagtaataaactacttaccagagggaatctgtgcaacttgttcagtataattactgcaaagtgtgtgagggaaaatcctggtgtgatgccttttctggacaatcactaatgtgattggtggcagataatcctcttgtagagagaggcatgccttgaaaaggaaatagataaaatcagaaataaatttagcggacaaccagaattacacaaataaatgtgaagcatcaccttcctgatggcatctacttcatgaatgataacctggctgaattgactttcgcttattccatctctagaagcaacaatgaccagtcaaaagacatcatccaagagaatgaataaatatatcactattttgcaatgcacacctgtaaaagattatcctttcaggcttacgcctattcctctggtagaagttcatcatcagttccctacagcaatcaaaacacatgtcagattccaaatcaatcacgtgagaattaataatagaaaagtcaaaaaacgcagatagagaagatacttacctgatcatgccatcaggtttaaggcacccttttggatctcgagtagaatgaaatagacctcctataatctcctgcctttcaagttgggcagagattagctctatatgtggtgacttctggccagtcgattgatccaaccacctaaaagtatttgacaaagtaatgtattgacccacaacaaaattggagggactaatcctttcaaaaaaaaattggagggactaaggagtaaagaggttgagttcaatttcaagttctttatataatgagccaaaatgtttatttccctataagaagccatagtagtaaaacagaaacaaattctaagcaacagggaaaatcttactcctgcaatagatgacgagtacatccctggtgggggatggctaacatcagcaccaaaaatgattgtcggtatgtctgacacgaacggtattccattatgaacaaacgcttgctgaagaactgtattctgccctccaacctagttcaagatactgttgtaaataccagcagtacaatacatggaaaaatgtgtagcaaagtatcgatacatatgtaccttgacatttatcttaagggcaatattctcgaggtattttatatttgtatctgttttaacattctttggtaagcagcactgagaaaccagtccaagcttggtctcacatacacgcttaatttttcctatagaaacatgcaaaatgacacctcaaagctaacagaaagcacagagttttttagcattaataatttcataccatagttgcctctttcttccggaagaatgacaattaatagctggagttgttcttttgcagtgctgtgaatagacttcaatgcagcagctatgttcagatcattaatagaccataatggtaccaatggccactctttgaaatccttgcaaccacaaaataaagtgattgttaatgcaatatgcaacaatttgaataacttggattataaatcaatgcaggaaatagcataccattccaaggaagttgcacgtcttgatcatttaccacagaatatcttaactgttgaagcaggtacttttgaaaaatttaaacaagcccatctctcgacttttcctccatttaccaatttctgaaataacaatcaattcatactcaaaaaaatatagagcagaaaacatgcactctaacaattttgaattttaacttcaattaaagggaatatggcactttgttgcaatgaagcataggtgatatatacttatgaccctgcacactatatgatgtatggatatttatgcatttcgtgtttgttgtttgttgtggtgactgaaatgcctggttcatattcaatgtatgaaacaaatggcctccaatacttttcctccaactagctaaacagagatatgacaaatcacagatgtcctaatattaaccaaaacaaagaaatttgaagttttatcaaatgtgcctttcacttgtgtgctacttgagtatgtaattacactatatgtgagcacattacgtacatactgccatgttgaagaacaagggtaagtaataaaaaatgcaatgtacgaaataggatggcagattcacagcctaacaccataattagaaataaataatgatgcatataatcactttatgacttcacttgtctatggagtttgtagaggttaggttgagttcatgaggcttccatttcctttctcatgtcatgtgggggcgccactaccaccgcaggagcaggccggaggcacagttgcagcaagcagcatgagtcaagggtgcaaacttagaaagaatcatgcaaggaaagtattaattaggaggaaataaatgtcattccttgtattagatgccaagtgcctataaggcatgtaatcagcaacatttgaagataagcaatttgagatcaaaattcctaatctccctccttcttccctaacctccctctgttcaccattgagcgtgcagggaagaaccctgccgccgcccctgatcccggctacgaactccgtagccgcggtccggctatcctcggtgtcaatgcacttgacaacttggtatcagcttccaggcgttcctcttcccgcactgccacatcctcaccaccagccgacgcgccaccatcgccaacgccctccatttcttcagccatgtccgagcccaccgccaccgagctcgccgcgctcatcaaggcgctctcggccaacgtcgacaagctccaggcatctgtcaccacactccagcaggcgtcctcctccaccagcaagcactccggcgagcaccacaacgaccgaccgccgcgattccagaaaatggattttcccaaattcgacggcaagtccgaccctctcgccttcatcaactgttgtgaatcctactttcaccagcagcggatcgcggaggaggagaaggtttggatagcctcgtacaatctagaagacgccgcacagctatggtacacccaggtccagcaagacgagggcacaccgccatggcgtcgcttcaccgagctgctgcacctccgtttcggccctccactgcacaccaaccccctcggcgagctcatggcctgcaagcgcaccggctccgtcgtcgactaccaagacaagttggaggcactccttccgcgcgcgggcaagttgacggaggaacaacgcatccaaatcttcacggccggactgcaactgcccctcagcctcgacgtggagattcacaacccgcagacgctcgtcttcgccatgagcctcgcccgcaagctcgagctgcgcaaccagtgcgtcgctcccgccgcgcctccgcgccacaaccagcgtggcctcctgcccgcgcctccacagctgctggcactcccggcgccgccaccaccgactgcaccgtctccagcgacggtgaccgtcgagggccgcacggtcaagcgcctctcccaggcagagatggaagaacgacgtcgcctcgggctatgcttcaattgcaacgacaagttttcacgtgggcataaccgcgtctgtcagcgcctcttcctcctcgacttggccgcgcccgacgacgactacgatgacgacagcacaccagaggagacaggcgaaactgacccgcacgtctcgctccatgcgatcgccggcgtccgcttcagcgacaccatgcaagtgcacatcaacatgggcggcgccaacctcctcgccctgctcgactcgggttccacacacaagttcgtctctatggcagctgcaagtcgcaccaagctcaagctcctccctcgcggccagatgcaggtcacggtcgccaatggagaacgcgtgccgtgcccgggcctctaccgcaacacggccttctccatcgacggggagacgttccacgccgacttctttgcactgccattggcagggtagaacgtcgttctcagcacacagtggctggcgtccttgtgttgacgcgaaaaacacacactggcctgagagatctgcttagctcaagtgcaggtccaaaacttgatgagatgcgggcgtgccagtcagtttgatcttgcaactgataagatacgtaaacagtagatcaaatagccgatcggctgaaaagccgatggagcaattccagccgatgccgataccagccgatagtgatagggttttgagcaatcggctatatgtccaatgtagataataatataaaagcaatcgactgatgataataaaatataccaacaatataatccagtataaaccaatcggctagcaatacaatatgatagaataagcattgatctgaaggttaaagcatacatcggctggaggtccgatgtcataaaatccaaaagattagattaaacagtgaaacctttgttgcgatcggctaaacccaacttgtgtgtaatccttataagccgatgcaacgtccatataacttatcggctagaaccccgataaaacattagcatgaacctatcggcttagcaagacttatattatcaacaacaatctagtagatcgaacctaaccgatgcagcacgagattgtatatgataatataatactcgatgagccgatagatctgtctaatgtgatggatataacaaatctatttagaatagcattgtgattgtagagatatatcggctaagacagaagatcggacctaaccgagacagtcccaactaaaccgatgcgtctctaaacacaatggaattagagataaacttgagatatcaggaaggcaaatcaatcaaccaaatcagagcgatccaagagatcagagcgatgcagccttgaacgatgccgatgtagatgacagattcaccagggcccgatggaacgtaggacttaccccttcgccggagatcgaaagccgatgcagccccgcgtcaggtgcccaaattccgccggttgataagtaaaaacctcagggaagagggtggcgatgcgccgagagtagttatattgatcgagattgatagattgcatagaccccgggtgtacatatttatatccatgggttgatacaagtccttgtcggacaagaaagaaactatcctaaagataaaaggaaaacatgaagtccttatcggacactaaacacactttcctaaagataaaaggaaactaacaaactatttctaattaatagataaactgccatgccgcatcttccttaaactcgtagtcttctagataagcttccttcgattgatccgactccaccaagaacacgatagcatggcgacttgacaactcccatcagctgtttctagagctctgaaaccgatagtgactttcagccgatgatgactttgggcttaccaaatttcgtcgttaacaccttgggaccgatcttgtgggatttcggctccctctccatgtccttttggcggcatgaccatcgtgtgtgctggcacggcgtggcaggctccgctactccctcgctgaaagccgtcgcgggccaagacatcatggcagcactgcttgacgagttcactgccgtcttcgccgagcccaagggaatgcctacaccgcgctcaagggaccactacatcaaccttttccccggctcctcaccggtcgccgtccggccctaccgctaccccgcctcccacaaggacgagttggaacgtcaatgttccgacatgttgacacaagggctgatacgacggagtacatcggcgttctcgtcaccagttcttcttgtcaagaaagccgacggctcatggcggttttgtgtcgactaccgcgccctcaacaccattacgatcaaggacgcataccccatccccgtggtcgacgagctccttgacgagttacatggcgcccgcttcttcacgaagctcgacctccgctccggctaccaccaagtacggatgaacgccgccgacatcgccaaaaccgcgttccgcacacatgacggcctgtacgagttcatggtcatgcctttcgggctttgcaacgcccccgctaccttccaagccctcatgaacgacgttcttcgaccgttcctacgccacttcgtcctcgtcttcttcgacgacatcttcatctacagcgactcatgggcggctcatctcgggcatgtgcgcaccgtcctcgacaccctccatcagcaccgcctcttcgtcaagcgctccaagtgcgatttcggcgtcacctccataagctaccttggccacgtcatctccgacaccagcgtcgccatagatccggccaaggttcaagccgtctccgactggccgcagccacactcggcccgcgcggtgcgagggttcctcggcttggcaggctactactgcaagttcgtcaaggatttcagcacgatcgcggcgcctctcaccgctctgctgcgcaaggaggggttcttatggtccgatgaggcggcagctgccttcaacgtcctcaagtcagccattacctccgcaccggtccttgccctccccgacttcgccaaaccgttcgtcgtcgagtgcgacgcttccacccatgggttcggtgcagtactcctgcaagaccaccatcctgtggctttcttcagccatccagtggcaccacgacacagctccttggcggcatatgaaagggaattgatcggcctcgtcctcaccattcgccattggagaccatacctatggggctgccgttttcttgtccgaactgatcatttcagtcttaaattcttgcttgatcagcgtttggcaaccatcccccaacttcattgggtgggcaagctcctcggcttcgacttcacggtagagtacaaggccggtgctagcaacacggtggctgacgccctttcacggcgcgacaccgatgagaccatgctcctcgccatctccgggcctcggttcgacttcatcgactacttgcgccaagcccacgactccgatcccacactggtggcactcagggaggagctgcaggccaaccagcgtagggccccatgggccttgatcgacgacatggtgacgttcgacggccgcctctacatttcgccggcttcaccacttctccaggaaatactcactgcgatacatgctgatggccatgagggtatacagcgcactctccatcgactacgccgcgacttccactcaccaaaccatcgctcaatcgtccaggaccatgttcgtgcgtgaatcacttgccaacgctacaagtccgaacatctgcatctggcgggcctcctccttccgcttccggtaccaacagcggtttgggcggacatcggccttgatttcatcgaggcgctgccccgcgtcagcggcaagtcagtgatcctaacggtggtggatcgcttcagcaagtactgccacttcatcccactggtgcacccgtactcggcggaatcggtggcccaagcattcttcaccgagattgttcgtctccatggcgtgccgcagtccatggtctcggatagggacctggtgttcacctccctgttttggaaggagctcatgcgtctcatcggcgccaagttacacatgacgtcggccttccacccgcaatt

SEQ ID NO: 3221 - DNA, 2695 bp, Oryza sativa
aaaacgcattttccaagcagcaaaacaagccgcttgtgagcaaatgtatgtgaaaatggggattttcacaagtggttggccagcccgtacgtgaaaaatcaagctttcatattttgattagctacaccacttttttttgatgaaatatatacgacttatggtgtataggatttggactcgagacctcatagtccacacacatccatttaccatctcattttcaagtacttgttttgaattaagatgctattcttttgacttcacctccccgaaacttgaaatgctcatttgatcttctaaatgatcttaaatgaaaatatcatcacttacgaagttgtaggtctggttgagctcgacatccctcattggaggtcgtttgaaatatagatttgagatttataaaaatagatctataagatcttgtcgtaactttttggacctctaaataatctcaaatgaaaaagttgtcatttataaagttgtaaacctcgtcaagatgtacaagtttgacataaagcttatattcatcgcactttatatgaaaaaagttaggtgtagatatgtttttttttttggaaaactgattttcacaggtaagtagattaagccgctcacctgtgaaaatgctacgatgtacacttaagctacctgcatgtgaaattgaggtcattttcacatgtgtgcggcttaagtgtccacctatgaaaaccggttttcttataagtcctgacagaggattctcttcacatttttacaagctggttttcttttggatcgtttatgaaaataaagcaggggtgcctgcagaaatggttttttattagttcaacttgcatataatacaagatcatgctaggtacaacatcattatctacgtatacatatactattacattattgaagtaatatattgttataaataaaccatgacataaagtcacaatcaccaatcttcatattatcaccgttagaaggtacgctttggtgcttcatattatcaccttaattatcttaacttctaacacacaagaaccattttcttcttgttggactatacacttatcaatatgttgcaattgttgtgcgcgactcagggtcgcctgtaataacgcgtggggtttcatgcatcttgttcattacatgccggaccatatttcttagcttccaatccaacatatgtcgtcttgattgaatgcatcttgttggctatttgtttcatgttcatgcgatcacttggtaatttgcgcgtacaagaaagcgcaagttgtagcagagatatcaagcactggtggacagcattttccagtgtcatatttgtttgattggagtccatggacttttctgcgagtcgagcatcaatcacttgaaatatctggtgtggaaagttactctcgacaaagctgataatgtcgagtccgtctttgaacataggatcagtcggtctttttcctgttataagctccaggatcactatcccgaaactataaacatccccagaagtagatggatgaccacctcccgcgtactctacataggtatgaagagaaagtacagttatctatttagctgtctataacaaaagctgaaactgaactcagaagtagccatattaattacctggaggaatataccctatggtacccttaacaccgactgtactattcgaacctgttgatgtcgaccaagagtcgatataaaatcttgcaatgccaaaatctcccaaaagagcattcatgtcatcagctaaaagtatattgctgggtttcaaatcacaatggatagttgttcttccgcattcatggtgtaaatagtccagtgcatcggctatgttaacacatatgctaattgtttgtcttaaacccaaacgtccgggagctttcccaccctctttgtcatgtatccaagtgtccaagttgccattaggcatgtactcgtaaactaaagctttgaaaacgttgcccgtactgtccacggtcgagcatgcagttatgattggaagaagatttctatgttgaatgcttctgagagcttcacattccgatatgaagcttctttcggcacctcgcatctcaaggtcaaaaaccttcacggctacttccaacttacattccttcaacttacctctgtacaccgtaccatagcttcctttgccaataaggttagcctccgagaagtttcttgtggcttgagctagatcattatatgagactttaaggaaattctcaccaaaagattgcgaggatatatatttttctcttggcttcatcttctcaagaagtaagaagtagaccactaatatgagtgacatgaagccaaatatagggatcaatactctaatcaaatagtactgtgtttttcttctctgggaaacaacttggcatgggggcatacggagatccatcactcctccacatagtcctatgtttccctggaccgaaacaacagtaggatttgcaaatattccagtcattggtatttttccttggagacgattgtatgaaaggtccagtttgctcatgactggtagatcatttagtgtagtcggaattgtgcccgacaagctgttatgggaaagattgagtacgcccaggctctttaggtcgccaaaagttactgggatattgccagtaaggaagttattgcccatttggatgtttgccaggtctttacactggctcaaagtgccaggatctcc

SEQ ID NO: 3222 - DNA, 12256 bp, Oryza sativa
tgtgtgtttgtgtgcgcgctttcaagcttctcctcgtgcttcacatcgtcaagcggtcaaacgaataatgaggtatttgaatcatacacttgagtttggaatttggtcttctacttcatcttctatatgcttaagtggatattccgatgctgattttggaggttgtagaattgataggaaaagtactagtggaacatgtcattttcttggtacatcattgattgcatggtcttctaggaaacaatctagtgttgctcaatcaactgctgaatctgaatatgttgctgctgctagttgttgttcacagattctctggcttttatctactttgaaagattatgatcttacttttgagaaagtacatctcttttgtgataatactagtgctatcaatattgctaagaatcctgttcaacactcacgcacaaagcacattgatattcgttttcactttttgagggatcatgttgagaaaggagatgttgaattgcagtttttggacacaaagttgcaaattgctgatattttcactaaacctttggattctaatcgctttgcttttcttcgtggtgaattgggtataattcatccttttggcatggtttgagtgggagtttgtatctcatggttttatcaagcaataatatgacaatgaaaaacttgagaaaagagagctttgtttatgcatatggtattttcttgtgcatgctagcaatactttgaaggtttatttgtctctagcatagcttgtatgtattctagtcttttcatgagatttagattttgcttttaagggagatgatgcatgacacttaaattctatacttgaattaagcaaatatgcaatgttgatgctaccatatggtttgatctataaatgctttatatatatgctttattgacttgttattcctcaaatagctttaattgctcattgtgcaaaagagaataaaactatgaaaaaaatgaataccgaatccttggaaacagtcttgacgacaaggacgtattcgatgtgagcaaaataatgggtgccgaatccctggaaacagtcttgacgacagggacgtaccctgaataaaaagagaaaaatatgagcaaaaaggctcaagaaaagaaaaagttaaaaaaaattctcttggttattttgtgctaaaaggttatttgagaaagagtgatcaatgcaataggtatatgtgtttagtgtttgttcttcaacctatgtgcttgttaaaatgttgtattataaatcgtatgaaatcatgaattttgattgttgattcaagcttaattgtaaaatctttggttcatggttttactttaatgcatgcttgttttgttatagatgggtttatcttctttttattgcaacacatgacttgatatgctatatgtatgctaagctcttgaacattaatgaacataattcctatgcttgatgaaatcattgtcaaagggggagaagtaatgtaagtaatgtgaaaatttttggatttttggaaaattcactttcttttcaaaattcactttgaagtaatgagaagagcatgttgttggttcaattgggaatttctttcttttaaaaagggggagaagttttcttttggatttttgagcacgatgtgtacatttgtacgaagtgtgctttttaccaccaaatatcaaaacatttttataggtttgccaatgtgttcatcaagggggagattgtaaaatcaaagatgtttttgattattattctgtgatgaacaattgggcattggagattattggttttgttatttggaatttattcacgaagtggttttggagatgattggattcacaggtgaatatacaggtactgctgtggttttatgtggaccggtcagactgggctctggtagccggtcagaccggcgtgtaatgcgcagtcagaccggcgcagcccgcggtctgaccggccgacactgtgtcggtttcggtttcgggttgtttatttggatatccgagtttattccatgattatgacttctagatggatactacacgtatgtaatactattgtttgctgctaatgagtcaagttggagatagcttggtctcggaatatggtttctttgtttgttccatgtgtaggtgactcgatgtctcgggagagtatttgcggtgatggaccgggagtcggcttggggattagacgacgtccgtggtggtcagagatcatgtgggatacttaggctagagttgatgcacgtggttgatggagattccatatggcatacgatggagttattgtgtgcgtatgggatgcggagtcgaatttggaaggagtccaaatttggtacgtttggttatgtaaagtttctttcttgtactagtgggtttcctaaggtgtttagaactcctagtatgagtttggttcgtggctttaggctgcctacttcatgtataaatagagggggagcgtgaggcttccctgtatcgcttttgagagcaattgagttgagttttgagttagggttttgagtttagtcgaaatttttgtaaggagtgctgttggtgcactttgtaaacacagagagaagtaataaagtcgtcatccactttaagagttcttcgatttgtgtttcaccgggtttcggcggtctaaccggcggcgcaccggcggtcagaccggtggcatcgcggcagtccgaccggcgaacacacggcggtcagaccggcggcgacaggagtcgtcggcaggctttctcggcggttcgaccgatcaatctacatcggtcagaccgacgttcatcaggcggtcagaccggcgcaactacttcggttagaccgcgatccatcgatttcgagggtaacttttatttccgctaaaagtttttcggtttttgggtataccaaccattcaccccccctctggttggcttagttcttgtgattcgatcctacaccattatcagcttagcaactgcaatctcatcgatgatgtcttcactgtcaagaaacttccttttcagctcaggaaatgctttgtaatttgagtctcttggctatgatacaccaaacaaggaagcagtgcaaaactcttgtttacttctgtaatcctagttcatttctgttaatgtaaatggagggcccaggccctttagtcaaaaaaagaaaaaacaaggaagcagtgggcgacctcatttattatttttactgtctcataagaaaaatttccaagtcaatgtacgttagaaattgacgtacttttgttattttgataacactgaggcgctggttggtatgttgttgaaacttaaagtgtagtccgcgtaaagtgtatcatgttacgttgttgtgatattgtttgcttctaaggctaatcattcgacacgattactgttgctgatcattagatattgagttaaaagcataacctaatcatattgctattactccattagaataaggagagaactatataaaggagctcatgtaccatattacgtaccagctatatctttgttcttgtcgacagcaaagctctccatggacgctgtaaaaagattatggaattgctaaacataagctgagtaaatttttttgttttcaatcgaatcccttcctgtttgatctgcgttttgataatgctttgaatttttataatcatttccattccgaacgcgcgttgcatcacgcatggcgagatgcattgccgtgcgcaaccacgaggggattagcctcttagttttctaccgatctttccgtcaacgcctcgcgttgacacgtacgccggtacgctcgcagccgggggttggaccctgggtgcctagccagacgcccacgcactaggtgggccatgtttacgaggcttctctgctcacaactagtaggaacaaaaagaataaagtccactaatatcccttaagtataagtcgaattcaatttgcgcctctcaactgcggtgcaattcaactcacaaaaccaatgcaaatatagtactttggcagtccgggatagcggtttggcacgttaatttggtccactcatgctaacgtgttgcttgcgtggcaattttatcataaaaaagaattcgtgggccaaatgtcgaggagggtaatttcttggaacaagttcacttgttgtccctcaactttacgccgagtctgtataacatccctaattgccaacagaaatatctacccctcaaataatcaaaaccgtgtaaaatagatcccatggcagtatatatgggtgttttgttgacgtagcatcctacttggcattctagggcccacatgtaagtgggaagaagaaaaatgtggggtctgcatccattctttcctctcttctcttttctcttttctcttttctttcttttcttcttcggcgagcctgggaagtcatcgtcgccgggcggaattcgctcgccgctgctcctcctacggccacctccatcgttgttgccccctccttcgcccgttgtctgctctgcctcgcctacctgctttacccgccgctaccccaccaagcgtctaccccctctgccgcccgctcgctcgtgtcgtccctcctgccgccagttgaagagaagaaagaaaagagaaaaggagaagaaagaagagatgggaacccacatttttttctcacttacatgtggatcccataattttttgtattattattttgatgactaggatgccacatcagcgaaattagagatcctatattgctataggacccaaattacacggttttgtaaaatttagggggtgaagatttctggtattagctgatgagcttattcttaaattctttcaccccatgggcccttttcctcttttgatctcctcctcgctgcactattgtaacattctgaaaatgtgtcattttctaatcttgcatcatgctgattcttatgttcttaataaccttctaaacctaggaaaatataattagagggacctcctaaaactaactcgcataaaacctctctggtatttaatcccttttgtgtttttcatttaaaaacatatttggtatttcttgttgaaattctattttcaaatattaaaccttctttcgactaaaactcttttattcaaatttagtttaaaaaccatttttattattatgaattatggtccaagaaatcctccaatttttgtccttgaacctagaccaaagtaattccaatctcattggaattaattgttagcccatcctttgatcttaaacccatcctttgattcttgatccaaatatccaaattcctccttttgatctagccaccaatttaatttctgtagcttgatttcctctttggcacaagaattgtattattgcaaatattgtgaataattgctcttgtgctaagaaaattccaatttatattcttcactcaacttccccttttagccacaaatatacataacaccaattttagagttcaaatcctatttattgccttcaactaattcccttctatattcccaaaaatattttgaggaatattattaatttccattcctatttgagtgcttccaaataaattccctcaaactccacctctaaatattgcactcaaataaattaggaaatatcttttgtgaattctttccaaattcaaattctttgcaaaacctagttatccaaatcaagtattcaaattaggcttctttctttttgtcatcgggccgaaactccattctttcttcctttttggcccaatcccttttcttttatcttctattttcctcctccttcttgggctgccggcccagctaagccgagccggcccaaatcggcccacaccccagccgagccgccgccgcctcctggtgcgcgtgccgtgcacggcgcacgccgccgcaaacgtcgccgctaagaaacataaatcggcgccgacatcctcctcctcacgccactgtcgtcgtcgtgttcctctttccctcctcctccagaaccgcctctccccaccgccttctctccctataaatagccggccatccctccccttctctacatacaatcagagctccatctctctttctctcccatgtccggccatggccgccaccacccgatctccctcaccggagcttcgcaagccaaaccatcgcgccatcgagttcgcctcgacgaggtgattccatttttcctgtttcccccttctcccccaccccatagcaaccaccaccgccacctctctttgccgccgaagataagctcttctactcgccgttccggccatctccctcactctctccgccagccaccgccctccccgggtgcgtcgtgctcgggaacatgtgtggccgccgacgtcgccgcctttcgtccaccggagagccggcgcccactctctccctctcctctgtagccggcaagaaaaagaagaagagaggaagaagatgacgggagaaagaagaaggagaagaaaaagaaaaagaaagactgacaggtgggcccctgcacagtgacttttctcattttctagatttaattcaaatcctattctttagaagcacatatctcctaaaccgtagatccgattctagtgaaacttggacctaaattcatctaaattcaactcttcattttgatatcaaatttgctattttaagattttatttgaatttccttaatttattcaaatgccatttgaataaatatttgatttaatcttataattgaatttacaatttaaacttatatttgcttttcaaatattttcttttatttccaaaatgcccgttagccactaaaaagccgccggttggaactttacgccttccatggggacgtttgcgcggtctacggacctcaacgtcggaccgttggttgtaaagcccggcaaaaaccaaacctaaggtcgaagtgctgctcctggcaccccacgccttgatgcgtacagcggtcggagcttcactatcccctcgacctccattgcacgccgcacagttagctcttgagctctgtgtgatcctagccgctctgccgccactcacggttgtcggagtaacacttccgccccactaaacctgcacccacctcctattcttctagccgatatgttgtctatcgacacggctagaaataataccaaacctagtcgtcatgttgtccaactctagcgacgactagcaaacacccaaaaccctagccgatatttatcctacctcgatatcggcctaaacaactaaaccttagccactattctatcaaagccaaccttaacccatattagccacatgcctatttaaccatatcaactattcagtatatttcctatcgtccaaaccacgagagcctccacataaaatatagagcctagccgagatactgtcctactccacagtcgactcccatataactaaaccctagctattatactaccaaaacctaccactagcaaatactagccccataatccctataccctataaaagagataggttataccttaaaccctagccctcttagtcgtttatcgttttcttattattttatggcttttattgaatttggttcttcctctttctcagtaaagactattgtcttttggatggcaacctatggtatttcgagaatcgtataatcaggttgcctatcttggattcatttgcgttggagcaaggcaagttattattcctccccttgagcataattatcctatattctatatctctattctatgcattagccattcatgattttgaatgcataacttgaacatatagcaaaccagttatatgctagcttttgcttagccctgcctagttagattgcataaaacataatgaacttagattgggacagtacgcaagatttggttgatttccgggtggctagtactgtctcggtcgatataagtttaccaagtacttatgtcaaacgaacgagtacgaccgcagcttctagaatggggacagacctagatattatgttaattaacagtgtggtacctctgtacagtggttcttatgtaagtcctcgcgaaggaggcaaatatatgccgcgaagggcaaatgtgatatttaccgaggcgcaggtaaatatcttgattatcgcgcgatgtgtgtgtgaatttatgaaaacctggttgagatgacatggggtctctcatccagttctctctaaaaaccccgggaacgccagaactcctctcgctgctgataacgttacattcagagcgcatggggattagagttcatggaacaagtgccacaattgttaataacctaatactgggccatgactaagctaatgattattggcaagtcgtggactgcgggtaaagcgtacatctactgcagtatgaatatccttgaatctattcgaatagccgtgctcacggattgagcatcgggactcatatggtactttggttagaaatataattcaagattttcttaaatactgttgcatatcaagcatttcaggatttctacctctttattctcagctttctgcaagtaaacctagctctacacagatattaccatttcatatattcattattggttaatataatagcttgctgagtacgttgtactcacccttgcttcaacccctctttttcagagtttaattggagtttttgccgaagctgggagttcaatcacataagttagttccctttaaacctaatcttcaagtctagtgtagttagatggtttaattctatagtaaaacggcagagttgagtcatcgtatagcctctgctgtaatagttagccacaaacttgtgaatgtcctattattttatataaagatatctcctttgaagtctttaccaaatgtatgcgatgaagatccagattgttgaacctgtatcaatctactgatccagagcttgatacagttaaacatgtcggtttctgaatcgttagttttgggatccgacaactatgcattagacgaacgatggcggcggcctaagtttgttcaaatttatagtactataaaatgttatatctaattctaagtttttatattttgagatggagggaataccagtatttggggggaaaaaattctaaagtgaagtaaaggtaagaaaaaacgtgaaaatattagttaaaggggtctaaaataaatatttggtaactagagggactaaatcgaaattcactcgaaaaataaacccctccctctcccccatcgtacgcaacgaagccgattgcctagaggcggtctcgccgcgccgcttcccgtggagcccaagtggtggcgagggtttccgccgcctctcgtccgcctcgccgacctcggaccccggcctccatcctcctcgccgacgacagccaacgtgtgccgctccccttggagcccaagtggcggcgagggtttccgccgcctctgctccgctcgccggcgacagccccatgttctcgatcgccgtccccaggtccgcttccggaatctcatcctttgcgggctgctactgcttcgcgcgtcaagccatcaccagctgctccctccgtctccggaacaacaatattctctccgactgctcacgacgggagagcggcgcttcggcgacggcgatcccggtacgcacacgcttgagaggctcccactttcttcattctgctactgtacggttggattcgtgcataacaatcactcatatctctatgtctagcctgcccatgattatttattaagttcgagttggttgaagaatccactttgttttgtggggaacttttacatgatagagaaatgaatggtcttctattgtgaaacaccacgcttgattttacaggatggtgttgtgtcgtctcgtttctaggtttatagacggaaggacctgctttttatgtgacctgtcgtttgctatagaacctcatggtttatagttaaactgcacattagatctgtcaggagcagttgacagcagtactgaacgtttctcgagaatgttgaaatgttggtctcatcagtattgcacatttgttgacaatccataactattagtggccaatgtgaacatttcttgtaaaatgtcaatcgcagtagcaggctagcagcagtaatgtacatttcttcaaaatgtaattccaaggtttgtgcactatttacttcaatataaggacgcatagcatgcattcactgttgcacctcaattatctatgcgactattctagttttattttatttttagatggaggagcagcaacaggaggagaacagcccagtgcttttccgccaaaatgcaaattcttctcttggcttgctacccagaataggctatggacggctgacagattggggaaacaaggctggcgaaatcaaaaggtttgccccctctgccgcacaatcgacgaatcagtgcttcaccttctggccaaatgtagagtcactaagaggatttggacagaaatccagagatgggcgcatactgaccttcaaatggacaaatgaaatgactgcccctcgatcgaacactggtggaacctcgtcgttgaatcccccaacaccccaagagcccctctgcgaactctactgatgctagtcacctgggagatctggggggagcgtaatgcaaggatctttcgaagcacagcctcaacaccagcctcaattcttgcaaagatcaaagaggaaagcagagcttgggtcaaagccggagcggctaggctgcaggagttcggatttttgggagatatcacctaaagaacttctctcctgcgggccggtcttctgactggccctgtacatactttgtataattttttccctctctattaatatatgaggcaaagcttttgtcctcctttcaaaataaaaaacagcccagtgcttttcaagcaagcaccgatggcaagctgctatccaatgtgctcaagtacatgtagatcatcacctcctctactccccaagcatccgagggtaatggcactaatcatatgtatcttaggggcagatccaggaaagaaaaatgggggggggggggggggcgctgaactgagcaccaacataaactcattatctcacatacaagtcaaacatggctgtaataatttacagtggtttcatatgaaaacattgagaaagaaaaggcaaaatacatcacacgacagtccaatattcacttggctctaatctcaaacagatactcacaattagtttagcactcctagatcactaacaatatctgagcaacaaaactgcactcgccattttaggttgccttgtattctcattgttctctatagtaggagtactactgctgcaactttaataacattcaacaatgttctttttgacatgttgcaaacttgcaattctaggagcagccgagtagagatgatagattactagctgacacacaaaattttaactacgctaaatttccaatgggttgaatcattccagattttgaaaatttaaagcaaaattaagcatactttcttgcctttcttcaccggctgggttgtcgttgcagctcgccggcacaccgcacgccctcagcaagttaggcaagtcgcaggcagtagcttgccgagttgtcggctagccggaatgccggttattgcgctgccagtaccgctgcgtggcctgccctgccttgcacaacagccctcaccacaggcccatggcacaccggtgccttgcatgccgcgtgccgctgtgccgtcagctcgcattgtctgtgctcgctagggttggggatgccgccatgccggatgccatgtacgggattggggatgacctgactggatgggagattttggatttatgttagttcggctgatggctaaggctgtgttcggcaccccttgttcccaactcctctctctcgttttccgcgtgcacgcttttcaaactgctaaacggtgtgctttttacaaaaagtttctatacgaaagttgctttaaaaaatcaaattactccatttttggaaaaaaaaaagctaatacttaattaatcactaatggaccggagggaatgagttcccatcgaggacatgtgaacgtagcctaagttgaaagcccaattagtgaacaactggacgtgtgcacctagccacttggcacaattgacattgcattactacattcactgggtagtctggcccaatcgcgtgtcttcttcaaccttcagccatcaggcagcttcagcagcccctacttctcagtgttttttttttctggggtaggggggggagggggagggggctccatgggtccagcgggtgtaggggggacttgagcccctctgcacccacgttgatatgcccttggtatctcttgctctcaaatgatatagtatgctattg

SEQ ID NO: 3223 - DNA, 1302 bp, Oryza sativa
aattcctgcagcccgcaaattatggctgtgttatatttactatggtacctcacagtaccacctagataccatgaggtactaaattttatactaaaattttagtatctcatggtacctcctaaaagactgtaaaattactctatttactaacatgagtcaagcaaagttgaccatgttgcctttatggccatctcaatgccatccaagttgtcggccatttgtgtactcgtcccatccttctgcggtgtaagactcctgctctcacacaaaaattcttcaagatcaaaacgtacacagcccggaaaataatcactaataacaccatcaggagtgtgacgggcatcatctagttggtcttggtacgcgtaaacgtaaatgtgcatgtacccatcatggttcacagggagtgtgaacggtggtagcttgccaacactcaacttgccattgaaggttatgaaggaaccctgaaacatattgtaggtggcagctattgtaagcgaattatattggtggttctcttcaatatggtacacctcaaactccaaacgaaccaataccgctctggggatagcaaccattcttagatcaagagtgctgaagtgaccagtgtcgatgtgccaatggagcctttcaagttctccatagaaagatggagcgtagatagagtagccatcgattaatacttcatcttctccctctatttggcccttaataattaaggaatactcaataagtacaagtccaactgcataaatgcctcgtgaaggggttatgagaggttgcagcttatgagcaccctgcatataatatatttttggatagaaaaaaaagatcaattagaatgttcttcagaaaaaataagttatatgcaacagtacgtatattcttagatggaagcaagggaaaaaaatgtagaacatcaattactcacagggttaagtttgcatgggttttctcttgagtattcaaagatacagttgcgtagctggctgttgcgtacatctctaaatgcgaacgtaccatagatctccattgaatcattagaaggagaagataaatctaaactgaacacttggatagcccgacagcatggttccttcccatccccattcacccagcggctttcccacttcggcagttgaggaactgcaagaaaagagaaaaatatcaccatgtatcagtacgtacatattcacaatccgtaaaatgccaatgtgactaagaaaatatatatagttggtgtcagctggattaatttgtagcatgcagacgcacagagatgctccacagatactcgatttg

SEQ ID NO: 3224 - DNA, 2957 bp, Oryza sativa
atgtgtggacccacatgttagtgggtcccatacattcttttggcaaatgacaaatgggtcccacacatattttttaattctaatgccatctaagcgtcacgtggaacgaagaccaaatcaatactgccacataggcgttacgtcagcgaaaccgccatccaaaaacgccgagggagttaaattgcaccgattttaataagttgggggtcgagatattcggtattgtggtttagggatgcaaatcagattcggtcactagttaagggacccaagtgaacttactcccattggagtacgcctgtatgttagtagtgccaatggacaggagaaccggcccaaatagcggcaggttgtgttcaactgtccagcggtttcagtccggtccgtttgcgcctactcgtgatttgggccgctgatccgtcgtccacgacgaccgagatgagagcgatcccctcgagaatttcaggcgaacgcgcgcgttgagcgagcacttggatctcagagggcctctgctccctcgtgttgcgatgctctgcttcgttgaaacaagccagtcaggccgagagccgataggtcgcgtagaaccatcccgaatgaattgaaaagaaaagaaaagaaaaaaaaatctaactgtgacatcaaatacagagtacaaagatatacagctggtactcgtatcaattatttatatattaaatctaaaaactgtgtatacaatacagaattatatacgagagcatatataagagaatagagaatatatatgacagcataccactttacatgaactttggccttgatctttatagacatggttcacacatgatagaccatgtcgacttcatagccatctgaatgccgtccagattacgggccaatatttttgaactctttccatatttttgaggtgtaaaagacaagctttcacatagaaaatcgtcaaaatcatattctgtaccgaatctacagttcctgataacaccatcgggatggcaacccgaatggttgtagtatttataaactgttatggggaaatgtttatcatgtctcgcgctcaatgtgagtggaggtagcttgccaacacccagcttgccattgaagataataaaagaagtattaatgttaaagtaggttgcaactattaattgcgagtgaatcatgctcgtggttatcttcaatttgacacacctcaaactccaaatcaaccaggaccgctttcgggatagcaaaaattgtcagatcaatggtgccgaaatgaccagtgttgatgtgccatatgagcttttcaaaatctgcatagaaagatggagcgtagatagaatatccatctattaacacttgatcttcttcctccttttgacccttaataattaggcgatactcaattagcacaatcccaactgcataaatgcctcgaggaggggtcatcagaggttggaggcaatgagcaccctgcattgtaattaagatatttttggaaaagattagaactgcaatatgtatatattaattgttcaggaagtagcagagaaaactgtatggcatcatcaggtactcaccggcttaagtttacatgggttttctcttgagtagtcaaagacatagttgcgcagctgactattgcgtgtatctctgaatgcaaatgtacatagatctccaatggaacattactaggagaagatagattcagaccaagtacttgtatagctcgacggcatggttccttcccgtccctatctaaccatcgcctttcccacttggggagtgcaggcactagaagtagaaaatcaaaaaaagtcaaatcagtacatcttgaattattgtttgtgatctaaatgtgattagataaaactagaatattagggaaggacctaatatcaaataattagaaggggtgaggctttaaacccaagtcgtctagcccaccaccttgtggagctagccggaagacccctgggcatttctcaaatgtgattagataaaggagtctgtactgataaaaactatttctacaacagatggcatttggattgttagtacacgaattggactagtggacttactcaaatgatccgtaagtgttaggtttggatctaagttgaatggcccttcaaccacaagagacccctcccaagattctgaaagatcagggatgggaaacttcatttgtctgagaatttgcttctcccatgtctcctccctatcagctgcataataagggttcccgtcttcatacctaaacccatcgccgtatttcatgaaaatgttccttccattgctgtagaaggacactccactcccatcggagtcataatcagtttcgtacgtgtgcggcccatatattttctccaattcatgatcttcaagatgacagggttctccgtgtcgctcctcgatcatcctgcacacgtataggtcgtcttctctctcttgctcgtgtcgaaggcgacttagttcgtcttgctcctcgatctccctctgcaataagtcgatctctttgtcccatatccaggtgttgagtatctcgcgctctgcttcctctcttgtcgccgccaaatcctgatctaactccacgccgtcctccatagaacaacctcacagagtattgagcctccgttgacgacgtggatggacttgagatgaaattccgatcaactgaatccatgccactaacgcgaaccctcgttctatattcatgttctgcgtgtgtatacgagatccaatgggtattccgtatccgatatcaccaacctacagacgtgtaggatgctgttttatttccaaacggaaaacgtacatagaagttcctcaacttatcatcggattatagaatcatcctccaaccctaaaactaatactccctccgtttcgttttatttgacaccgttgactttttagcacatgtttgactgctcgtcttattcaaaaacttttgtgaaatatgtaaaactatatgt

SEQ ID NO: 3225 - DNA, 18397 bp, Oryza sativa
cgaagacgacggcaaaccctgcatatgaatcctggctggccacagaccagcaggttcttgggtacctgttctcctccttatccaaggaggtgatgacacaagttgctgcatcaaggaatgcagcgcaggcctggagggccattgaggagatgttttcttctcagacacgagcgcgcgccatcaacgtgcgactcgcacttaccacaatgcagaaaggtacgtcttccattgcggaatactttgggaagatgaagagcttaggagatgaatttgctgcctctggaaaaccactggacgatgatgatatggtcgcctacatagtaaatgggttagatgaagattacaattcagttgtctctgctcttgttactaggatagaaccaattactgtttctgagttgtatgcccagcttttaaactttgaaagtagattggaactccaacgtgtaagatcaacgtgtgttttgattcttattctgtgatgaacaattggcatctgtgattattggttttgatatttggagattattgtcgaagtggttttggagataatcaattttcaggtgatgatcggatttgctgttattttatgtggtccggtccgaccgggcggaggttgccggtgtcacgcccggaatttctatccaaaattccaaacgcttacatgtgtgtgaaccctcgtccaggaatcagccgaggcacacaataacaaattgataatagagtacaattattactctaattaataaacgtataaaatgtcattacagaggtagatagttcctctcaatcaataaagatctaagcagcggaaaataaaataaacggcacggacggctctactccacaggcaacttgaccaaggctacacctaatcctccactccatcagcttcactgtagaactcttcctctgatgaatgattgcaaggtgagtatatgacatactcagcaagccacgcagcaaatatgcaagtgcacaggataacaaaggatggcataatagggttccatttgcaaaaacagcatttagcaaacatttgagaattttaataaaacagttgagtaatagttaaacaatattaatccaacgctatacaacataccctgttgtataggcccaaccatactgaacaaccatcccggctgcacagttctatctccaaaccaggaatataccattccaaaccaggagctaaacaaattattaccagttatagcatcatttactatggtgagaagggtgagactaatcacgaaagacattgttagacccgcccataaccgcgggcacggctattcgaatagttttactctgatcagaggtgtaccactgtacccacaagacacaaccccacatcatgtcaccatgtgcctcaataccaccacggtacctcggaaaggagttgtgacaatacccctcgtacaacacaatccactgcagcgcaccttcctggatcataatcacccccttataaacaaggcatggactccccagcgacccccgtgggcttatctccgccacttctcagtctggtgccccgcaatgaaccatgctatacaaaagataaagccgttgcccatgctggcttgtggttggcacgattaatgtttcacaaccgaaactcgtgaaccggtccttaattgtcatgagcacgaccatcaaaaccatgtgctcacaacccaccattaccaggttttagttggcacattaattaattaactaatcacgattaaccatcgtgaactatcaataaaccatcatgaaataatagtgagtcattagttatcccataagtgtgctaatgtttctaaacagggctaagcaattatatctaatatctagttgaaccaatataaataaagctcaactagtcaaattattataacccaaggtatcaaggaataaggtaatcaagaacaaaagggctataacaaacaataggttaattccacccaatgacattcgaaaataaatgcaatagttgaaaagaaacaatagctttaaataggatcaacatgctcaaagggttgtttgggatctgtgtgacttgccttgctggccttggaactcttcaaactcttctccgacgaaaacggactctccggaaacgacggaatctaagcagaaaagagcaaaatcaccaaaacagcacataaacaagcatgaacaatatatgtggatatttttaatgtgtagatctcaattttagaaaaatttagagacttgaaccaactaaatcggagctaagatgaattagttatgaatttttaaagattaaaccggattaaaacacttatatcggtttaaattgaattatgacgcaataatgaattatttttgaaaaggaaaagatggtttattgcgtcagcgggctagggtttcggtggaccgggcgcacgggcggcggttcacgcgaacggacggccgagattgatccaaaccaaaacggacggccgagatcgatcgggtccacggcggttcacgggagacgactccgatgacgtcagcgatgacgtcaccgacagcggcggcggctcggcggaggagacggctcgaacggcgcacgctcgccggcgaacggcggcactaggacgcaaacggagggcaccagcacgtagaggacgacgcggcgaactcaccggtgaccacaacggcggcggaggaggaacggacgacgacggcgacgaggaggaagcggcggcaaccttcgggtcgacggtgacggcgatgctccggcggtcttcggcggtggcgaagcagcggacgaggacggcgacgacttggcgagcacgacggtggtcttcccgagcgacggcgacggctgaaacgacggcggcgcacggctggagcggcggcggcgacggcaaagctagggcacacggcgctagaacgattccgacgacgagaggcgaaggcgagggtggcggcgggtagaggagacaccgggggtccttttaaaggggctcggaggcggcggcaaaggcccacggcgacggcaacggcgaaggaaacctcggcttggagagagggaaaccgatccgaatcgacctcgaatcaaactcattccagaccgatttagccgaagattccaaaggagaaaaggtagaggagatcccggagattgtttcccctcaaacaattcggccggagaaggaaagggacggccggatttggaaggaaacggcggcggcggcgcgctagggtttcgggcggcggcggccgaaggttgacgaagggcctgacaggtcggacccacctgtcagcgaccgaacgcgcgcgcgcgcggctgcggactgggccggactgggccgaggagagagagcggttttgggccgactttcggcccaaagccaaaagagactttttaaaacctttttcaatttaaattatttcttaaatgcaattccatttattaaaaatacttccttagctcaaataaatcccagaaaaatctaggaaatatagaattaagcaaagtatttaatgaaattttatctggccccattttatattggaatttattaattaaaattagatcttcttttcaagacttttaaaattatttctaaaaattccaattaaacaacaatttataaattttgaattttcagggtgtgacagccggtcagaccggcttgtgttgagcggtcagaccggccggcccgcggtctgaccggccgatgctgtatcggttttggtttcgggttgtttctttggatatccgtgattgtttcatggttatggcttctagatggatactatacgtatgtaatactgttgtttgctaacaatgagtcaagttggagatagcttggtctcggaatatggtttctttgtttgtttcatgtgtaggtgactcgatgcctcgggagagtatttgcggtgatggaccgggagtcggcttggtggtaagacgatgtccgtggtggtcagatatcatgcgggatactaaggctagagttgatgcacgtggttgatggagattccatatggcatacgatggaggtattgtgtgcgtatgggatgcggagtcgaatttggaaggagtccaaatttggtacgattggttatgtaaagtttctttcttgtactagaaggtttcctaaggtgtttaggactcttagtatgagtttggttcgtggctttaggctgcctacctcatgtataaatagagggggagcatgaggcttcccggtatcgcttttgagagcaattgagttgctagtttagctagggtttcgagtttagtcgagatttttgtaaggagtgctgttggtgcactttgtaaacacagagagaagcaataaagttgttatctactttgagagttcttcagtttgtgtttcaccgggtttcggcggtccaaccggcgatataccggcggtcagaccagtggcaagcggcggtcagaccggcggcatacgagcggtcagaccggcggcggcagcaggcacgacaggcgacttcggcggttcgaccgatcgatctacatcggtcaaaccgacgtgttccaggcggtcagaccggcgcgacaacttcgatcagaccgcggtccatcgaattcgagggtaacttttatttccgctaaaagtttttggttttggggtatctcaaccattcacccccctcctctggttggcttagttcttgtgattcgatcatacacaacgtaagggctcctactcatttgtgaatacggtgagcaaagggggccgtggtggcggcttcaaccgtggtcgcggtggtgcgaaccacggtcgcggaaagggacgcggcaatgcgccgcaaaattctggaggaggacgcggtaacaagccgcgctgtcagctgtgtttcaaagtcggccatgtggtggccgactgctggcataggtacgaggaggacttcgtgcctgatgagaagttcgtggcagcagcgacgagctcctacggtgtggactcaaactggtacattggtaccggtgcaacagatcacatcacaagtgatctagacaagctcatcattcgggagaaatacaagggcaatgatcaagttcacactgcaagtggcgcaggtatggctattagtcatgttggtcagtccattattaaaacccctgttcgaaatctttagttgaacaatgtcctacatgttcctgaaaccacaaaagatttgatttctgctcataaacttgctcacgataatttagcttatgttgaacttcatccaaaattcttttatgtaaaggaccgagccacgaagatacctctacttagaggaagatgccaccaaggcctttaccctgttccaccttccaagtcttcatccagaataaagcaagtctgtggtgctgtgaaaccttcctatgagagatggcatagccggcttggccacccgtcacccgtagtcgttgctagtaataatcttccatgtttaagtcagtcaaacaaagagtctgtttgtgatgcctgtcaaaagactaagagtcatcaattaccttattctgagtccattcataagtctgagtatcctttgcaatgggtgttttctgatgtatggggtgctgccccagaatctgcagggagatacaagtattatgttagttttattgatgattttagtaaattcacttggatttatttattaaagttcaagtctgaagttttcagtaaatttcttgaatttcaagctcttgttgaacgcttgtttaataggaagattattactatgcaaaccgactggggtggcgagtaccaaaagctccacaatttttttgcccaagccggcatcacacatcacatctcatgtccccatacacaccaacaaaatggttcagccgaacgtaaacatcgccacatagtggaagtaggacttgccctactagcttttgcaagtatgccattaaagttctgggatgaagcctttttggcagccacatatcttataaaccgtatacctagtaaagttatcgactttgctacacccctagaaaagttactccaacaaaaaccagactattcctctatgcgcatttttggatgtgcatgttgtccaaaccttagaccttataatgtttacaagctccaatttcggtctaaacaatgtgttttccttggctatagcaactttcataaggggtttaagtgtcttgatgtggctgccggccgtgtctacatctctcgcgatgtcatctttgatgaaacggtgttttcctttgctaatcttaatcctaatgccggtgcaaaactccgttctgaaatcctgctacttccatctcaccttcggaattttcagcctgctgatcatgggggtgacaatgtgactgatcaacagactaattcagccagtactgctaatgccgctaatgatttttctggtgcaaatggaagcaataatgcaggatctggagctgcaagcgatgatgggcatgacgagctggagattggcaggaatgacacggcctccgatgacactgatcctgatgatgcaggtactgtcagtcctagcagcaacagaatggaggcgcagacgcaggaggatggcgatgggacttcattctcttcgccgagccaaccccgtgcagccacgtcgccaacacaaggcgcgggtgcgtctgccagtatgcagtcgcccggagcaacgggcccgtcctcggcagcagatgggcagagcacgggatctgctgtgccggcgcctccgacggtagaagatgtgatcagacccagatcaacccgcttacagagtgggattcaaaaaaaaaggtatacactgatggcactgttagatacaagcatgctggtcttactgcttgtggagaaccacaaaatttagatgaagctttaagaaatcaaaattagaagcttgcaatggatgcagaatatatggcactaatgaaaaatgagacatggcacctagttccttcatctaaaggccaaaacattatagattgtaaatgggtctatgagattaaaaggaaagccgatgaaagtttagatagatacaaggctagattagtagcaaagcgatttaaacagagatatgacatagactatgaggatatttttagtccagtggtcaaggcagccactataagaatagccttatctctggcaatgtctagagggtggtctctacgtcagttagatgtgcagaatgctttcctgcatgggcttttagaggaagaagtctatatgaaacagccacctgaatatgaaaataaggctatgtctaatcatgtatgcaagctagataaggcactgtatgggttgaagcaagcacctagagcctggtattctcgccttagtgctagttatgtgagcttggatttacagcttcaaaggcagatacatcattgttcttctataacaagggttctgttacagtatttgtgcttatttatgttgatgatattatagttgctagctcaaccccagacgctacttcagctttgctaaatgatcctaagaaggattttgccttgaaagatttaggagacttacattatttcttgggaatagaagttttcacaagaacaagaatggtattctgttaacacaggagaagtatgctgctgatgtgttgaaaagagtgggaatggaagactgcaaacctgtaagtactcctttgtctactagtgagaaattgtctatcaatgaaggtacagttcttggagaaaatgatgcaacgcattatagaagtattgttggtgcattacagtatcttacattgactagaccagatatttccttctctgttaacaaagtgtgtcagttcttgcatacaccaactacagttcattgggcagcagtaaaaagaattcttagatatctgaaacatacagttgatcttggtctcaagataagtagatcttcttcactgttggtcagtggatattcagatgctgattgggcaggatgcttagatgacagacgttccactggtggctttgctgtgtttttgggaacaaatctggtatcatggagtgctcacaaacaagccacagtgtctcgctcaagtacagaatctgaatataaggctttagctaatgcaactgctgaaattatgtgggtacagtctgttttataggaacttggagtccaagcacccaaggcttcccgactatggtgtgataatcttggagcgacttatctatcgtcgaatccagtgtttcatgcaagaaccaagtacattgagatagattttcattttgtacgggaacgggtatctcaaagattgctagagattgcatttgttcctacgcaagatcaagtagcagatggtctgacaaaaccactgccgctgcaattgcttgaaaagttcagatacaatctagacctagaaaggttaagattgagggaggatgttagataatgtagtgtgcgtgtgtaatcttatcatgtaatcctgagttggtttggtgcggctgaggaggagtagttagctgtaactaatcattagttgttgtatcttatctagattacatctcctccttagtagcaactgaacttaacaaccttgtaatctcctagccggttgatggctctatttaacacgcacacgcggccctcacgagggtatcacgcttcctcattcattcactcgtttctacagatccatccctcgcacggccgcgcctcgagcccccctaccggccggatccgtcccccacgcagggccggtcctgggtttttttgggacccagggcaaaaacttatatggaggcccatatatatacataaactaatatatatatttatataatcatataaacacacaacatttaatattcgatgtgataaaattatctacatataatattttaaaacttcaaagagaaataaatagcggtagcgagcagagaaggcgatcggcggacgatcgacacgagcgtggctactggtgagccacgatttgctgacttgctgtttccgtttgtgagatgccgagaagtcgagaagtcaccgagagcgcaggagcagcgagcgacgtgacgtgatcgaggcggcacgacgcaagtggcgtgatgtgatcgaggtgaagcgacgggaatcatatgaagatcgcttcggcttcgctgaaataggtctcgatggactaaaattcattttctatattgggctatttagctctctaacttaatataaacctatggcccatgaactaaaattatacggtacgtagtatatatactatatgtttatatagagggcccctagattttggggcctcgggcggccgcacggcctgacccccctagggccggccctgcccccacgtgccgcatctacagctcccctaccggtcagatctgggagatgttgagggagaggtggagaagagagttggatccatcccctacatcgtcgccgcctgtgtccttccctacagcgcggctacccagtgctgccgccggagggagggaagggccgggttgccgtcgccactccctgcaacacggctgcccagttgtcatggccacgcgctggactggccgcgccaccgcctcccctgcgtgctgccgcctccctagccatgtcaccgctgccagcacgccgcctccaaagttgtcgagaaagagagagagaagagaggggttggatatggggagccgagaaaaaaaacagagagagctgaaaattttacttccgcgttgtatttaatctctcccgcgattttcgcaggcggtggcttcggtggccgccagcaagaatggatacatcttcgttagagagtttaatagtatagccaactacgggcttcaaattatttatgattcatctaataaactattcatataatagttaactataaaaatatactacaccattaatacccggtcctacctctgatacacacgtaatgtattgaagtccgtgttacagctggctacaaatctatagcccgctttcttttctctcttctcttttcttcttgatatgtggttatagctaatttatagtatgagcaggtacaatagcagactataagccagctataaacatattttaaagagataaaagaggagagaggagcagtgggctacagatctgtagccagctgcagcacggactccaagacgcaatgtgtgtatgacaggtagaaccatgtattaataatatagtaagcaactattgtatgaattgactattaaattggctatacatgatttagagatagtagttggctatactattaaacttgctcttagcggccctcttatcctggccgccagcaaatatccattttcgatggtggtccttagcccctcactcctcgttacattttcactggcggttatcgtgtatggccgtcagagaaaaaataggttgacgccatgaaaaattgattttgtagtagtggataagccttaagcccctaacgtaccccatcaaatgtgatcagagtcatttttgacggattgatttttcggaccatcacatataagtcattcataacgggctgtagtttaatcaagcagaggggtgcacctcatgtcctcatcgatgatgggatttcattaagacccatttaaggtaattgtcataggtgacggcttctcgcccaacatatgatttcatatcactaaaccacttatgtcaccaggccggatccggttcacctgcatgccctagtgtgactgcaagttaagcagtagatcatccaagatattattcatccaaaaaaagtctacattttttactgtagctcggatactgtagcgttaaatctgaacccttcataggaaaactagatggccaaaatctgaaccctatcttgtagttcctagtgtaactgtggccgagttccaaactatttcttcgaacttccaacttttccatcacatcaaaacatttctatacacaaatttccaacttttctgtcacatcgtttcaatttcagccaaacttataaatttggcatttgatcaaaatcccaccaggctttcctccaacacggatgagggttttcgcctgacagaaatgacctgcgccccactaggcgtgtttgtttcgtgcatgtttttgcaccaagaggataaaatatgcacttcttctgtgaggactttacatctgtcctggatttgtgttgatagatgggaaagtgatttcatctctcgaggagatatcctttcgttttgtgcatgccacctaaatagtcactaaaaatttgaaaaaaaattggtaagatagattaatatgaaacatatcactccacaagcatgcatgttaaaatttaacttctacaagttgtaacaaaaataacaaatatagatgcaaatatacgttaactattttcagtttaatttgtttttttaacttgtagaaatcgaatttggtcttgcatgttcgtggagtgatatatttcatattaatctattttgttaatttttttaaaaaaattttgataactactcctatttaaatggtatgcaaacaacgagaggatattcccgcgggataaaaatccatatccttgatagataaagaatcttcagactcgctatatataccactatcccctccctcgttttgtttatcatagacgattttatcgatgaacctgaaatagacatggcttgccacttgagattatttccctttactcaactactagtattggttctgtacaaaatcgccgccgtaggggcagatcctgcaaacgcagaactatccacaaagatcacccaacactctccattgtacaacccacagcctcaagactttccaaacgaggagctctaccgcaactatctagtcatccagcggttcaagaagacaatcacttccgaccccaagaacatcaccgccacctggaccggccatgacatctgcggcaacacgacctacctcggtttctactgtgcagcattgcctgggcgtactaagaagcccacggtcactgtggtgatctttaacggttatggcctgcgtgcaccgaagctggaaggatttattgaccatctccccgatcttgcacttttccatgctgcctccaacgacttcggtggtgacatcccctacctcacaggcctcgcctacaactacaagatcaatgtcgacagcaatctccaaatacaggatgattttagtcgtgacatggtcgggtcgcatgtaacaactaaagttcatggttattgcgttaatttagatctagatatcacatttcacctccggcccggaaaagacgacaagaaaggacgaagcatccccggtgccacagattctaaggcgctcctcctcaactacaatcacctgtccgggccattaccggtgaacatcggtttctccaagttaagctacctggccctcgccaacaacaggctcaccggcgcaatcccgccatcaatcttgcatttgcaagactccctcctcgaggtgctcctcctgaacaaccagctctccggctgcctcccccacgagctcggcatgctcaccaaggccgcagtgttcgacgccggcatgaaccagctcaccgggccgatcccctcctctttctcatgcctcaccagcgtcgagcagctcaacctgggcggcaaccgcctctacggagagatccccgacgcgctctgcaagctcgccgccgtcccagccggccgcctcgccaacctcacgctgtcgagcaactacttcacgtcggtcggaccggcgtgcttgtcgctgatcaaggacggcgtcctcaacgtcaggaacaactgcattccgggcttcgccaaccagcggcggccggcggagtgcgcgtcgttccacagccagccgaaggcgtgcccggcggcgagcgccacccacgtggcgtgccccgccggagctgccaacgctgcggcggcgccggcggacagggtggtcaaggactactccagctacgtgacgtacgccaccctgcacgagtgagcccggcgccacggcacgggcgcacgacgtgcgtgcatgcatgcagtaggggacagctagaagctagcgtctcggggtggtatttgctcttgtattcttgtgttcgtttgttgtgctcgtgagtcgtcattgtggtttgttttctctgcacgtgtggctagctatggctgtcacgtctagatctcacctcctgtactcttgtgtactgtactatgtgaaaatcattggtgattactaaagtttggtgtgtgccctgccctacatgtttgataaagtttacatcatgtaaagcgtatctttcaaaataacggccatatttagttgcacccaaaatacccccaaccttccaactttccattacatcacatccaaaactttcctatacacataaactcccaacttttttttccaaactataccaactttccccaaactttccccaaacttcaggaactaaacacagtcatggctatttcaacgctatttcatcatcaaacaacattttcgaaatggcgagccacgtcaaattgcggaccacccatctcctcgtcgcgctgctctgcttcgctgcagcaacggccgaaccatcagaagggacgagctcagcatcgtccagccccgcatagccgcaggacttctccagcgaccacgcgtaccacgtgatccagcgcttcaagcggtagtgcggcaccatcgatcacgtacgacccgaagaacgtgacagccacctgatcctgaatcggccatgacatacgcggtgtgcgtcgtcgctggcgataaggacaagaatggtgccagagacgggtagaggcgccggctcggtcgttctccagctacgtgacatgatatgccactccgcacgactgagatgccgcagctagcgatgggactttgcgtcacgccaccacggtggtgcgcttggctatttcgcccgtgttcgttcgtagggctcgtcgcggtgtaccactcgtgctgtcgtacgtgcatgctgggttgttggtgctcgatcggtgtccgttgtacgtggcagtgcgtatcgtgcatgtcagcatgtgcgttttctgttcgttgccgtgttcgcggggggattccgcctgcgaatctcatttggatgtacgctatgcggtagtacggtacgcccttgagtgaccaccaatgaagttgggatgcaccatgtgcccgtgaggtgttgatcgcttttcagttttttcaccatggcgtgccgtttagctagaaatgcaagtgtcggtgccaacgacctgtgcataagacaggctgcatcgagaatggtttttccacttgatgtgtacttcaatcctggatggtagagctttcactatgtgaaaacaggttgaatacaaatttcacaaaactatacatattttaaataagctattgtaaaactatgaataatacatcataaaactatagtttcgtacaaaactatcacggaactccaaatttatggcatagtatcccaaaactacagaagcaccgattttatcctgaaactgcatgttttgtaactctggtagagcattattaatgcttagaatttattctcttaatacaacttagttttgtaataacttcctcaggtagttttgagatacttcgagccaggttgtgttgaactgtccccagaggacatccaaatattcgatttgcaaaatgagtcccatttgctagggccaatgggatgatagagctggcccaaacgttgccaggttgtgttgaactgtccacccatttttttttaacgaatcggcgagccaccaatttcattggagggagactagtgcacggcattccgtccgaacgggataattaaatgacacctccacctccccgagcaagatatggataaggttcaaagatggactcagctagcctaacgtatcaatatgcatggctctcaaaaaaatctgcacgtaggaattaatggttggcccccacgtgcatctagcgcttctccttgagtttgtaggtcagaacatgcatgtgtataggtcagaacatgcatgtgtagtgcattatcaactattttattaccacgctgttctactagtactaactaggatgagacgatttctaatagatatcatatgatacttgcgagatatcaccggtgatacttatcaggaatcagacgattccaatcaggtttcgcgtgatttctaccaggtatcaggtaatacttacgaggtatcacctgataccggttaggtatcaggacatgatacttgaaagatatcaggacctgatatatgtttctatccaaacggtgatacttatcaggtatcagacgattccaatcaggtatcacgcgatttctaccgggtatcatataatacttgcgaggtatcaggacatgatacatatttccgtccaaatggtgatacttatcaggtatcagaaactggtatcatgactacctgatacatacttctgtccaaacggtgatactcatcaggtatcggatgattccaatcaggtaccacgcgatttctaccaagtatcaagtaatacttgagaggtatcacctgataccagttagatatcaagtcatgatacctaaaagatatcaagaactgatacatatttctgtccaaacgggatatggtcctgtacaattcccggagtgagaaaagcacaatttccaaagagacgaacgataaaaaaaatactattaaagtgtcatgttttctcagtgtgaacatgcacccataaatatactgatttgactagctttatcatattgtattgtcaccaactcagatactggtgtgacgtgcctgctcgtgtcacgtgcccacgagcactcatgagggttgcaggcctgcaacacactttggttagctgctcgtgtccacgtgtcgctggaggcatgattgtgcacgaaatcagattgacttatgtccatatcaaggaagtcatgaatacttcattaaactattccgttcggacggtatcccgtacagtagtttttctcatttcattgaatatatagaagggataaaatacaacaaaagctgtacaaccaagaacaccatacaagctcgggacctttggtccgagcacactaaagagttagccagatgccgagactttttgcgcctgccaaaccctaagttttggcctcctcttttatttttgccagcaagccaattgccgagagctctttgtgttggaaagttctacagttttttttattccatatctcccaggtcactagtagtgttagggtgcgcaaagccttcggaactccttttatgtatgtcgtgttctcccaccattcaagcactgtcggaacatgtcgcattcgagaggggtttagctggtcacataccgccactgatttcagtccggttcttatgcctgttttccgtccactcaaaaaaaaattagagaagggcaacctaatctaaaattcgctcacatagatatttgaactcaagattttggtgtgctattcaggtcactgcaatcactaggctacatgccctttcgcaaacctaccaaaaatatttaaaatgcattaatatgaatagaagaaataaatgacagatctaatagtattgcttagttacggaatactgattccaattgccacacagcttagaacatcttagaaaagaataggagtgcatcatgaaacatatcgtgtgaacataagtttttgatgtacacagatatcatctaaaataatctaaaaaagattgttcaagtattttcagtagtattacacctatgtgaaagcctcgtctccaaattcatcatgcaaagtgagaaaaatctatcatatttatactgttaaaactagattttttttaacagctaaagtataataaatttagttgagatttcatatatgtgcactaactattggaattacttacacaaaattttcttcttttttatacatttgttagttattgtatatatgtgtgcaccgaaaacttatgtgtacatgatacatcccattgtacaagtataaggctaaaatatgttaatacatggccataattgttacactactgtcgaacaccaaaatatactaaagttggaaatcccaacaagctatttcacatcttttcccaaagttatgcatttctatatgcgagcacccacattgaaaaaaataaaaataaacacgatacaactatcgagaattatgcattttagaatacaggagtgagtgggcgcgcgcggcgcgcgtttataggagcatatacttttttaagtattcgtataaaggaaaacgaaaaaagaatgacagaacctcttgtgtgattacctgctaaggtgtataggctgggcctgtaacatatataaaccattttttagaagcgtctcctgtacttcgtagtatagttcaaccagtattgacgtatccacgctccatgactgtgacgccgcagctacgtatacgatgggaccgtgcgccccgggctctttggcttcacattgcccgtgttcgtgggctcgtcgcggagtacgagcaccgcccccatgcatgttggattgctggtgctcgtcgtcgtccgttgtgcatgtcgtgtcgctgcgttaattcgtgcatctcaccatgtgcgttagggaccgtatgccgtggttgcttgtgatgcggggggttctcgcctggaaaatctcatttggatgtatcgctcgctacgcagtacgcccttggcatgatcattgatcaataaaagctgagatgcaccatgtgcccgtggcccgtgagtgctgatcgcttttttgaagttgtttttcaccaatgtgtagctagaacataagtgtcggtgccaactaacagtgtgcatcagacagcctgcatctagatttatttcagggaacaatacgccttcatatactgtgggacaatgatttttcggcttgtgatgaacacgcaactatgcaagacatctcaagatcgatgcaagctttttggggcatgtcaaaatagattggtgcagtgccggtcttttccggccataacctgaaatcaggccaacgaatgatcatgcctattggacttgggaaggttcacattgcagtaggaataagttcactttgactcccttaactaggtgacagaatctgattatccatgaaccacgacaccagatatctcgacccccaacttttaaaaccggtgcaatttgactccctcggtggtttttgagggcggttttgctgatgtgacgcctacgtggtagtattgacttggtcttcgtttcattggccttgacgtggcgcttaagtggtataagaattaaaatatatatgtgggacccaattatcattcaccaaaagtatgtgtgggacccactgacatgtggggcccacatattatgctctctcttcttcctcctcctctctctctctcttcccttcggcgagccgcgagcgtgggacaggggccagcagcggcaggagggcaggcgggcgagggccggatcccctttgcgagcttgcgacttcgagacaacggcgggaaagcggagacatcgtgacgtggcggagac

SEQ ID NO: 3226 - DNA, 1854 bp, Oryza sativa
atttcgaaggagtatttggagggattatgaatttatgataatacaaggaactcaaaggatggaaggtcacttatattttttttattcgaggttatgtttggatcatgaatgaatttgaataattttgaatcgacggagaactaaggatttcaaaggaggatttgatttcgaactccaatagtatgtttgggaagggttctcggggattaatgttcattacaaggatcggtttaattgagatctctggcattagatactaaatacacgcaaagaaccaatttttttcgaacaaaggattttattaaaatagttttttaatggttacacggaaattgggatgttgcaattttttaaaccatcaccttcctaaaaaagcaaatatgatacgatatcctgattactcacgggtgaaatgttacaataatatctgtacgcttgcggatttatctgtgatcgtaataaatacaaacaataaatctcgcagtctgcctcggtgagtctgcctcggtgagctagagcaaacgtttgttaatgggaagaacaactaaacaaacattgattagcccttttccgaactccgcaagatgcatgaatcatgacgcgaaaaatcgacggctcactgacgaatccaaaaatatcctgcggctgcgaaatagcaatgttatatatgtttatgttatttttcagcgagcaagattagcaattgccaaaggctagccaatattacaattttaattttttttctagaaaaaacacatcaatgacgggttacaaatatacgctaccatgggtaagcctccctggtgatggattgcaactcaagtacatcgccgataagcatccgtgatcactactacaaaaatgattttcgcaagcaaagccagtgaagattttcgctggcagtgcgatccaagtgcgaaaatcgattttcacaggtggacccttaagagaaccgtttgcaaaaattaattttatcaggtgtacccataagaggaccaccagcaaaaaaaaaatgccaaaaaaattaatcaacatccagaccgccagcaaaaagatttttttttgtcaaaaaattaatcaacatccagagctacaatttcaaatccaatccaatccaaattcaatcaattcaaatccacatcagatccatactcaaacccacctctagagaacaccacatcaatttttcactccatttcaacaagcaaacgtcaatacatgcagcagatgaaaccgtcgaccatcgccctgccaattgttaccgtcaccctgccgattgttatcgtcgtagcgctgccgtgctggtagttgtcagtggagtgggagagggaggacttagctggatttgcgccctaggtcaccgcccgccaccgaatcaaccacctacgcctcgagatgggaggacttagctggatttgcgccctagatcaccgccttccaccggatcaaccgcctgcgccccgagctccaccgcccacgcccgaacccgccacccgtgcccgaaactactgccgacggctggatctgtgggccgtgcccggagcaaccgccacgcacaacccgagccgccacccatgccccaaggtgtcgccggccgaatccatggcctacaaccgagccgccgcatgtgccccgagctgcgtcgcaggatccgtcgccacgctccaagctgctgccggccggatccatcgctcgtgcggccgcgcctcgagctccgccgccggccaaatcctgttagataatgtagtgtgcgtgtgtaatcttatcatgtaatcctgagttggtttggtgcggctgaggaggagtagttagctgtaactaatcattagttgttgtatcttatctagattacat

SEQ ID NO: 3227 - DNA, 4206 bp, Oryza sativa
taatattcttttgagtgggatttctcgttctgattatgatcgtgttgcacatcttgaaactgctcgtgagatttggaatgctttgaaaaactttcatcaaggaacaaataatattaaagagcttcgttgagatctttttaaaaaggagtacattaaatttgagatgaaatctggagaggctttggatgactatctttctagatttaataaaattttgagtaatcttagatctgttgattcttcttatgatgctaattatccacaatctaagatttctcgtcactttttgaatggtctcgacatgtctatttgggatatgaaagttacatctattcaggagtctgttaacatgtctactttgactttggattcactttatactaaattgaaaacacatgagatgaatattctttctcgcaaagttgattctaaatcgagtgctttggtttcttcttcttcttctttggttgttgatgtttcttcatctatgccttcttttcttgctgcttttaatgccacatccgatgatcaactcgaacaaatcgaggaggaggatttggctttggtcgctaacagaattgctcgagctatgaataatgccaggaacaggaaaagaggtggtccaaatcgttgctttgaatgtgattcaattgatcatcttcgttcgcattgtcctaagcttgggagaggcaaaagagaagacaaagatggtgagaagaccaataacaacaagcccaacaactacaacaagtcaaagggttctaaccaagggaggaagatggagaatcttaggaaggcttttcaacaagtttgcgccgctttcgagccactaagtgatgtagatggtgaaagtggagatgatgataatggaaagaatgtctctgatgtttgcttcatggcacgtggtgaatctgacacagagtaagaagacaatgaggtgagtgcttttgaggaagctattaatattttgagtgcaaaaagtaaatagtgtgagaagatgtataaaaaacaggaatttatcattgaatctcttaaatatgaaattaatagattaaaatctcttattccaaatgatgatgattgtgaaaattgtgaggttttaatgaatgatatttcaaaaattagagatgttaatgctgcacatgatttgaaaaatagatcttctcttgcttgtagttttgctttgcatacacgcactttggatgagttgtttttaactaaaaagttgttgcaaaaatatcaaattgcttttcatgctagtttgatgtttaacatgatttctgctaaaaagttaaaacaacctcatgatgttttggattgctcaacatgtaatttaaataaaatgaaactaaaagatgctttaggacgtgttgagtatatggaagatgttgtaaaaaacaatgaagtgctttctttccccaaatgtcgtaaaagcaaaggtgtaatggtagattgtgaaaattgtgctaatttggaaaaagaggtttcttatttgaaaaattccttgctaagattttctgatggcaaaaagaatctcaatatgattttggatcaattaaaggttagcacaaataaccgtggtttaggttttgatccttatgctcataactctagacatcctcctgttgtgttaggtgttggtgctagaggtggtgagattttgattagacatgatactaataaaactgtgtttaaatctgctggtatcatgtctaccatgaatgcatcttcttcaaaatccgatgttgtgcatgcaaaacctcttgtttctgcttgtgttgctaagacttctagttctagcaatgtgtctacacaacgtgagaaatatacttgttctttttgtggaaaagatggacatattgttggtttttgtttcagattagctcataaacagaaaaaggagagagagattgcttttgcaaaatcaaattggcaaaaatctggttttccctcgaggaaaccggtcagaccgcagtgggtcccgcggtcagaccggcgaccggtcagaccggctgaacagcctcggtcagaccggacaccggtcagaccggcggtacagaggcggtcagaccggcccccggtcagaccggccactgtacttcggtcagaccggcctcggaggaatttttctgaaaattctaaaattgattttgcacgtggatatatgcctattggatcttctggtcgtgtgtctcagtactggattcctaaatttttattatctaaccccagtactgaggcttcgacttctgctgttgtgtaggctttggtggcaaggaaggagaacgtgtggatcgtggattctggttgttcgcggcacatgaccggtgataaaaattggttctcctccctcaaaaaggcatccaagactgaatcaattgtctttgctgatgcttctactagtgccgttgtcgctataggtttggttaaggtaaatgaaaaatttgaattgaagaatgtagctttggttaaggatttaaaatacaatttgctttcagtttcacaaattgttgatgaaaattctgaggttcactttaagaaaactggaagtaaagtttttgattcttgtggtgattctgtgctgaatatttctcgctatggaagagcgtttaaagctgattttgaaaattctgtttcacctgtgacaacatgtttggttgctaagtttgataaagatgtgatgttttggcattgtagacttggacatgttggttttgatcatctcactaggttaagtggtttggatcttgttcgtggtttgcctaaacttaagaaagatcttgatttggtttgtacaccgtgtcgtcatgctaagatggtttctcttcacatgctcctattgtttctgtgatgacggatgcaccgggacagctattacatatggacactgttggtccagctagagtgtaatctgttggaggaaagtggtatgtgttggttattgttgacgatttttctcgatactcttgggttttctttatggcaactaaggacgaagcttttcaacactttcgtggtttgtttcttcgattggagcttgaatttcctggttctttgaaaagaattcgaagtgataatggtggagagtttaaaaatgcttcatttgaacaattttgcaacgaaagaggtcttgaacatgaattttcttctcctcgtgttcctcaacaaaacggtgttgtcgaaaggaaaaatcgtgttttggttgagatggctagaacgatgttggatgaatacaaaactcctagaaaattttgggctgaggcgattaacactgcttgctatatttcaaatcgagttttcttgcgttctaaacttggaaaaacttcttatgaactttgatttggttatcaacccaaagtttcacatttgcgtgtttttggttgcaaatgctttgtcttgaaatctggaaatttggataagtttgaggcacgttctaccgatggattgtttcttggttaccccgcacatactcgtggctatcgtgtacttattttagggactaacaaaattgttgagacttgcgaagtttcctttgatgaggctagtcctggtactagacccgatattgcaggtacactgtcacaggttcagggggaggatggtcgtatttttgaagacgagagcgactacgacgacgacacgaggtcggctcggccggtcagaccaggcaccaggccggtcagaccgccggcacacctccggtcagaccggcccatgaggagcggtcagaccggccaggtttgtcgggttcgggtactgttgatgtagatcgagatggtcctccagagaattcaacttcgaccagtactggaacaaaacgtggatcaacttcagaagttgctgctcctttgtacattcaacgacgacatccgccggaacaaattattggtaatataggtgagcggactacaaggtctaaggtaacgactcatgatgtttgtgcaaattctgcatttgttgcttcttttgaacccaaagatgtgtcacatgcattaactgatgaatcgtggattaacgccatgcatgaagaacttgaaaattttgagagaaacaaagtttggactttagttgaaccaccttctggacataatattattggaaccaagtgggttttcaaaaataaacaaaatgaggatggtttgattgtgagaaataaagctagacttgttgctcaaggttttactcaagttgagggtttggattttg

SEQ ID NO: 3228 - DNA, 1122 bp, Oryza sativa
ttgagttttgagttagggttttgagtttagtcgaaatttttgtaaggagtgctgttggtgcactttgtaaacacagagagaagtaataaagtcgtcatccactttaagagttcttcgatttatgtttcaccgggtttcggcggtctaactggcggcgcaccggcggtcagaccggcggcatcgcggcggtccgaccggcgaacacacgacggtcagaccggcggcgacaggagtccacggcaggctttctcggcggttcgaccgatcgatctacatcggtcagaccgacgttcatcaggcggtcagaccggcgcaactacttcggttagaccgcgatccatcgatttcgagggtaacttttatttccgctaaaagtttttcggtttttgggtataccaaccattcaccctcccctctggttggcttagttattgtgattcgatcgtacaagtggtatcagagcctcgttttcttttttggatttttatcgatctaaagttttttttgccatggctactcccgctaggttttcaactaagcctcatattttcgatggaactgattttcctcattggtgtagtaagatgcaatcttacattatggctgaaaattatgatatttggaggaaagtttctcatccttatgtgattcctgaagccattaatactgatgctttaaaaactgaatttgaaaataattgcaaagctcgtaatattcttttgagtgggatttctcgttctgattatgatcgtgttgcacatcttgaaactgctcgtgagatttggaatgctttgaaaaactttcatcaaggaacaaataatattaaagagcttcgttgagatctttttaaaaaggagtacattaaatttgagatgaaatctggagaggctttggatgactatctttctagatttaataaaattttgagtaatcttagatctgttgattcttcttatgatgctaattatccacaatctaagatttctcgtcactttttgaatggtctcgacatgtctatttgggatatgaaagttacatctattcaggagtctgttaacatgtctactttgactttggattcactttatactaaattgaaaacacatgagatgaatattcttt

SEQ ID NO: 3229 - DNA, 1421 bp, Oryza sativa
ttcctgcagcctggttcctctctgattgcatggaagaccaaaaagcagactgcagtttctcgttcaagtgcagaagctgagttacgagctatggcagccttgaccgctgagatcacttggctgcgttggctcctggaggattttggagtttttgtctctcccccgactccactcttgtcggacagtactggtgcaatcagcattgctcgagacccagtgaagcatgagctaaccaaacacatcggcgttgatgcctcatacatgagatcgcaggtgcaaaatgaggttgtggctcttcagtatgttccttcagagcttcagttagcagatttcttcacgaaggcgcaaactcgagctcaacatagttattttttgtccaaactcagtatggttgatccaccatgagtttgagggggggggggtgttagatgtattgtatagctagctgtgtatttactcccttcttgagggtgctttcttcatatttgtattgagctttgtgtatatctgtttggcccagttggcccatttaatctgtggtccaatatttgcaacagtctgaatgcatctgttggtgtggttgttatgggtggcattaaccatattctgatgcataattgggaggtaccatgtgcagctgaaatttccttaaaggcaagttcttactcagcaaagatccctatcgttgaaggagaggttaaagttttcaccgaccatcacaatcaactatacacctctcatctaaaactaagttcaaaagaaggtcagaaggaggtttaagtgcgtttgtatgttgatggctttttagcattaacagcgaagtcttgtcaagtggagaatgaagaagttttgcgggatgaaaagggcgaaacatgtacagataatgataaggtaattgccattctgctttgagtatgccaatgcaccttaatttatgttcatggaaattttttatctagtgttacaggatccataaagatctgattatgaagtatagggatacaattgataaaatgatcgctgagaaggcgaagagagctatgaatcttttcccctctacagacccgctgctgcttctgtccagtgagaccgagagcatgctaaaattgccttagagggtaaggctatgagcttcttcttcttcttcttcttcttcttcttcttctttttttttttttgcattttataatatcaacagaggtttttacatgtgtgttctttatttccagctatggagatgtgtaattcgaggcacttgttatgatccatttgtaaaatcaaatgtgtttttgattattattctgtgatgaacaattgggcattggagattattggttttgttatttggaatttattcacgaagtggttttggagatgattggattcacaggtgaatatacaggtactgctgtggttttatg

SEQ ID NO: 3230 - DNA, 4298 bp, Oryza sativa
cagtaagctttctgttaaagatggtgatacgattaccatatcacatagtctgtgttagatgtattgtatagctagctgtgtatttactcccttcttgagggtgctttcttcatatttgtattgagctttgtgtatatctgtttggcccagttggcccatttaatctgtggtccaatatttgcaacatggtatcagagcatatggtttagggttccacatccgccgccgtcgtcgtgaagctctctctctcctctcacgtgactggatccctcttctctctcgcgcgagcgtcgccacctctgccctatgacctcgcctgtggtcgccgccgcgccggcagtgtcgccgccgcgcctctgcctcttggggtcgccgccacgccaactggagtcaccgcccctcttgcgggcgccaccttcctctgctcgcgggcgttgcctgcccctgctcgcgggcgccgccgttcctgctcgcgggcgggcggccacgggcgggcgctgcctctgctgccgctgcctgcttctccctcatcttccaccgtctaaagctactgcctctactgtgatggcgccgccctcgggaaaaccgggtgccatttctcttctgaagcctccggtcatcttcaacggactcaacttccgggagtatgcattgcatatgcagatacacatgtgcagccagtggttgtggggctacctcatcggcgatcggccttgcccgccttgtccaaccttgcctgctgagcctgccatctcggcagatgctgatgagaacactaagcgtggtctccttgatgatcttgctgctgctatggaggcgtatcaaacagatctctctctatatgagacttggttagagcaggaggcctatgccaaggctattttggttgggagcatggaggttgacatatcactcgacattgcgggccttgctagctctgagttgatgtggacccgtcttcgctagcagtacgagcctcgcaacgatgccatgtttcttgccgttgtgaatgaggcacaatctcttcgtcagcttgatgccactgtggatgagttctttcgcaagatgtctgcggtgtggcgtcaaatggacctacagggcgctgatgtttgtcgcacttgtacctgttgtcagcgccagagggtccagactgagaccactcgcctctatgagttcttgtctcgtttgaggcctgagtttgagcctgttcgagctcagctgttggcacgacgccctcgaccttcattgttggagaccttgcctgagctacgggctgaagagactcgttgtcgtgaggctggtataggcattgcacagcagtccacctctgtcttggttgcacagggcttgccttctcaggtccatgtctctgcccagcctgttgtggtgccatcacctttacctgttgcggctggtgctcctagtactccttcaggcattgtttgcgggtactgtagcaagacagggcacaccgcctctatgtgctacaagaagaagagagatcagagtcatcgcacctctcagggctctcgacagggctcttctcagtcaagctctcagcagatcacatcgaccgagcaagagcttgtaaggctccttcgtcgtcttatgactacagcctctacctccacccatgggtctgctgctcaggcttctagtcttccaccaccacctccatcctcttcaggtatattgtcctcgtggtttcttgattctggtgcttccttccatatgacacccgattccacacatctttcttctatgagtcctcctgatacccctctcacagttcagacagctaatggcacctcacttcctgttgttgatcgtggcacactttctacttcttcctttcgagttcctactgtctctcatgttcctaagttaaccatgcagcttatgtccgctggtcagatcactgatcatggttgtcggattatacttgaggctgactcttgttgtgtccaggatcgtcgcacagggctcctggtggggactggtcctaggcgccatgactctcagcgtctttgggagcttgattggctacatctcccttctgatgcttctaccagccagtcagtcggttccactgcttcagcgttagctacttcagccactactacttttgctcagtggcatcgttgtttaggtcatctatccggtgctagattatccacacttattggtagttggggtcttaggtcctgtttctggagacaccgctctacattgtacgggttgcaagcttggcaagcagctgcaactcccctattcttctagtgcctcagagtctcagcgtccttttgatcttatacactctgatgtatggggacaagctccttttgtttcgaaaggtggccattcctattatgtgatctttattgatgactattcgagatttacttggatttacctcatgtcttctcgtagtcaatttctttctatttatcagcagtttgctactatggttcgcactcagtacgattcttccatacgggtttttcgtgctgactctgttggtgagtacatttcggcagcccatcgccgttttctagctgagcagggaacacttccccagttttcttgccctggtgctcatgctcaaaatggcactgctgagcgcaagcatcgtcacattcttgagactgctcgtgccctaatgatctcctcgcatctttcgcctcatttctgggctgaggctgtctccacggctgtttttcttatcaatcgatagccttcttctgttcttcatggttgtactccctatgagcgcctatttggtacacctcctaggtacagtcatcttcgatgttttggttgtgtttgttatgttcttctttctcctcgtgagcgtaccaagctgactgcccagtctgttgagtgtgttttccttgggtatagcactgagcataagggttatcgttgctatgatcctgttgctcgtcgcatgaggatatctcgtcatgtcacatttgatgagtctcgtccttactatcctcgctcttccacttgtgatcagtcctccactgtcaaatctatctcctttttgactcttccggattggtcctttccttctccaccaccagttccgtctccatcaccacacctccctttggtttctacgccatctccatcactgtcaccacctccttcgccgatgccatcatcacccatactaccatcaccacctcctagtactcttttagatgctccacatgagctagcacctttttcgctgcactactctcgtcgttcacgaccccttgttgagttgtcctctccctctatccttggaccagctcctgctcctgcttctcggtatgatcttcgtgatcgccatgctattaggcctgcgcctaagtatggctttactgctgcggctattgttgagcccacgacttaccgagaggctattgcccaccaggagtggcaacaggcgatggcagaggagattgctgccttagagcgtaccaagacttgggatgttgttcctgcacctactcacgtcactcctatcacttgtaagtgggtctacaagataaagactcgctctgatggctctcttgagcggtacaaagctcgtcttgtagctcgtggttttcagcaagagcatggtcgtgactatggtgagacttttgctccagttgctcacatgaccaccattcggaccctgttagctgttgcctctattcgtcagtggtccatttctcagctcgatgtcaagaatgcctttctcaatggtgagctgcatgaggaggtctatatgcagccccctcctgggtattctgtccctgatggcatggttcttcgtctgtgtcgttctctttatggtctcaaacaggcccctcgtgcctggtttgagcgcttctcctcagttgtcactgatattggcttcaaagccagcgaccatgaccctgctctctttgttcacacttcttcttgtggtcggacccttcttcttctatatgttgatgacatgatcatcactggtgatgactctcggttcattaatcttgtgaagaagcgtcttagtgaccaattcttgatgtctgatttgggtcctctcaggtactttcttgggattgagttctcttccacgtcttctggtttctacctctcccaagagaagtatattcaggatctccttgctcgttcgggcctcactgataagcgtgtggttgacactcctatggagcttgggatacatctacggcccaatgatggtgagcctcttcaagatcccacccgctatcgccaccttgttgggagtcttgtctatcttggcggggctgcaggaa

SEQ ID NO: 3231 - DNA, 691 bp, Oryza sativa
ttaagtcttcaccgaccggcttgcctgagccgcccccgactggtgtctccgtctgcacggctggcctattatgccgtcgttgttgggcgtctacgactccaccaccggcctgcctccatcgccgccgactggtgtttccgcctgcacgctggcctattatgccaccgttgatgggcgtctacgtcttcaccgaccggcttgccttcgccgccgccgactggtatctccgtctgcacggctggcctattatgccgtcgttgttgggcgtctacgaccccaccaccggcctgcctccatcgccgccgactggtgtttccgcctgcacgctggcctattatgccgccgttgttgggcgtctacgtcttcaccgaccggccgcctcgtccgtcgccgactggagtttccgcatgcacggctggcttattatgccgccgttgttgggcatctacatcttaatcgccggtcgtctcgtctgttgctgactagtgcccttacctctacgtctggtttatacagctaccactactgatggacatcatcatcttccgtcgccgactgattatgccgccgccgactggtgcttttatcttcacaactgcgcgtcttcactaccggtttgcttctgttgccgccgacttgtgttcacttcattacggcaatacaactttgtcatcatggtggggcgacttca

SEQ ID NO: 3232 - DNA, 19508 bp, Oryza sativa
taaagctggtaggcagagacttggttattgtgccctacattgtcataattccagattagttgatcgatcatatataagtactaaaatgtagttagtctatcacaatagagaccaccgacctcaaactcagccaaagtcttcaccttttctctatacagaaggcgcatgttgtggcacacatagaatccgcactggtcacctatttgttgcttaaccgggaagtcttttttgtggataagggtgtcatgtcctgtcttcctgaggcctcctctttgcacgtattgggcccacgcttcatatatcgctagttgaattggggtcaaatcatatgcgttcttatcaattctggtccacttaggtgttatgaccagaaggatccaatgggcaccgcggcattaacatagtgaaagttaattaagtactgaaggaatgtgtcatgctgttgtgtatatttagataacacacttactgttgattataggcgcacataatgtactccttgtctcggcgggaccacaaggtgttgtagatgtaattgaccatttcttgatggtcattctggagatttgtgacagtgaccacttgtggatcaaggaaggcaatttccggtgcatgcttctgacaccattgccaacttaacctacacacaggataaacgatcttttaagtgagttaaaccgattgttattactagattgagttgggcgacaatacttacaaggagtagcacttaaggaggcttgtgtccatcgctcggagcctgtagagatcgaaaagatccttgaagtcgaccacgatataatttgttggaccaaggaatggctttccatcatgctctccaaggatatcggtagctttattcggcttcctggcgttagatttctccatgtagtataagtgaaagtccttgcaagcggtgcccattgcggcaagcacgtcatctccaaccaatggcatgcctagttggaactcctgtggagcgacgtatttctttttgacctctttgcccttagtctcttcctggaccttgcccagatctagcttccttggagctagaagcgaggcatgcacctttcctccccttcctctcccctttgcttcgggtttatcgagagtaattctctgaggggaagagtgtgctttcctactcttcttcatcggtgggggttcatgaatcgccttgctgtcggcctccgttcggtcctccccaaaatccgtgtcgtactgcaactacacatcgtaagattgtgcatgacgatcttgagcaggaggggctgaaggagcaaaggcgggtctctttggtggacgaccgcctggtgcagtggttggcctcgctgtaaccctgatctcaatgaggtccttgggccattggatgaaggtaccacgggcatttcctagtgagaggacctcgtcgttcggtggatacttcagtgggaacagctcgtattcaggcttcaccgagtcgacttgaacttttgcacagtcggccctgagttgcactccatgcacttttgtctctggggtcggcttgtacgcaagtccctcggctgctggaaccatgaaggtcggcatcaccctaactgtgagggtgcagctcattggttcctgcgatagattaatcaatttttttagaatattatatatcatatggattcgttaagtctttcatgtattgagtaagttcacttttaccgttatgtggttgacggcgccgtcgaccgatgttggattttccgccaactcagttgatgcgcaactgctgcgtttttgggtgggacttcctaactcttcgtgcgcagcagcagcggcggcctgggggttctgttgctcttctcggatctcttgcctaatcttggccctcatcgactcgagcttttcatcgaattcagatgtcaactcagctcttatcgacgcccggatcttggcttcaaggcgtgcatctttctccgccttgttggaagtccgcttcttgtactgccacgcgtagtctggaaatccatacttccagggaacagaagacccaacgccccgtgtccgtccacggtgttccttattgcccaacgctttcgtgaggaggtcatcctcgcgtctttgagagcaggcctcttgcgaggcttgttgctcggcaaccaactccttctgcattacaatttagtggggttaaataaactgcacgatgggaaacaatgcaaacatacacgagcggcgtgttcgattcctccgcttcttcatcctcacgctgccattcgtcttccttaccagcatatccggcggtgccaagccggtgcggatgctggttcctggtctggagcaagcgatatgcctcgcttctagctctggactcgggggtcgacttcttcgcatggaattcctcccagatctgttctgtgatccaaggaaattactctcttggatctggattcgccgggttgtagacgaactcgccgactagcttagtcttgaagttcttccaagcattgcccataaccttgaaagcagcctgcctgagacggtcctcatgctccgcaggataatcgaagctctccttgaacgttagccaagcaatgtccttctctgtggccggcacgagcttgatgtcatcttgcagaattctaaatttctgcctccctatgaccccgcagatagaccttaatcggctcaatattttccttggagatgccagcaaccctacggcgcccaccgctgttatgcggaaccgttccttagggattttgttccctgtcctaggagtacgtgcccttgaggacccactagttgtcgtcgacattagttctccttgctgagacatcgtctacttttcttcaaaataacaaaaaaacacaattgagtgttacaatctattaaccacatttcacaataatttcagtaatgcacaacatttcatcccaacatgaataaaccacatttcatcccaacatgaaccacattgcatataaataaagttaaatgaaccacatttcatcaatcactacaatcatctatcacaaaattcataaatgcaccacatttcatcccaacatcgacatgtctcactcatagttcaatcacatatcatctacatccacatttcaatgacatgtcattcacagttagcagagggcggcacgatggaggactcacctgaggatgaccggtggggctcggtggagggcgtcgccggtcagtggaggcagcgccgggctcgatggaggcagcggtctcggtggcggcggcggcgggctcggcgaaggaggagttcgcggcggcggcgctgggctcggtggagggcggcgccggtcgggcaggtcggcgccgggcgggcggcgttgggctcggtgggcgtcggcgacgtgtgtcggtgaggacgcgggcggcgacgacgaggaaggccgacaccggtccggtcggtgtagaggctcggtggcggtggcggcgggctcgggggggtcgtcggtgaggaggcggcggaggtccaaatggagggccgaggaggctcggtggtggcggccgcgggctcagcgagggaggcggcggcctcggcctcggcctcggcgtcggtggtgacagcggcagactcagtgagggaggacgacggcggcggcggtgggctcggtggcaacggcggcgggcttggcgagggaggacgacggtggcgctagggttctaaggagacgggaaactgtagcgggacttagaaaaattttcgatccgatctgagaaaccctagttatagtagagtgatgagtcatctcaatcgggctttaccgtagggcccgtcacagatgactcatcggtgacgggctccatactaatgcccgattgaaatgacattcaggcccgtcacggatgagtcatctgtgacgggccctaagataatgcccgatagagatagattaatctctatcaggctttaactaaggcccgccaccgatgactatttttccatttttccaaacaagtctttatatttgtgagtacaaaatatatagctgatgtataataattcattttattagtcataatacattttcggatagtaaatgatttcaaatcgaaatatggtcaacaacaaaattgtagagcctttcaagatctacaacttttattttggtcatttttctatataattttttcccaacagcttgaaattgattttgacaatatgacaaatctaattaacagcatttgtaaatactaaatgatttcaaattgaaatatggtcaccaacaaagttgatcctctcatcaggatctacaacttttattttggacatttgtaataaaacaaaattagccatattaatgactacacatatcaagtctttgcaataaaacaaaatacttcattcattacaatagataagtacaaatgcatcggtcacaaggttatgccttccgtatgatctgaatgagcatatgccacaggctcttggggatcatcgtcaaggtcaatgtgaggtcttacatgaatattatggttgtattcttcttcatcgacgacgttgtcaactcctacaattcggcgctttccatccctcacgatgtgcatcttcttgtttgaagggtcttttatgtagaatatctgctcgacctgtttcgcaagtacaaatggttcatcggcgtatcccacctttgatagatatactaaagtgaaaccttccttgtcggctttgacaccagtgcgtagattcacccaacggcagcggaacaaaggaaccttgaacttgacgtagtttagctcccatatctcctcaatgcggccgtagtatgtgtttgatccaacttgattctggaatgcatctatacggacgctactgttttgcactgtgcttttgtcatcttgtttgacggtgtaaaatgtgtatccatttatatcgtatccttgccatgtgtgtacggtccaagacggtcccatccccaacaactgtactgtctcatttgggacatctgtggacattgtcacacgattcttgaaccattcgttgaaccgagaattatgttctctgttaatccatgcatcagatcgccccaagttctcatctcggattttcgctaagtgctcctcaaagtatgggccaacttctgccatatgttggagcacagcgtaatgagcctgcgcgtacgacgcttgatcgggcctaattcttttccttccgattgtgccaacacctgacaaccttccctcgtgacgagacgcaggaactccgataggatcggcatcggacatgtaattgacacagaactcaatagcctcctcggtcgtgtaaccttcaatgatgctcccctcgggtttagctctgttatgaacgtacgacttcagaactcccatgtacctttcaaacgaccacatttcccttagaaaagccgggccacatagttttgtttgcttcaccagatgaacaaggagatgaaccattatatcaaagaaagacagtgggaaaaacatctccaggtgacagagggtattcacaatataggtctgcaacccatctagatcttctggatctataaccttctatccaattgcattgaagaaggcgcacagacgttagatcgtgtgacgcattttcggtggtagaatgcctctgatagcaactagcaagatttgtgtgattagcacgtggcaatcgtgagacttcattccaacaagttttagaaggtccaatttaacatacttacttatcctcgctgaatagcccgatggaactttaatatccttcaagcatgttaacattgcgatcttctcatccttcgacaatgtatggcaggctggagggaggtacactctacctgtctctgcatctcgtatgggctggagttcactgcgaatattcatgtcatgtagatcaaggcgcgcgttcaacccgtcctttgtcttcccgggaatattcaacatcaggccaaccaaactctcacacacattcttttctacatgcatgagatcaatgcaatgatggacatcaagatctttctagtaaggtagccgacaaaatatggattttttcttccacatacccttctcctttgtcttgctacgttttcttttcttcccaaactcattgcttatgtccttgaccatattgtggacctcatcttcggacaaatctttgggagcaggctgaagttctctcttaccgttaaaaattttcttctttcttctaaatgcgtgacgtagcgggagccacctccgatgacccatgtataccatctttcgtgatttcttcagccaccgacttcgtgtatgttccttgcaatcggagcatgccttctttccttttatagtttgtctggaaagattaccaagtgcagggtagtcattaatggtgcagtacaatagaactcttagcttgaagttctcctgaccatatgcatcccacgtttccaaaccttctttccaaagaatctccagatcatcgataacaggctccaggaatacatcgatatcattgtcgggttgcctcggaccttggattaacaagcacaacataatatatttccgtttaaagcataaccatggcgggaggttatagttcgcaataagaattggccaagttctgtgagtactactcatgtcaccgaaaggattcatgccatccgtacacagacatatcctcatgtttctagggtcggcagcaaagtctttgtgttttcgatcgatattcctccattcaatcgaatctgctgggtgtctaagcataccgtcattccttctcttcgtggcgtgccaacgtactaacttggcttcgttcgggttggcaaagattctcttgaaacgatcaatgataggtagataccacacaacctttgccggaccacccctctttgacttatttccttcgtcagcacttttctttcgcttgtatcgagaagccttgcagacaggacaagtatccaagtccgcatattgcttgtggtacaatatgcagtcgtttggacaagcgtaaattctacggacctctaaccccagtggacacataacctgctttgcttcgtatgtcgtctcgggcaatgtgttctcagcaagaagcatagccttcaaaattcctaaaagacctgtgaaactcttgtctgtccatccactactttccttcagcttcattaggtccaaggtaactgacaacttagtgtgttttgctttgcatccagcgtacagaggcgtctcggaatcacagaccaacctgctgaacttcattccatctctctcattctgggctaggtcctcaacgtcatgtaacatgtcttgcagcagatcgtgatacacatcaatggagaaggtacaaacatgtcatgctcatcttcatcttcctgattatgcgcaccacttctgtctgctactgctccacttcctgattcttgctctccatgcttcacccaacatgtatagccctccatgaatcctcgttgtatcagatgaccatgtacgtcctctccgctatcaaacatattctcattcttgcaatctgcacatggacaacacatgtaatcactgtttcctcttttccgatcctcctccgcggcgttcataaaatttattacgccctttctgtactccgtagaatgacgtttcaaatttttcgcatacatccaacttcgatcaattgctacaaaataaaaaaaaacaaattagaggcacatattataagatcagtattgcaaaagtaagacgtgatgaaattgctcaattaatgaataatattactcacttgattgatccattttgatcacttttgggaatttaatttctattttccttggaaaaaggacaaaaaaatcgccctctacagcctcccaccaaaatagtgaacagtgggatacatttacactaggtggtggtgggtatttatactgtgcaacaaatatctgtaacggccctaaaacaatcaaccgtgacgggcatacaagtaatctctatcgggccttaataaaagcccgtcaaaaaagagtgtcatctgtgacgggcattaaacttatctcaatcgggcctctagttggagcccgtcacagatgaccctcatctgtgacggacttcttttagggcccgattgagatatggaaccctcatgtcaatcgggcctcaactatagcccgtcacagataagtgtcatccgtgacgggctttagttttatgccgatataccatggttatgcgaccatatctcaatcgggcgaaacttcggcccgattgagattacttccttgtgacggcccgcaaattccagttttgttatgggccgtcacagatggaaggatctgtactagtgcgagggccttgtcaatagggagggagaaggatcacgctccaggcaaccgctatggcacccaatttctaggtagctgcgagacggtagggaggaggatcacgctgtcgtcgccgtcaaagaaagaggctgagagggagagcgcgagggaggggtttacttggaaagtagtgtcctagagtgtgagacgtctactttaataatattttttaagttggcctacgggctgaagggctcctgtcattggtgccatttttctccttaaccggcattaatgtttggcccatcagtgccggtaggtttttaaataaacctgcactacttgcaaactagtgctaataaattagttcatcagtgttgggtttttaaataaactgacactgatcacattagtgcctactggtttttcttccgatcgatactgtcgtaatcagtaccggttatttgtccttcagatcatgcatgggttccaggaggagggggcagaatccttaccagtgtcaggtttaatccaaccaacacttgatagaggtggcattgataggctgtactttagtagtgaaatttctactaaaattttgatgtgaattttaactgaaatgctcaatgattagaggcatgcggagtaacatagatgtatactttatattggaactagctgcgtggcccgcgcaattgcacggctagcactcatataaaattatctattatttaatatgaatttactaaaaaattgttaaatagctatcttgttgtatcaagactttgaaaggttaaaccttatcatccacgtgtttctaattttatagtttttaaaagccatgctagttgctaccccttatttcttaggcacccctcgatgtaccacttcttctattcattctccttagaatgtttaaaaattagaccttgtagtttttaaaatttattgtctaatcggatttcatttttataatttttagatgtctcatccactgtctcctctttttattgtcattgtgattttcaaaatcaaacaaaactattgttcgggttcaattttttactttctagaagtcccaccaaaccgccagcggctttgcccccttacttctctacaacctacccgctgcctcctctcttcgttgtcattgggattttaaaaatcaaatgtaattatgattggggttcatgtttttactgtctagaagtccaatcaaaccgtcgtcggctccgtcactgtactcctctacgacttgcccgctgcctcccttctttattgtcatttagattttaaaaatcgaacataattatcattgaggtttactcttttacttttcagaagtctcaccaactgccgtaacaatgctatttaacgacccgcccgctgtccctcatcttaatcgtcgttggattctatttgagattttgtttatagtttttagatgacccatcaaccgtcaccgctctacttgtttacggacatgttgttttcccctttttattatcatttatcgtcattgtattctagatggatttgtttttttaaaaaaattcaatatttttcattccgatgttttgttatttataaattgtattcgtacttgaactcttataattattttatattttacgaatttattttatttttattttgaattttaatttatctcgtgatgggttttagatgatcttctctttcaatagctagtttttatgttttatttcgaaattgggttatttataaattatattctaattaaaatcttattttaatttttctattaatctcatattgtgttatatatgaattactgttttaatattccttatttttattcccagttttagtagtttgtaaaaattattcttaatttaactcttatttctgattttctaattttggaattaattttatttttgtacatattttaattaatctttaattgtgttctacatggactcttctttcaattttttatttttatttcgattttcaattatttctaaaatatatttccactcgaactcttttttttcttcaattaatgtggaaatttctagccttcatagtgaacatggtgactcttttaatttttttatgttttattttaattatttataaattatatttctaattaaaatatcatatttcttttttctctgattagtgattaatgtgagaatttctagcctcttgagtgaatgttggccattacaatattaggtcccacgttgatcagacaatatatatttcttttttttaaggcatgtggcgttatatatatgcctcattgttaatcacccgttaattgatagaatgatttcactaatagtatataacctttttaacatagtaatatatgacttatatgcgtaaagatgttctaggttctcaatatgtgctactactatgcgcttaatttggtctggtaataagctgcaaggtgctgacggtggaacagtggcttgcatgttattgtattttatatacctttgtttaattcaaaaaattcaattgtattgcgtttattaacatttatgttatcaatcttcaccgtataattggttctaccacaatctaacagcttagattttttcttcgattgctatgataacttataatagaaaaaaatataggacgactaagccgttgtcttaataataaagatttgtacccctctagaacgactatgatgattttctaagttatcttaataatatacatagataaaaggaatatctggaaaagacaatttacatatttattgttggtattatgtttttactccaaatgttatttttacgtttattttggaatctatattttcaaagaaaaactttttaattgtattgcttagggtatgcacctatcttgctgtcgtgcacatgctatcgtgccttctggttgctgacgtgcatcaccgagtccgactcatcgcgcagccgcacggcttgacctgctgctgcggatttccgtcgctacctactagtatctatcttcagatcaacaaaacacgtctaaaatagggctatgcagtgctttgttgcttgctgcttcatttattgcctaattcatctaggtcctaaatctgtttagtttcggaaatcggacaactctgttgagtccgtttgcatgtttggtcctagtttgagattgattctaattcagcacgtgtacggtgctccttatctcttactttaacatgccggatttatgttaaatctcatatgttaaaatatagacctaacaatctaacggtgtaaataattcatattttctccgattaatatgagaatttctagcctccacagcgaacgtggtgtcttctttcaaggctgttttaataatataatagatagatagatagatatatgcttatctaaaaaactgtatgtaggaattaatgtgtcatttcacaatgtttaatacatatactaattaatttattaatttatacagtaccagtatagtaaactaaactaatcattgtctgttcgttctaggacctactgacaataatgagagtatatcacatccattcaggcaaataaacaattccatgacagggtaagctttaattaggttctcgtattaatttggttaaagcttttgaaagcatgagcttggttagacaaaaaaagccatcacatccattcaggaggtctagaaaaaaattaccacatcaattagggaaaaaaataaaatatttccaccacttaatcatcgtgttagattgttaaaatgttgcatacaaaattgtgtctgtgaaatctgaagataagaggttgtatatcaaataatgtaattattatactttctaagtccattataaatatacaagatacaattatgtaaataacaactaatacaccatccgttttttgaataattatcaactttgacaaaatcatttattttaaaatactcgtcaccacgactttcgttagtaaaattacaactttgcccctactctggatatttgtcaccgcctatttcatcgcaaatcttcaactaaattgttggcttgttctgcgtacaatgatcaaaatgtctatgagttaaggagagagagtactggtatatataatatcctattttacttttacaatttagctctgcaaaattggtcgattattgcacgggggaaaatacactaaccaactatttcttgttagataattaattagatcattgctgatccgtttttgtattatagtcaatgcaaacagaacagatggagttctctcacagactccagacctactagctgcaactaattaagccagcatgcacatatggacatgaactttatacaaagctgtagctgtctaataacgattgaagcaaccatattaatttgttaacgaaacatccaaccgtgcatctggaagcaacattcgtgtagtaccaccatttattgtgtggccaaggatcggtagtacggacgtcgccgatctgctactgtgtactgtatgtgttgtcattgaggtcatcgtcatagatcgatgcaaaattgcaaaccgcgcgatgcgtatagggacgatgagagggaaattaaagctagcgacaggggctgggggctatggcgaaatcgccgaaatgtgagtgttacccttcgaatcttcgatcgattttaaaccaaataaaaaaaaagaacacgtcaataataattaaccagctagctagctagacgggtttgcgtttgtgtcgtgctaaaagccacataattttgtcttgctaattattagctattagttgtatttattattagttatcacctgtattggagaatgtattggttgtgtatactcaagtattgatgcaaatgtgcaatattgaaatataaattcgtcgtcacgatgtgatttgatttagatatataccaaatgtacttgtgatccaccaagttgggcgatcatgggacaccaaggaggcaattgtattcacgggaagggatctgcctggctataaaaactggacaccttccgccccacttgatcaaggaaattggccggatgcaaaagtagctatcccgctgaaaaagatgggaaaaagggtttagtggccctacaagtactatctatgtggagattcacaaagggggtgtttagatttaggggtgtaaagttttagcgtatcacatcagatattatatagggtgtcgtatggcgtgtttaagtactaataaaaaaactaattacagaatccgtcagtaaaccacgagacgaatttattaagcctaattaatccatcatttgtaaatgtttactgtagcaacacactgtcaaacaatggagcaattaggcttaaaatattcgtctcgcaaattaatcataatctaagcaattagttattttttagtctatatttaatacttcatgtaggtgtttaaatgttcgatgtgatagggtgtaaagttttggtacgggatgtaaacagggccgaagtcaccataaacatctagaaaccttgctgtcgacggatatatcatttatcacttaaaaaattaattagtcgtaaatgcgtgtagctggtgataatgcaaaacatacatacattgatgtgccggtttggtctaaacgaatgctttcttcctccaccttttctaccttaaattgaagaaaaatttattgtcattgaggatgatgtaccatcatttgaattgaaaacagtataaaatcactctcaatggaatgttgcagggtgctggcaggggcggtgaacctgcgcggttggcaaggcgcgcggctgcaacagaacggcccatgcatgcaagggtccgtgcgattaagggcccattgccgatttggattaacttttggagaacaaggacgtacgttcctagctgaaagcacatggttagatggttgctacatatgttgactcattttaatatactttttaaaagtttgtttgttttgcaatgaaaataaacattgttgtacttttctataaacttagtcaaataaacttagtcaaatgtaaacaaatttgacttaagataattccaaacaaaatttatattatgaaaatagagggatggtatactttaattagggttgtacgcctgacgccaaaagaagttagagaaaacttaacactctgcactaggcgtacttgattcctgccaaatgttgctcctaattaaaccccatgcatgtatgcatgtgagctagccgcgaatactccataatccaggcatgcttaattaatatacgtgtgtactccaagtgcatgcataagccagatgtagctagctagcttagctctgatcgcttaattaatttgcaggcatgtaccctgaacaattttaaaaccgttgtgagagatcattagtgggggcaatggaatccacaggggttgtgcgtagcgatgcctccaaagccggcacccaactcgcaagattctcgctttgccaagttgatctcgctcgatcgttagcttgcttctgttttgatgggacttgagcctctctctctggaagaggccaatattgcaatgcaataattttttgaatggaattgaagagacgtaccaatgcaatgcaataattgttttgtctgctggagaaaacagcggaatgtaaccggccaaatactatacgtgcgtcgtcggcggcgctagctttgacgtggatgtctatacatgtgtgtgttgttcttctaagttctaaggttgcaaattaactagaatgcggctaattggccgatgcaaatggagggagttgatccttgaaaaaaataaaatacccctctaataccgagatttattctaaggatgtcatgataccatgcatgaagtaactcgattttaccttcgtgatactacatcaatatcgatcatttttaaaacccatgattatcgttgagtatcatcgtatattgataagtatcatcaagtatgtatggaccaatatcattgaatatcatcaagtattttatcgcgtgtatatcaacaagaatcattgagtatcatcaagcgtactatccagagatatcacgacatagtatcaagtattacattataccaatataataaatcaatatcatgatatctcaaggtaccatgatatgatattatatagtactatacgatacagaatgatagatcgatatattatggactggtacgacacctcgagataccatgatatggtaactcaaattatcattggtatcatcaagtattattggtttagtgataaatattattatggtatcataaatatttcatatgttggtaccaaagactcaaaaacaggctttcacgactaaaagaaataggcctgttcttttctccaataggagttggatgaaaattaagattttcgtggtacgttttttaaactgctaaatcgtgcatttcgtgtaaaaactttctatatgaaagttgctctaaaataacatattaatctatttttgaagtttgtaataatgaaaactcaatcaatcatgcgttaataccatctcgttttgcagaaaaaacttaatcttcatcttcatgaaaaaataacaccaccatactctatcacaaaatgacaaaatgacaaaggaaatagaaaaagtaatcatggacaatcagcaagcctcgacacactgtcgggccgcgacgtcaccttcgcgcggtgtttgctccgcctccgcgcgatgccgggctactgctacttcggcctctccaagcgtccgcccgaaccgtgtcaaataactgcgggctgcggcgctgtccctccgtctgcgtgatccgacaaccgcctgtccgcctcgcctccgtgcgtggccggacccgacccgacccgaccccgcccagctgccgcgtgttgcccggtggggacgcctcatctccagtccacggctcaacgtccacgcacacgcactgcgcagcgcgaggaggccgcgcgccgcatcacatacacgggccacggcctcacgggggggccttcccgtggctagcccacgtattcccctccttcctgggcctaagctagcgcccgtaagccaaatcgcggccggtttccgcggatctccccgtggacctcctcctccgtgtggtgtgatcgccagtaacgcccaggagcttcgagagaattccacaccattcccccctaccaccacgcggcgcatcatcacaatacacagcctctgcttcccccggcaacccaaccgattcgcgctcacgccacctgcaatccgcgaccagacgcgcgggccgttgagatcaacaaacacatcgcacgcgacgccgcgtgagcccgtacgatcgccccctcccgcgccgcgcctccgcactctggttggttgcctcgccggcgatgtcgacgcagtccatctcgcccgccgcggcggccgcgtccgcgcagtactcgtacccggctgccgcggcggcggcggtcccgtcctacttccccgtcccgttccacctccagaacgtgcagcagcccgccacctggccagcggcgcccgcggcgtacaacgccgtctaccccatgccccaagtccagcaggtaggaactctgcccctcttcttctgattacgttttcaaccgctcctttctgtgtgaattctactgcccgtttgttgatgcggtgatggcggattagggaggatctagactctgttgttttagaggcttggagtaatgccagtttggggataatgcgctatgtcatgtttgattcaactgaaaggctcatttggtctttcgtcatccacctttcatccttgggacaacacaatgtaaaagtggaatactcaatggaagccaattcatattgcactataccagtgtatcatatacagtttgtaggttgtgaaatctgtctgcagaatgatgcacagaaatctacatattcggctcatgttatgcaagatcttagatgctacgtcatgatttcatttctatagatgtagggaggcgtgccaatgtttatgttttctaactctgaattattaacatttgatgagagacttgttcagtgcaactgtaagttgtatttcagtgtaaatggaaaaggatgtagcttcataaatcaagaacctgatagtactaatttttattttggaaactagctgtaactagtctattatggtatcaccacgacgcaggttcagcaactgttccagaaagattcacagataatcactcctgaagctctagctactgtgaaagctgctattgcaaatagtgagaaagacaagaagattgaagcaaacaaaaaggcagtacctcgaaaggcagctgggcaatcttgggaggatccaactttggctgactggcccgaaagtaagatctctttctcactatttcttcctggtggttgtgttggaatgttgtggttctatgatctataaaatcttgaacttggcagtgtgactttcccctcgtctgaacttgtctgaatgtctgttatcctcacgtcaacaaaccatcaaacaccttcaattccccaggcaagatctaatgttcgatctatgtattctaataagacaaactttcccctgtttccttctgttaaaggtggccgaggatgtgatatgtagcccaacaggtttcagagttgatgcctgtctcgtggaattaggtgggctttgcagatgatatagtaaacatttcctgtgcctttgccattagtttacatgcattgtcatctcgtttttgcatgcctaatttgattatatgaatatgatatttgaaaatttttcatagagttatacagagaaatatgttctactgcgcattttggtgcaaactattccacttatattttttattctaatgttcctggtgtaattttgatgatacacttaccatcctaggattaatatggtgatagattcttgttggggactgtccaaataaagatcttcccttatatatattgttatcaacaaagcatgaacattattaaaaagttttgttccatatattagtgattgcataaaggatgaggcttttagccaatcaacttactttccacaataatctgattttatcaattcgtcatgttgcgttcctgttagtcaatataacatgtactgtagctcagctcttgcagattgtttgtcatccttatttttagatttttgtacaattaaatatattaactgtatttagcatttttagctacagttttctagttttacatgcttagctgacgtatcagataccactatttagttgtaatacttcatgatgtgtcatccatcatgtaacatgtctaagatgtagcagccttgctgagttgatgtataataatttagcagcagcatgcaatgttggcagcgttaaatacttatgatgctatattgtctttggaatttactagcacctgacatgagtatgtatttgtgctgtcatgtttcgtcataatttgatagaagcaaatatattattctactttagtctgtagcaatgaccaaaaatggtgctataacagttgtttttctcaaatgtgccctctttttatttcaaagcattcacacttacatctgacaaattttccccatccacagatgattttcggttgttttgtggcgatcttggaaacgaagtgaacgatgatgttcttacaaaggcattttcaaaatatccatccttcaacatggctagggtgagtcacaccgtatatagcatggcaagcttttagattcttcattataatacctttttgctgcttcaagatgactgttaataatggacgtcttctgcttcaggttattagggacaaatggactggtaaaactaggggctatgcctttgttagttttgctaatgcgtcggatcttgctgcagcattgaaagagatgaatggtataagttcatgcccccattccctgtcaccatttgcctggattatcgtcgcactgcagatatgattaacacatctaacatcatgcaggtaaatatgttggaaacaggccaatcaaactacgcaagagcacatggaagaacagaatcgactacgaggcattacagaagccgaaggttggttcccattgttatcttgtaagacttcctctttctcttgcagaagtgttcatttaactgatttgttttatgcgtgcagactcaaccacagaagaagttcaaagcgcagaaaaaaagcattctacacaagtgaagtaaattcactctctagagagtgatccctagtgtcatgttgcacatgagtcctttgttgctcctgcaataaacgacgttaaagccttcagcgcccggcggtgcgcttgtcacgtttggcctagtgattgttctagggtagtatggctcgt

SEQ ID NO: 3233 - DNA, 14159 bp, Oryza sativa
atgaacataataacctaagtactgtactgtgatgtgtgtattattacatcactggagcaagtatacactagcaggttgtaaacaaactctaaaacgtgtgaaagagataagagagtagagagaaaaaaaatagagaggagattataggctttgtttagatccaaagtttagatccaaacttcagtccttttccatcacatcaacctgtcatatacacacaacttttcagtcacatcatcttcaatttcaattaaaatttaaactttgcgctgaactaaacataaacacagccatagtcgtaccaatgtgcgacttataatacactagtttaaatgctaggctcaggtcaggtactagtataaagatagtgatgcgatggagtagtactataaagaaaagtagggttgtcctcgccccaaaaataaatggtagagttaggtaaaaaaaataactcccactcccccaatatataagtatttttatcatagtgacaagtcatctattttcaactttaattattaatattaaaaaattaaaaaaaccaatcatgtaatattgatgttactaggtttattattaaactattataatatgtaactcttcttatttaatacatcttatttttatagatattattgttccaaatagtatttcgaacatcgtattaaagtttaaaaatatttatatttttaaaatggagggagtactactatccattagagccgcatgttttggacgcgcagcgcctcgtcttggcgcaggccatagcgcctccgcatgcggcgcatcgcggtatgccggtatgatgtcaatgatggcagctaccgtgcccgtgcgccagcgagcgtggcactggcacacacacatgacattggagctgcagatcttttggcgcgagcgcaacgtgcagccgtgcaccaagtctgagcttctagaatgagccttgtccttctctcgctgcatgattaaccttgtactataccattgccaaagctgcagtgatgatgaggtggcggttggtgtccacaagaccacaagttcagtgtggatcatgtgcacacaacgaatttaggaattgcataatcgttaaagctgaatctgaacaggtgaatgcgccttgatgcccagaccaaactttctgctgagtcaggcaacacacagggacagcgacagtagtagttttttttcccccaaacgacgtcgatgtgcatgtcctctctgatagtgccagctacagatatttgaaaataaacttatacagtaatcaatatcacatttcaaacgacgtccaatactgtattactcccttcgtttcttactataaatcgtttaacattttgaatataaaacaaatattatattaaatatatttaatgttaaatttaaaaaattaatttgtgttatacagtacatgttactattttttataaacttagttaaacttaaaaataattagtatatcagataagtcaaacgaattatcaaatgaaacaaaggagtactaaagaaaaatgtaacaaacctgaccttcctgcagattgacgagagctcagagaacccgcactggcgagcgatcgggtacagcccgccgaccgacgaaccgccggcggaggagcacaccgaggcgacgaagcggccactcgacgacggcgtggtcgagaccatcaacctcacggacgcgtccctcccgtcgtccctcgcggagaaaggcctcgcggtgaccgatgacgcggcgcgcaacgtgtgccgggtggagtgcgacgtcgccatcgtcggctccggctgcggcgggggcgtggcggccgcggtgctcgccggggccggccacaaggtggtggtcatcgagaagggcaactacttcacgtcgcgggactacacgtccttcgagggcccgtcgatcaaccagctctacgagtccggtgggttcgtcaccacgatgaacggcggcgggctgctcctggccggctccacggtcggcggcggctcggcggtgaactggtcggcctgcctcaagacgcccgagttcgtgcgcagggagtgggcggccgcgcacgggctcccgctgttcgccacccccgactacgccgccgccatggacaaggtgttcgagcggctcggcgtgacgtcggggtgtacggaggaagggctccagaacaaggtcctccgcaaggggtgcgagaagctgggctacaaggtcgacgcggtggcgaggaactcgtcggagggacactactgcggcagctgcggtttcggctgccgcaccggggacaagcgcggcacggacacgacgtggctggtcgacgcggtgggccgcggcgcggtgatcctgacggggtgcaaggcggagaagctggtgctggaacgcggcggggcgaggggcaggcggtgcgtcggcgtggtggccaggagcaccaacccggcgatcacgaagacgctggaggtgcgcgccaaggtgaccgtgtcggcggccggctcgctcctcacgcccgtgctgctgcagcggagcgggctcaccaacccgcacatcggcaagaacctccacctccacccgaccgccctggcgtggggctacttcccggacacgatgccggacctgaaggggaaggcgtacgagggcggcatcatcacgtcgatgcacaaggtggagacctccggcgccggcgcgccgcaccgtgccatcctcgagacgccgatgatggccgtggccgccacggggacgcagatgccctggctgtccgggcgagactcgaaggagcggatgctccggttcgcccggacggtgcacatcttctccctggtcagggaccgcgggtcggggacggtgcacggcgagcggcgtgtcgcgtaccgcctcgacgcggcggacagggaggacatccgcgacggcttgcggcgcgcgctgcgggtcctcgtcgcggcgggcgcggcggaggtgggcacgcaccggagcgacgggcagcggctgcggtgcgaggggctgaccgaggaggcgctggaggagttcctcgacggcgtcaccgtggtgcgcgggccgcagtcgaggagcgagacgtggggcctcttctgctcggcgcaccacatgggcagctgccggatgggcgccacggcgggcgacggcgccgtcgacgcccgcggcgagagctgggaggcggagcggctgtacgtgtgcgacggcagcgtgctgcccaccgcggtgggcgtcaaccccatgatcaccatacagtccgtagcgtattgccttgcaaatggcatcgccgactccctgtccgctaaaacgacttaattagctcctatcgtatcttctactacaaaattcatccattccagtccattccagaacatcacagcttgcaaattcgattagtacgttttagcgtatatgattgttacgaggaccagaataatgtgcatgattcttgtcgtgtgaagttatggattatctgtaattatctctataaaaaggaaaaaataaacaccgcaatgaaaatgcttcctgcatactttattcagtctagaattcgtcgctcttgcacatatcttttcattacattagagatgcacagtactcacaataagtactagttaaattgagcacagttggagaatagagtgaccgtcgacccaggatgtagagggacgtggaacgaacctgcgctgcactgcacatatgctatcagaaacaaattaaaccatgcgtgtgtgtttaaatgtgttgatggcgcacgggcattttcgaccgggagatatggcaatgctcttgactcagcatttcagaagaggcgtcaacgccagaacattcatgcatgaagcgacaggtgctgtgcaagcagcagttgagtgctccgtctttagccaccactttgcctacccggatggtattgccctccatattactgctgcatacgtctattgataggtgatgccattaatttttaatatatgtttaatcatttatcttatttaaaaatttcatataaatacgtaagacataaatattagtaagaaatttttagtgataaaacaactcataataaaataaatgatagttatatgttttttttaaataagatgaacgattaaatatatttaaaagtcaacagtgtcatcaattaaaaatgtgaagatgacactgctagtttggctcgtggtttcggctatactcaattgtcaactttgctttgtaaaagtttagtggtttcctcttttgtcacaggtgggacgtggatgggatgatactgcaccagtgtaacgatgttatgatagcattaatgtgcatttccaaagaaaaaaaagttggagtgaattaggagcttccgtttcgaaaattctcttcgtgacttcgcgacgaacttgtcatttaatgctgatatttgcacacgtaggtgcaatatttttcatcgaaataaaaaaaagcatcaaaataatcagtaattctatgtgtttaatctagcattgctgcagatgtgcagtattaggcaaaagaacacgacaggatgtgcattgcccttccataattccatttggtcagcatcatatcttctcagtagtttacatcaaaattcatgattattccttcatgattctaacagctattcccagtagtagtttacatcaaaattcatgattattcattcatgattctaacagctattcgtactagtttacatcaaaacagtgcaacacaaatgacatttcactacgagcgccgaatacaagttggtgatggcgaaagaatttagtactagccttcaagttacaatgaatctacaactgtactgtaggcaaatacatttgttagatgcctgggcctctacatcaactttagtcctagcttatccgagtcctctattgtcgaatgtcaactgcataattgaatgaagaagctcaagtaccaaattttagggaaatgcacacccaaaccgttcagataatcgatcaattttgttcacgatcaggcataataaaattacgcagaagcaaatttaagaaaaatgcacaccgcaaacagtccagataactgatcaattttgttcacgatcgcgagaggaaggcgtaataaatcaaagtatgccaaactacgggcacaagccacacaggtgctctgtgacatatgtaatacaaagtgactacaccttcagcttgatttccggcacaatgtagtgcacagttcagcatcaaaagaagggttagttggcatcatagcattagctagcgtccaataccatttcagtattagaacagaacaatatgatcataacacgtcatcataacctatagccaagatgttacagactttacaatcagttatcgcgcatatgcaaagtgtaaagccgtactctcttgctcaaggcaaaaacagataaactccactttaactttggcaaaaagaagtggttgctcagtttggtgccgacagaggtttattaacagtagaccaaaatgtttctaggggaaatcaagccaaaataattccacttcaaaaggatttggggttcccaacttcagacccctgaaatatgtcatgagcaccgctcatcttgtgccagcaaaaaataaacttgatgttggtatactacaaatagttaattatttgacagatgcttttacagctttctcagccgcatcatcaagatcctctgcagtgattaaggtcattccactttcctgcaacaggacatcacagtcaggtacgaaagtttccagtgaaggacgacttggcagatattcctacaaaaaaagaatgcatgcaagtaatttttacctttagaatcctcttcccttggtcaacattggtgccttccaaccgaacaacaacaggcaccttcaggtcaacctggcggtcaagagaatgattcaatacagtgcaggaaagttttatattgtacattaaccagcaagataatctaaattgtcccgcaaaaaacaaaaatataaaatcatcaatccaaggaaataactgtgtcattacattcccaagaaacagtaattgttaaaagaatatttctcaaacaaatacaagagaaaatgttgtggaacagacaagattccacaagaaattgtcatagggttaatctcaaatgttttatacttgatgcaataccagtagtactttcataaagaaaagaaattgttctgaaaaatttaatagaaaactatctcataagaaacttccacatttaatggaaaaggttaccatggaataagaaagattcaataggtatattgtaatttattaatttgaagcaagagggaaccacaataagctgctttagtcattaaatgaaaactacatacaaaatttgaagacaaacctgttttgctgcattcactattccacttgctatcacatcacatttcatgataccaccaaaaatgttcactagaatagccttcactctatcatcggaagtcaaaatcttaaatgcttccacaacctgaatacaagttatataaaaagtttataaatgaccaaactgggaagcataacatgcaaaaacaaaataacaatttagcatggattccaacaaacagattatcagttatatgaaaatcttttaggctgtgttcaggaggaggggttcggttgggaacccctcttccccggcacgcaaaacaaagctcatattattgcatgattaattaagtattaactattttttaaaaaaaatggattaatatgattttttttaaaacaactttcatatagaaagtttttgcataaatcacaccatttagcagtttgaaaagtgtgcgcgcggaaaacgagagaggtggattgggaaaatgggggggaagaacacagccttagtggcgcgattcacatgagatggtagttacaaaaagaattctcagcttattatacctgtccctctgatgcacttccaccaacatcaagaaaattggcaggcgtacccccatgcaacttaatgatgtccattgtagccattgccaatcctgcaccgttcaccatgcagccaatttctccatcaagcccaatgtagttcaagtcagctttggcagcagccacctgtaaaggtattagagataaactcataaatatcttcagtttccattctcagaacaacaaaagctgtaacatccctccagaggcaagtcaagccatcctccaaaagaaggggtaaatgaaaaaaaaaatacatagatagagataaaggaacacacagactacaagagaaagtgaataaaggaaatggcaagcagtaatatacctctctgggatcttcctgtgttgtgtcacgcatggcaaatatctctttctgcctaaaggcagcattgtcatcaaagttcaactttgcatcagcagcgaccagcttgttgtcagctgtctcagcaagaggattaatctacccacataacatgtccaaattagtcataaccagtgcagtggtaaagcgggccattccaaatgagataccatttgttattgattacctcgagcagtgtgcaatcagacttgcagaacagttcatagagcttcttaatctgttctatggaagactgtctgtcagctgtctttggtgccagaccatcaacaactttagctgcatcatcatctgtgattcccttgaatacatcaataggaacctggcaatccagagcattgcatttcaatgtatgatcgatttcattagaaacaattaaaaaaatgcagaagcacacaatgctgttgccaacagagggatattgattagaggcaatagatttaccttgatgatcatatcagggtacttctctgcaagatcttcaatactggttcctcccttgctgcacgctataatgagctgaaaatgagtgaaaatcagttagtctacagcaagaagtcaagaacccctatctgaaataggggaacatgcatattaactacctaatggtttaattctttaagtaattcaggcacaagcaaaaaaagaaaacaaaatgatagcaaaaaaggatttataaaaacaattatgatgcgtctaaattcagaagtgagcacaaaagtaatcctactcgaaggattgattacatcattcccatgtataatttataattataccaaaaccaatacaaaatatttttgagaaaaaaaacaatacaaaagtggaaaataattattggttcacagccttagaatgcttgacctttacaaagatgcttagtgacacagctactgcatgcaattatctgttactaattgtgaagcccattatccgttgactaaagatttatgtgaaccttcatcagctcatgcacactttgttagtttatggtattgaaaaaattaataaaataaacaagtacacatggttgcaaaacaacaacaaactgttattcttgtggaaaattgatccatattttagtacttaccactccttaacatagtctcataaattatcagaatctaggttacaagaaatactgaatctagatggaaaagtgtgcaataccaagcttccttaatttattcaaataatagaacaaaactcagtaaataaaaagagaaaaatgagcaatacaaaaaaattgcttgtgttcaaagacataccggaccagcagtattcctgtcaagggtgatggcgaagtacatctcattaacaagtgacagtttctcacataagtagacctgtcaaaacacaaatcaacgaatttagtacttgacaattttcagtgatttgagcagaaacatagagcattaaaaagtgtgactcttgctttgaaagataaggtagtgaaagacgcagaacttatggacagtcgcatgacaacctgtgtaagcctctttctacatgaaattgcatctaaatttgcattcaaaaaagtaataactacaagatccactatgattagactgaaaaaagaatcaagggaaacaatcattgccacagcatgcaccaaaaaaggcactccgtatagtgtaatggcttcttccaattattccatttatttctcatatggaagtacattaaacggcattggatttacaagttcaatactgttttgggcgaacacagtcatatgctaaagcttaaccttctacatatttgcaacaaaaaaaatatagtgataaaaagctttcttactaaagaatcaataatcaagcaaacacaacaacagtactttctaacaatgctggaaacaccaaatgaaactgtggtagcaaaacaaaatggcaagctgattgcagttcaaattggaatatagatgctgaagggggctacatattactaaaaactaaccttgctcacaatcttcccctgtggaccagtttgttttgttaccagaatctggccaagcatttttgctgcagaggagataacataaacacttaaaagtaggagtacatacacaaataacatgtatagtatacaacttaattgaatgactacgaagaaaagaattgaatgactatgaagaaaagagagcattgcatgtcacttaaaaggccattcacttcaaatcataaggcatcgaggcagtcaaactcagaaccaaaacaacaaataaccaaatcttaagttggtgagaaaggtaaggaactaattaatcaattgaaggaataaatcacctatcatatatggatttattcaaatctgaaggtagtatcaaggatgtcagacttcatacaataagattatctttacttgcatatttcattataacacatgtaattgccaaaaccaaataatagcaataaattgcattggaggttactgtgtagactgtgaagctagactagtgtgcatggaacagttatgtataaacttctaaatcagctgcccattatcatctgaagcaacaaacaactgaagcacatactgggagaaacttgtcaagctgctgttcaatatattcgtaagtctctgacattaactcgtacctgcgaggctttcagcttcctctgccttaacaatatgaacaccaccctgcagtccacttttgaatgttcccaatccacggccaccagccaggatttgactcttaacaactatctgcagttgtgtcatgttttgagtatggctgaattgaaccacaaaatgattcatgcaataatacatagatctaccctacaaagtaggctagggacaacaatcagctagatttgattttggagtaggccagcctaccatctactgactcatctttatagttttacggaataacaaacattttgaagcggaataccccaatactatcttgtgataagcaaaaggtttccccttaaccaagttaagggcttacaagccacattgactataaaccttggcaatattttcctagaagatatgattattttaaagagaccacatgtgggtgtataatctttgaaaaggagaaaaaaaaagtttatatgcagtcctatgactaaacagcattgaaaaattactcaaaacaccaataatagtgtcataccagagtagctaagactaattacaagtaatgttactttccaggcaccaacagtgatgtatttcacccattcgtattatatgaaactatatcccgtatactacagcaaccactaacctcccctctggagaaaaactggtcaggccatcagcagaaattgcagtaaactacattctctatatacatcctaataccatcaaataactgccacaaccaagtctcaaattggccgcacaagcaataaagaataaggaacggaaacatcacctctttctcactagggaagacgttcttcaaggtgtttttgacctccttcaccgatcccgccgccgcgcccctgggcacgttgatcccgtacttccccatcagctccgcgccctgcgatacccacacatccacgaaccctagcgcgttagcccaggcccctaaatcgaagactccaaaaaaaaacccgcaaaaatcgaacggaatatggtgcgggaatctgcgggatctggtggagggggttgcaagagcacctggtactcgtggatgttgaggcggcggagctgctggtgctgccatttcccggcgacggagagggcgcgcgaggccagcttcccgagcgatccgcgaaccatggctgcggcggcgtggggggctctctcctccgatccggaaaccctacaagcgtggagggatggcacgcgtggtctttcgctgttcctctctctctatatgcgggtttgatttttcactcggttttttctctcgtcttcttttcccttttctttcttgcgagagggtgcggcggcggcgtaggagaggaagagggaccagacgccggcgcgtttgactgacatgtaggatcacgacagtttcactgacatgtgggtcccagaactgtggggtccatatgtcattgtcagatgaatgtagggcgcggttgctcaggtatagaggcacttgtgcttcgagcctttgatacacttttcatgggcctaagcggcctaactggtatccctgctgtatgggctggacaggtccagataagctctaagatgaaatgttgttgggctggcctaaatctgtgatttacacacatttaggcagtggccagtttagcccacacagcccagtgcaggaaagtggcactgggaggcacatgcaatgcaagtaatcaaacacgccccaatttgtattcggggagtttaaaattttgagaaacaattagttggtagctaacttccaagaatatggagaaggtgggttttccaacttctagctcctagtttgttttctagattttacaactgtagcttctcagaatttaaacgaaaagctagattatttgagggagcttctgatgctgggataagctgcacctaccggaaactcccccaaataggtcccaagagtcctagaccaccgcggctttacatgttgtaagcacaggtcgttggtattctgatacatatcttattcgtagatatgccaacccaaaacgatggaaatcccatcatttatcttaattttcatagcatcacgaacagcataagagtttaatatgatctcactagattggtaggaccttacataagatctcgaccctacgattctacataagcatcttttaaatttcatgtgtgttgaaaataacgtgaataagcctactgagatttaaaaaaatactatctctgtttcatatcatatgtcgttttgatttttttcaaacttctttaagtttaaccaagtttctagaaaaatatagcaatattttgaacacaaaacaaatgtattatcaaaatatattaaatattggttttgatgagacttggtgttgtagacattgctgttttttataaacttaatcaaacttaaagaagctttaatagaaaaaaatatatcaaagtaacttataatatgaaatgcattgagtaccaattaaatttatcaaaattaatactagagacttcaaattttaaaacatgttacaaaatttatataaaaaatatgtaccttataaaaatctgatagatcccaagcctacaatattatttgaaatagaatgatccaacctaatattccgatcctaacaacctcgcaaacacatttgggatgtccggatgtagtcgtcttggtatgtttgcggtagctgatagctaaatgataacttggatgtaccgtgtactccttacgcggttacgccccaaaataaaccaacttcttctcctaaaataaagcaactatactttcttagaagtacctactattggttcataactatataaattctattccttcaatacctctcacctatccatccagtaatataacttctctattaattagaggcatttaagtctattgtattgctccttaaatatatcttgaaaagatgggatttgaattttttggaccaaaggagtttttgagatttgtttccgtactttcatttacattgaaaaacacatggaagaaaaaacgtggaaatttactcaagaaaccgtacaacttttgttccttttgctcagcaaagaaactgctgtaattaggatgaatacacccaagccagtatacctgtttggcaattggaactcggcaaatgcatggtagttcagactagcaccaatcaaattattctagagttggcatggccacgattgcaagctatcttcgcaagaaagaaaacgaaaatgttcgtgtcaaaagtgaggtttaacttaattggttttttattgtagaacctgcgatagatttaagttctaaatttagtatgagtgctcatatttacgactaattatttttcagtgatacaaggtatacccatcgacaacgagtcgctcataataatttcgtcaatttcaaaatatactggaacagtttctcatagatgcccctaaagataagatgtgtgtatttataaagatgtgtgcgagcccccttatctgtaccctattttttagaaaaaatgttagtgaaaaaaaaaacaaaatgtttactcataccatttgccaccttggcgggtaaacgattgtccatatgtttcccaagtcccgccacgtagcacggcccacaaaaaggcccaaatccgaaccacaataaacccaggtcaatgaccattataccctcgcacctaagccagaactacatacctatctttacacggctgcctcactacatcccctcacgatggcaataccgaagtttcaaccaaatccgatggctaaccctagcaaacccgtgcataaatacaccacccaagccgctcctccccgcccgcctcttcatttcccctcctccctcccctttgccccgccctctcgtccggccgtttcgtggccgtttccgtgggtcccatccacttgtcctcccgtgcaatttacgaaattgcccctatcatcttcgggtggtccccacactccacgactttctcttgccccctcccttttctccctccctttgtttattccccaatcgctatcgccgagcgattccgtctcgtctcgtctcgtctcgccgctgctctgctggcgtggcggcacgggggccgtcgagatgtcgatctgcgcgagggcggagccgccacgtggcggcgggacgctcggcaagcggaaggagcgggaccgcccgtcgtcggaggagcagcgggcgccgccaccgccgccgccgcctctgttcccggcgatgtccgctaggccccagccgcccaggccggctcaccccgctcggttcgtcaagcccatgccaccgccgccgccgccattccc

SEQ ID NO: 3234 - DNA, 1253 bp, Oryza sativa
ctacaactcggcctacgcgcttaacaagcttgcttttgcttagtacctgtagcgagagtgaagcctcggccggcgatggtgcaggtggcggagctgatgacgaggatgtgcctccgggaggcgctggcgctggtgcgggcggtgctgtggctgctggggacgcggctggggacgctggcgctgtgcggggggcggtgcgtgtcgtgggggaggtggccgttcgtgctcacgttcgcggagatgccggtggagcggcgggaggaggcgctcgggcggtggagcagggtgaccgtgctcccgccgctgcgcgccttcttcctcgtcgtcaaggtcttctgcctctacgtcttctactcctgggtaaccactcctcctcctcctcctctcatggcctctcgtacaccgctgatcgatcagctgcgagttcattcacgttagatttttttttctcgcgttttgcccgcgccacgcacgtgcgcgcggtgatttttctctcgacggatgcacgtacgtacgcccgtgagggacggactaagcgttgtggggactgtttatgtatttgtcaggtgatttctaaaaaaaaaatcacctagattttttttacccttagatttacatgcaacgaactacaaaagaatataacaaatacatatttaattacacattatttttatctaaattacagtgcacttacatgttatatcaacctaatttataaaatataaatttagttatataggactgtaattttatattttaaagaaaatacaaatatatatcgattttgctatatatttgtcgacaaatttttccccaaaaatttgacagatgtaattacagtacaatcgtagtgtaattacgctgtaactatagtgtaacttgtatgtaactttcaaaaatctctccgtaacatgttatttcggtaaaatgggggtcgtgggaacaaatcctttcacatatgtgtgtgatatgatttgttttcttcctcaccaaaacaaatcttgtaatagatctaacgattcaaaattatgtgaaacttacatataagttacactgtagttacatgtaagttacagtgtaattacatataagttacagtgtaattacactacgattgtactgtaattacatctgtcaattttttgggaaaaaatttgtcgacaaatgtatattttacatgtaagtggttgtatggaggccaaaaaaagtgtcaaatgacagcaaaaaaaatcacacgagagatgatagcaaaa

SEQ ID NO: 3235 - DNA, 12921 bp, Oryza sativa
gttccaagttggatcagcaatatgtgtaatggtcttagagccagaattagtactactgtttaatggaacctatttcatatttaaattgagcatggttgtgctttagagattttgtatgactgatggctgttaaatagtttccaacatatgatcactggtgatttgtgtggactctactcgttaccagttgagattgccgtgttttgctcgtgcagcatattgcagtcttgagtcgctgcaccgggttattgaatgttacaccacctactgagactggaatattcacttgctcagtcgtgccgaatggcagacgctatctgtttcaatttttcaaatggtaggcgtgcttctacattgaagaatggaaaatcgttccatttcctgagttagatggaaaatccttccattttctgagttagcaattttttctctcattttcagtagttggaaaattaaaacagcaatatacccagtctggactggtaggataaaatttaatgttttgttcatttgggtctgaatttgattgtatgtcatagttgtataatttggtttataaatggatggactgcatgtaattatgttttgagacattttaaaaagagactgtctacgaaaccaagtaatttatgtttgagacattttaaaaagagactgtctacaaaacaaaaaaatctcacctcatccatgcgaattctatctagatcatctttgagccgccttcaacaacacctaacccgtgttgctgactagaaacccaattctatccatctctaagttcagtcactatacaaccatttcgcacactaactctcatcggatccaataagaaggagccgcctgatctagctcttcatcggatcggcttctgcctcccaagtccgatgacacaatagcgtgtatgatgacggggaaggaaaaaagacaaggaaaaaagacatctggttgtgcatataaaggcggagaggaggaacgatggtggctcatggataaagtggcatgtggaccatcagtcatcataaagaaatagttagttttaaagtagtaaaaaaattgagataaaggtagagtaagtatggatgaaaacactttggaaacggacgaaaaccacttatcgtttccgtttccatattcttttcaaaattggaatggaatcagaaacacggatacataaacaaaatcgaatattatcgaatacggtaacacttatttatcggaatataaaaaccccttaagccgaacttctaaaatcaatgaagagatgtagctcgatatcttttctgaaacaataaatcaatatttttagtttttatcattaataatacaagtagtcgtacactttattttcttggagaaagagaactatattcatctataactgcaattgttattactatggcacatagtataaatataaatatttagagtagaaaagtctggagctaataaattgcacatgtgaaacacttcgtttccgattccgagaaaaaaatatgaatccgtttcctgaaattttccaaattcgttttcgacggatagtagcattatcatatccgtttctgttttccgagaaaaatatctgaattcatttcctgaaattttccaaattcgtttttgacggatagtttcaggaaacatatatcctaaacggatagtttgggatatatgtttccaaattcgttttcgacggatatgtttttaggaaacatatatgaaattttctgtttccaaattttccaaacatatatgtttctgtctccgagaaaaaaattcgaattcgtttcagtttcttagatccaggagttggcaaatactacctctgtcccataaaaatcgaaattctagttaatttagaacatattaggctttgttcgttgctaccaagtttctgtacgaaagttgcttaaaaaaatcatattgatccaactttgaaaaaaataagctaatacttacttaatcacgcactaatagaccgctccgttttccgtgcgcggaagatttgttcccgaccactcaaaccgaactcagccttagagcatgtacaatagagccctaacgctggcgataatggttccacgttagctcgcgtgatgcgctggaggaaagaaggaaggtgagtgggcgactatttagtcgccgagctgctcacgaactctaagaagttgggcccacagatacaacacgaggggaagctggtccacgcaacgcgaggaagagagataaataaataaacatagatggttccgttaattaaaataaatatataatgtgtcagcaacttattattagagcacaactattgtatcatgtgtctcttaaattatactatatgatgatgatgtggaagaattggagctaagagcgggctgtactattaaacttgctcttaggaggatagacaaatgaccagaataatcttatttaatgaacccatatatgtatatatttcatagtataaaattgattagaatgaattttgagacaattaacccacataattagaaatacttttttttagtaaatttcacaaaactacacgttttgtagtccaagttgcagaaaaccacacacacttttgacacttggcacttaagtatatatatttttgtagtgtcgtttcacaaaaccacactatcaatgaatggattcacccgtgagatgatgtgactgtttcatctaggacgaggacatatcatcctattaccagccatcgcacgaaattaatagggtgccacatcctcatcctagatggaacgaccacgtcatctcaaaaggtgaatccatacatcgacagtgtagttttgtgaaactaaactactaaaatatatatatacttaagtgccaagtgtcaatatttgtggttttctgtaacttgaaccataaaacatgtagttttgtgaaatttacttttttttttttttttgataaaacctcatagctagaaatctcctgtaacacgggtatcttcccttcgctccgttggcgtaaaataaagaggaatctcgcgtctcgtcgtctcctccgctccttgcgccaagacgagtagcggctgaacacaacaggcgaggggcggcggtctccatctggcgagcagagcaggggatgggaggggatcctggtgagcatccacatcctctttctgattcatctctcaatcccaccgggactacttttgtctggaattcgcttgcgtttgttaaccctagcttctcttctagatctggaagaagcccttctcttaatttcagagccttaaccttaatacaagtagcagtttgtttgttccccccaaaagtttcccaagttggatccgcccctggttgttaacatagtagcaaatacaatatgaacaatgagagtcgaccaaagtggagaaaagttgcctatgggggaaggcagccaggctatgacgataaccacacggacgagtcattccttgaggagatggttatgaacgccaatgttgtcaagagggacctcctgaaagtgatgatcgactcggtctccatatctcagtatctctgcattgttgctcttgtggtttcaacatggacctatacactgaacttggtcattgatgaggtcactcttttgaagctagacactagtctacttcttgccgggttttcgatgctcttgctcacggcaagtccgttctcgctcaagcttctctccaagtatgtcctcaatacatcattcttcatcagtggtctgtatgttttggcaccgatttatcaaaccctcactaggtccatcagttcagattccatatgggcacttgctgtatgccttctgttggttcacctctttctgcatgattattctggttcaactataaggccacctggtgcactcaacaacccaaaattgaccagcaatatctccttgaatgcatcgatagtagcatccgtccttgtagcttcgcgcctgccatctaggctgcatgtctttgcaatcatgctattctccttgcagatcttcctgtttgtgcccctcgtcgcgttttgtattaagaagttctctcttagacttcatctgctcttctcctttgctctgatgatcatgaccctaggcgtcacataccaattgcatcacatgttcttcatcctactgctggcactgcttgtttttatctcaattgtttgcccttactggcttataagaattcaggaatacaagtttgagatcaatggtccctgggatgaagctaaactctgctttgatataactgaataacagaggaaagtgcatgtgcagaattttggtttcaatgttcattatctataattgatgtattaccattagtcttattattctggagcaatttatgtgcatgtatatgcttttcttaacatatactaccttcgtcagaaaataagttactctattacgggacgtgacatatcttagaactacgaatctagacatgtctttgtccaaaatcgtagtactaggatatgccacatctcgtactaaattaacttattatgagacggagggagtgtctacttgttcccttactgtgatcaatatacatggcgggccttatctgttctgccatatattgataagctttctgagcgcattcagtggtttaaactttggtgtacaaaataattaggtacaaacatcgtcacatgtaatctttaatcgagtcaagagagaactgctcagcccagtcacatggatttcttgcaataaggtgcaagtgcagattaaccctaacatattggtacttgttcttgtgttgcctccagtttcgttggcagtgctgctcactgctctgtattctgttccgattatatactgccggagttttttttttaagatataaaagaacgttccatcttttgcgcgttcgcgaaaaaaaaaaagaatgttccatcaaccacgaagccctaacacaacttcagcaacatcagctgggggcattacctagcaaaaaatgatcaggacccatgtacaacttcattcctgtacatgtagttgtgcctggttgtaacagcctttttttatcttaatacaaagatatgcattttgcatatttcaaaaaaaaacaaacaaacaaacgcattcctagctgaggtaagtgcatagtactttattacaggttattgagaaatattcaacagacacaacagctctgaacccaaccgtagtagttcaccactggcaatagcctcagattcacaaatgttcttggaacaaagaagattcagttcactcaaatttgcctactgctagagcatatttgagttaaatcagttgtcaaaaagtgaaacaaatattttgatagttagaaaagtaactgctagttgaataacgatatctgatcgtatgatatattaataacgattacatgatctccaagtttttaaggaaataatgtgacggagtatctaaagggcactaaggcaaaaaaggatattgattatcttaagagtatagtggcagagtggcagaagttctagttgcagtgcacaaaggaaatactacgtgatagtacatattttgctagtaatgaactgctttatttcaataacatttctacaaatatttgatcaacatcagcattaattggaccagcacagttgctggtccgggttcttctgaatggcgtgtaaaatgatttctttaaccatttcttttgcgccaagattcagtaagcaaacttcactcttaagcatatctcagcatcatctgtagcacagaatggtttttacttgttgatcagtaatcatcgtgtgaaggaatccccagtgtcctcactggagcagcaactcacatcttttgctcttcgaagcattatttccttctgtcagcactgattgaaaggcgttcaaaggtcctcaaagtgggatcatcatggacatttcttgcagttttggtaagcgaggacctggtctcaagtcctgttgactggtgaagcctctgcatagttgatgggcgactgctgccactgctggttggaattaggttactgcggttcggatcaatgggatctccagaacttggtctgctgcttgacaagagagccttccttgatgtgctcccattacgagatgatgatgtgggccttcttttatctaaatcaacagcctagcacgcatggtaaaattgacataagccttccagaatacagagttccagctatcatcaacagcaacgtaatgtaaaaacacaacaaaagatttctgcgaaaagatggtcaagactaacgaagaaacatccgtctcattatcctgctaatttgagcagtttttttaggatactgctagaaggtgatctagctgctcaatttcttaccgtcttgggtgcaagtaatgaatccaatatatttctgtgctttgtgtgctctccgtaatggccagaaccagagccagttcttctagcaaatggatcgactgtaccagagaatctgtcaggaacatcctgtcttgctgttgagacaacaccccaaaaaacccctgttattttccaaacttatttcctaaatataaattcaaaaaatgtctatgctactgacaaacctgcagctcgttcagtccgttctgcagatggtcccaccaacccacttgtccttccacttgactggaagcaaggaaaagatgctacacatttagtacggtaaagctttgcattaccaaaaaaagttagaaaaaggaatagcagacatactcgcaatctgttactttctgaaccttgcttcgtccaatcaaatatataatcaagctggtaccctgcaagaattgagaggaaatcattttagatgtgtatgcagagatacttcattgtattatatttgagcataccttcacggatgaatagatctcggaaaagtctcttcaaatagctgtagtctggtttatcttcaaatcgcaaagatcgacagtaatggaagtatgaaatgaactctgtgggataagatttacagagaacctatacaaaattgtgtaaaatatgataaggttaagttgcaattaaatcaaaaaatgtcatgcttcttcatagattttttttgcatggaaaccaatttccattacctcaactgggagtaacattttcttttcactaatttggccatatttctggtttttttgtgccagcttttagaccttgccaaggaagctgaaatggacaagttaacatagatcaataaaatgtattgtcgtataaaatggaattttaaaaaatagaaaacaagcatcgtctcaccttcctcttaagaaatacataagcacatagcccagagactctaaatcatctctcctgctttgttctgtagtgaaaaacagaattaaaagaacgcatatactagcagtcagagtgcaattgactaattttgttgcaagctaaactttatttgtttcaaaggagctacacttgttcataacttttcagtgttgccacattttgcacctcttaaatacatattagtttgcgttagttcagatttttaaaaaataaaatctcttctgatgaaaacgaatcagtaacaggtaaagacacttacctactccaagatgggtgtttacactagcatagcgtgctgttcctgtgagatttttgttctccctatggtaggaaagaaaaacatgtaagcttcaaacatatatccccagaaaagtatgaagcataatcatgcatagaaatataatggtagataaactggtaaactttttactattagtatgaaggaggtaactgctaagtagtgaatagtgatagtgtaacccgtgttactgaccaatgtcacagtatagtactaaaacataacagaaaatggtttatcaattatcacaatcatcattgatcaaattgttgcaatgctgctgtcattactcactactatcaagcatttctcttaatttcaagaagtaaaaacagataacaaaattgtgtgggcttatctatatagttaatagcagatactgcttgccaatatggttaatagcagatactgctccaccggtagtgtgccaagcacagttatggtaatgaaaaattctaaattaagcactttgagctctgtcagataaaaacggtgttgctaccaaaacaatatactttagtatgatttttcataagctgagtgctctactacaacaatcttccaggtgtaaacataaatactttctaaaacatttactagagaagaatttctaattacctgtaaggtatatgcttatgagtttggaggtcccggtatttctttgcaagaccatagtcgatgacataaacctgttacagaattgtaaagatcactcacaacaatgtctacaaaaagttgtgcttatttcttgatgttattcattgtaagatatatcacatatgaagtaaatgcaggctttcgatcatcagttagcagcagtactagaaaggcagttgatatgcatatgctgagtaacagtatgcacaaataagagaaaacagaaatattatccttgtattcttcaagttcttacgaaataataaaacgtatggtaaatcgatgatcacagtcagcagtttaaattctccaaagtctttctacattcataaaaaagatgtttctaaaaaatactaaaatttattatacaagataatttctccataaagaaactagtataatcatcaagcacacagagcacagctgacagctgttgttggtaatatcatagcctctcttagaaagtataattgaagatactactgccaattgacaaaacttcatagcaccaaaaaagatgatacttagaaaccaggccaaatactcgaatcaagatgttatcaatacaaaattatacagaccaggcaaccaacaacatccaaagcgcagaaaaataatgaattatatctaccagcaactgcagatgaatgggacaaacctggcttgctttgcggcctaaacccataaggaagttgtctggcttgatatcacgatgtagaaaccccctagtgtgcatgtactctaccctgttgatctgtatagaacaggaagttagtggttaaatcagacaaataaagtcttgaaatttactttccttgatcgttaattaattgaaatttagtcatacaggtaaccaaaattaacagccaaaataatagaattcagtaagaaaaacccaccatctgatcagcaagcataagtactgttttaacagaaaactttctgttgcagtagttgaataagtcctctaaacttggaccaagaagatcgataaccatgacattgtactccccctccactccaaaccacttcagatgaggaattccagctgaacataaccaagacataataagtgaacaattttatttaaatagataaacagtttcccgtattacacttacttcccccctgcagaagcatgtatagttttgactcataatgaagctgaggatgccttgattttacagattcctaacaaaataagagatgacagaaaaggtttaggtaatttgtcccagtgtcagcaaggacaagtaatcagtgctgacagtgactattcatgtcaatatagaaatacactttccaagtttccgaacaccttattttcattattaccaacattttctcatagaacaaggattgcaccatttaagaaagcaatccaatgcatacaggcttacaatatagaaatggcattcatgattagaaaggcaaagctggttcacaaaactagcaactacgtgaacttacaaggtaagttgcttgaaaagtagatgtgaccaaactactaacaatcatatcgaaataatagaagcttctaaaagaagtgcattgaccactgaaccggagcaataatatcaggagaatccttgaatgctgctttgaaacattgaaatagacaataaccaatgcttcacagctacccaacctagccaaaacatgcacaaggtattccaaaaggcttcgtttccccagacggaaaagctttgtttgcaggtcttacaggatgtgaacagaatcacgggcggctgccctgagtcctaatgttacaagagcagataatatagtatgacaagggttggtgggctgcctcatgttatttacagatgtttcagaataagtgctctcgtaaaccacacacatcacctagatgaagcaattaaataatgtcaacgatccaattggaagctgaaaaatcttcacctcttttttcttacttcccaattctgaacatctctaatagaccagttaggtcggagaaccaaaaaaatttagaagacctggtttctacttgtatgaaagagtatgatactaagcaagaggtcatgtcaacgatttcacaaggacgtatacatgtagcttcattcaaatttctgatcatgcagcaatgcaaactctgttacacctcaggtgatctaatcttttctaggagggcagaacaaaccatattcgcatcacaacatcagcacaaaagaaaccaatgcaatactaattactacaatatatacattggcgtaagaaaaggcttatatatcagaaacgaaatcatcttcacataccaacttgatggctacctcctcgctgctctgtatattcacacctgtaatcgaaacaatccatgaatcaacgacatcatcacaaacagcgtaaacagtaagaagaagaaaaacgaacggtgcctcgcaacgagcggcgatagacgagagatccgagaaccccacgaggaacgtaccaaggtatagctccccaaaagatccgctcccaatcttcctccccagcttaaacttccccccgatcacatgctccatccccgcaagattcagcaccgaatgcgcgcgcgaatcgcctcaccccccacaagaaccccagtcacattgcccggcggccgcaagatttgcgtcccgggaacacccaagaaaaggaagatcccggatctctccccccgactccagcccaagattcgccgccctgagacggcgcgggcagatcgaattggcggcgccgcgagattcaggacgaggctagggatcgcctccctctctgtgggggggagaaatttctcggcaggaatcgtgggggggcgggttaatagatggcgatggacgaaggaagcggaaaatgtgggaaacggacgtgaggcaacggatagataggggtagggcggtggattttcttccttcctttattactactgctagaaggaggaggcgggtggcgatggcggcggcggcggcggcggcggcggcggggggagcgtgggaggaggcggccggtggccggagtagaggtgggaggaggaggatgtggagattatgggtaccccatacccacacggcatggtatccgactagttataggggataacttatatatataaaatatgtaacagatcatgacttgggtattacgtttccctgtatattatgaaacggcctaaagtcctggtttgataagattgtaaagtagatttaggaaaccgataccgtattggttaaggtttctatcttgtaatcctgccccccgtcctatataaggagggcagggagcccctctaggggcatgagacaactagatcgtcagatcaatacacacccggcggattcaaatccccaaacaggagtagggtattacctctcattgagagggcctgaacctgtctaaatcctttgtctccacatccatccacttttaggtctcgtgcgctaccccattttattattgccgaattcatgtttcgacagttggcgcgccaggtaggggtgcgtcgagtttcccattgacaagtgcgatggaaactaaccttcagcattgccggattcgtcgtcgctttacaaccaatctcctgcttcggtttcttcgtcgacgacttcggaaagctctcgatttctcacttggacctaatcaagtcgggaaggttcaagactaccttgatctcgtccggccgccgctatgtttatcagtttcattgaagaaggtggccgcaccgcagtcatcatctgttttaatctattcagggatgcgtatcaattctcagccgccggcatctgtggcgccggcatcttgttggtatcgtatctcccgacgagatccaattattaatccaaatccgagtcaacttgtcctcgcagccaatcgattggagcaatcatcatgggccagcgtcattagcaattgcatgtaacaagcacataagccaatccggtactttctgtgtgcatgggaaaccagccgaccaatcagaggaagccgtcggcctaaatacagctatgcatgcacatcgatcaatactgctctgcccagaaagattactctacaatttagcgtcaagcgtatacagagcaaaatcatcatcaccaagaccatgaaggcaatggttgaatttcccaagtcaccaagattcatcttgtatttcaaggcagggactatatctacgcacatgcatctcgcatcaagattaccaagtatcgctcgctgcctctgccgccactgactggtgtcctcgcctatacggttggttggtcacaccaccgttcatgggcgtccatgcctccgcctacacggctggcctattatgccgccgctgttgggcgtctacgacttcaccgccggcctgcctccgtcgccgccgactggtgcctccgcctacacggctagcctattatgccgccgctgttgggcatctacgacttcaccgccggcctgcctccgttgccgccgagtggtgccaccgcctacacggctggcctattatgccgccgctgttgggcgtctacgacttcaccgccggcctgcctccgtcgccgccgactggtgcctccgcctacacggctggcccattatgccgccgctgttgggcatctacgacttcaccaccggcctacctccgtcgccgccgagtggtgcctccgcctacacggctggcctattatgccgccgctgttgggcgtctacgacttcaccgccggcctgcctccgtcgccgccgagtggtgt

SEQ ID NO: 3236 - DNA, 4968 bp, Oryza sativa
gaggcgtacgtgcaaccgaattggtctagttaatcatattcagtagcacatcatgcgtgtttcaagaattgcgtctatatcacctatgaacgctccatccgtgcattgatggacttaactaaaagatggagaaaatatgtgttaacacgtcacatggattgatcttctccagtgttgaaactgccagtgccatgttgccgaccgaaaaattgattccgaacgtggagagtttatcattgacttgttcacaaatgtttccgcaacaaatggcttattttgacgcgaatcggtagcatcagaacgtttgggcttcgcactccagcaaggcccagagagtggacagtttccagtgcaagtcgagttaaggcctcagcaaataccaaatctgatggataccccagatgaacaattctcagggcatataagtacgtaacatgttaacttcctctagcacgggaatgcttttcaacagttgacctttttgcataaagcaacacatacattgtgtatagctgcccatgggcttgcccaatcgttctgagctcacgacattcattattgccctatagttttccaaagataggtggaaaacagcataccctcggcagcactaaatttcattagacaggtaagacaggtttattctgtgggtaattgttgcataggaatgcattaagaagccttcagatcatcaagtccaacactggcctgcaagaatagtatgatggaagacatcacattagaatcagacaattacagactaaaggactaagccttcaaaatgtgagaggccataccagaaaatcatgattctctttgagaaaagggtaaaaggtcgtgcagaatttctcgatatcagcttttatgtcacccgttccactaatgacctccataaatttctctctattaggagcaagcttcattgccacctgccaatttctcatatgagcactcatacaaacggaggaaaagcaaataaaggaagcaaacatgaccaaattaaagaacttctcacagaaaggcaaagcccttctctcacccaattatgaactgaagtgctcttgtacgtattcactaaaagagcatatatgactgaaaacagttgggttataatgattctccactgtattcgagaaagaaaaataatgattttccactagttctaaagattgctaaaacagaaaaattgtctttttagtgaagttcttgagaaggaaccacccttgcattagtttatttaggcgtaaacattctaatttcactaaaataataatgttgaagagattatagtaacaccatgtatatgctgattatgcgggtcaacatagagagaacgactcaactgtaaaactagaactggcaagccaaccatgccatttcttcagagttttggtatatgaatcagtacaagcttgactcatagtccagtcttgatgctcaagcaggttacggaataattcaacaaggaagtccatagccctgaaagtaaaattttgagttaataaggctgcttaagctgcaactgaaaggtgataaattatccaagaaggtttgaagcacctcgtgagccacagaagtccatttgtgcagcttgacgaaccttttgcagtcttgttttgaacctcttcctgaaccatgctgtacaattgctcatattttgatgggtctgaagaatatttattttccagcctctgaagaatgaattagatcagttgttagcaaaacaaactagaaatctgtgggctccaaaagggatatggacacttctaagtaagcaaatcattctaaagtaaatatgatttatgcatctatcacatagataacactagaaatttactaatgaaaatgaggaatgaaacacaatgtattattaacagtgtcatgcagaaaaaggatgcttaccgtgatattaccaccaatgtcactcttcacaagtgccatagcagctccaaatttatctggaatacaaagtcagagaacaaaggagacaaaggaacacttagccacaatagttagagtatgccctgacttaaaactaacaaacgatttaattgaagtactaacacaaccacacaaatgtatgtcaaaacttatattgtttagaaatgtgtatatagcaacaactaagttctaaacccccaaaaaaaactttactgaactcctacattaaatatcatatggtgttaccctcagaaggtcactgaccaattctaccgaggtgatggattggtccaatcaactatttgtagcagcattacaggtaaatcaaatgccaaatgcccacaaaccaacataactatttggtgattttgataggcaaaatccaacaacagtatagaccactgccaattgccaaaagcttgtctcaacttagaaaaccatttactgctccaccgcagtactgaactaaacatagtaaatacaaattaaaaaaggaaccaagctactgatctgaatatggaaatcaaagacagttacccaaaacaggcaagatttgcttgcagacatcaagaaagggcttggtgagtatgacactgctctctgacttaacatgcttcataccctccaacgagggagtgaacactgtctcggccatctctctagctgcaatagaaaacaatgaatgcgtcaacatatcggccgtagcaaacaaaaatccacactaattcactaaagagacactgatcccacaacagtttctaatcactatgacccgtggcaatgaattccccaatcagcaactgctttcagttgcaggatcagttgtgctaactgctaagtacctgtaccaaaacacagatcagggacatcaacaacaagcaattagcccgtgctatccactacgcatcacaccaaacaaactaaccgagcaacaagatttcttctagactttctaccactcagcagaaacaactcgaccctggatcagatcagagccaccaggccacccccgaaccgctaatccaagaagtggaaagcactttctactaatcttccgagcttagatcccaggacccaagaaacacccactgatcacgaaatccacacactggccacatccaaaccggtgaccaagaagccaatatttttcccccttacctcgcgctacctgtcggcggcgtggagacctcagcagagacccggtcgatcggaggagaggggtgatccaaaaggcgccggctttcacccgaggtggagtgcgatggcgagcagtagaagatgccgaggcgaggcgaggccagcgactccgtacagatttattattattaccgcggaatcttactgtgcaccgatccttgtggcgaggccgtaacacaagtcctgatctgagtagctcggaaatgggccggcccattacgcgttgaaagggcccaaacagggaggcccagtaaggtcccccgcagaataaacgctctgacggtctgaccctagatcggacggctggatggcctcgggtggcgatccaccggctcagggaaacccgcgcgctgcctttataggccactcccaccaccgccgccgccgaaccctagttcctctttgcctttccgcttctccgcgccccccccccccgccgcttctcccgaccgccgccgcgagaatggtaggtggatcgccgtgggctcgtcgtcttgccgccgttgccgttccggtggtggtggtggtggtggtgctttggattgcgcgcgtgtgtttgaccggggtttttttgtgcctttcgtgcagccgttcaagaggttcgtggagatcgggcgggtggccctggtgaactacggcaaggactacggccgcctcgtcgtcatcgttgatgtcgtcgaccagaaccgggtaagcatcgtcttctctcgtacgccttgaactgtttccatttgtacccgctttataatttggatctatagaaattatactagtactagctggtgtgataaactcttgctgctattgtaatttgtttctagtgagaaatgtaagaattgttaacgtagtagaatataatggaacgccaaaaatgaatcctttgagagtagcaagtctcttctgtttccgcacagccttaaatggaagaatattctgcatttgctgtggtgtactccctccgtactcgtaaaggaagtcgtttaggacaatgtttaagtcaaacctcgggaatataaatcatgaataactctcaagttgttgagtttgaagatgtaaaaattatatgaatagatttgtcttgaaaaatattttcataaaagtatacatatatcacttttcaataaatatttttatagaaacaagtagtcaaagttgtgttttggagaccgtgtcgctgtcctaaatgacttcctttacgagtacggagggagtacttgatctgaaaaaatgtgcgtcaagtctagaagtttatcagcattagctcggactacttggcaatttacaataatgaactatttattgacaatgaggttttggtttacctatgattgatagtgttgatggtgcctccattggcggatgcattagtgccactattatgttatcgctgctcatttttctaatcggagttaattatattgtagtgctttgattattggatatcacataactctgttttctgtgaatcaccaggcacttgtggatgctcctgacatggtcaggtgccagatcaacttcaagaggctttccctgactgacatcaagattgacatcaaacgtgtcccgaagaagacaactttgattaaggctatgaaggaggctggttagtatgaatgttgtgctaccaatcctatcagcagttatttatttctgtccatgtctaatctgagtggtggttattctatttaagatgttaagaacaagtgggagaatagctcatggggcaagaagctaattgtcagaagaggagagcgtcactcaatgcctttgacaggttcaaggttatgttggccaagatcaaggcagacatcctattctcaattggtttac

SEQ ID NO: 3237 - DNA, 693 bp, Oryza sativa
agcgtgcaggcggaaacaccagtcggcggcgatggaggcaggccggtggtggagtcgtagacgcccaacaacgacggcataataggccagccgtgcagacggagacaccagtcggcggcggcgcaggcaagccggtcggtgaagacgtagacgcccatcaacggtggcataataggccagcgtgcaggcggaaacaccagtcggcggcggacgaggcggccggtcggtgaagacgtagacgcccaacaacggtggcataataggccagcgtgcaggcggaaacactagtcggcggcggacaaggcggccagtcggtgaagaggtagacgcccaacaacagcggcataataggccagccgtgcagacggagataccagtcggcggcggcgaaggcaagccggtcggtgaagacgtagacgcccatcaacggtggcataataggccagcgtgcaggcggaaacaccagtcggcggcgatggaggcaggccggtggtggagtcgtagacgcccaacaacgacggcataataggccagccatgcagacggagataccagtcggcggcggcgaaggcaagccggtcggtgaagaggtagacgcccaacaacagcggcataataggccagccgtgtaggcggtgacaccagtcggcggcggcgaaagcaaaccggcggtgaaaatgtagacgcctgaca

SEQ ID NO: 3238 - DNA, 644 bp, Oryza sativa
agcctcggcacggcggcgagcgaggccgggatggcgccggtgaagccgttccgcgacagggacaccttcttgagccagcccatcccggcgaacgcgtcggcggggatctcgccggagaacttgttcccggacaggaagatggcgcggagcccgccgaggcccttcacgtcgggcatggcgccggcgaactcgttgtccatgaagctgagcgtgcggaggccggtgaggctcttgagcggggcgaggtcgagctcgccggacaggccctccttctccagctgcaggccgagcacgctgcccttgctgcacaccacgccggcccacgccgaggtgccgccatcgcaggggctcgtgccggcggcccaggtgtccagcgcgccgccgccgtccacgatgccggccttgagcttgagcagcgcgtcggcttcctccgccggcgccgccgccaggaggcgcgcggcgtcggcgaggaggcagaggcaggaggagacggctagcacgcgcaggaggcacggcgctccggccatgtccagcccgccggcgccagcgcctcgacgaccgcggggcggggtggtgggggtggcgcacgtagctttctccggagaggaaaagtaggagagatcgcggggaagagagctgattca

SEQ ID NO: 3239 - DNA, 872 bp, Oryza sativa
caccaccagaacaaactgaacatacacatgaacttgtctctgaggaggatgtcagtgaagctcctcgaaggagtaagagacaaaggacggctaagtcttttggtgatgatttcactgtgtacctcgtggatgacactcctaagtcaatttcagaagcatatgcatctcctgatgcagactactggaaggaggctgtccgtagtgaaatggattccattatcgctaacgggacttgggaggtgacagagcgaccctatgggtgtaaacctgtggggtgcaagtgggtgttcaagaagaagcttaggcctgacggtactattgaaaagtacaaggctcggcttgttgctaagggctatactcagaaagaaggcgaagatttctttgacacttactcacctgttgctagattgaccacaattcgtgtgctactttccctagcagcctcacatggtcttctcgttcatcaaatggacgttaagacagcttttcttaatggagagctggatgaggagatctatatggatcaacctgatgggtttgtagttgaaggtcaagaaggcaaagtgtgcaaattgttgaagtttttgggaagcgcttcgcgtgactgctccctgttcgttcgcgacggctcgccttcctcttcgctcgcgtgtttcgtgccttcgtagacacttgcgaaaagtttcgaccaagcagccggtctttccgtcacctcggtacgtgttcaatatgttgcgcatatttgatctgttcatgttatactgtgtagtttacatgtgtagatctaatgatgcgttcatgctagttttcatctgtaatgtcaatgatttatttatggaatagattaaatcattctatgtctataatctcaa

SEQ ID NO: 3240 - DNA, 1772 bp, Oryza sativa
acatcattatccactagcaataattacatataaaacttatgtaagcatgcaatatcatctataattcattgaattttacaaatcatcatccaatcatcttccttcacattatttttaacaatatgcatttttaacaatatgcatatatgtatccatcatttttataatacttaatatatattcatccatataatcaagtgcgggatatcatatttcatctataatttcatacatagtctgctaaatgtatctctctgaatatagtttgacaaaccagttttatttattgttaataactaatataatttttacttttatctcgattattaaaaaatatttaaagttacatagaaatttccacagcaaagcgcggggaatcacctagtatctttaaggcatacacccttcgttcaaaaagaatcatttctatggatgaatctaaataaatgcatatccagattcctaataagaagtaccgccgaacaccaccaaacacgactttgcaaacacatagaaacaatggagtatgtggaccttgccgacacaatgagcaatgcatcatctgagagagacaaccgccgcaacgggtgaccagattctcggtgtagatgacccaaggttcctcgtcgtgcattgcgtcaagcagatctagggccgaagggcgtgttctaaaaaaaaagaaaggcaatggctcaagaacttcactgcaaatatgcggatcttacactttggaaccaaaatgggatagcggcaaacgtgtgcttggaccattataagttgggccggaatggtactgggacctcggtgagggccctttttttcctcaatgtgactgaagccaacatgagacccatgataggttgatcggcttccgatcggctccttttttttaaaggaacacaacaggggaggcacctgttgtttgggaaaactttattaataaagtaaaaggggtctgaaaagaaaattgcaacaaactaatccagctcatggctacatttttgtctctcttattcaatctcaacaacaaaaggagaagattaccctgaaggagctgcctccaagaagttgtgccggaatgggtttaccacttacatgcaggctgggccggaaccatcggtacgccagaacgactatacacgtaggtgaatccaaatcgcaagacataaccgacgtttcattttttgtattttctagttaatctatgcttttctagttaatgaggccgaggatgtagtcgttgatgaacagctgcgactcgaggaaagggacgagctggtggaaggactgtgcgccaccagctcgatcgtgagtgccacagtggagagcggagttcagaagcaccttgagccaatgagccatgtgctgccgagtgaagaagctagcgccctgatccaatgaaccatgtggtgccggacttagagaaggtagcgatgaagacgttggtggcacgcgcagtcagatgcctcttgttgagcatggcgctcacaactccctgcctggacatttaccagccatcgggacggcggcagcatcagcatgacttgctctgacttgttgatccgtcggccacttgggccgttgaggaatgaggaggcgaccatcactagtacaaatccttctatctgtgacgggctctaatatgcttagaaatagcgggccgtcacaaggaagtcatcttaatcgagccgaaaagtgcccgattaagatatggtcgtacagacatgttagatgggtataaaacttaaacccgtcacgaataacacctatca

SEQ ID NO: 3241 - DNA, 605 bp, Oryza sativa
attaggagctgtaaacttcaatatagacatatagtgagggaaacatactattcccctacacatatattcccaggccaacttcctttggatcagtctctatcatccaggaaggcctgtcaatcaaaatttacggtattgtgtcagctagcatactcattattgattattagcttactaatgggtgttgaaattgagcagagaggacatcacttgttcatcacgaagatcgttgttccttgagacgcccgctcaagaagcaccttccttgattcaattgctactccctctggctgcattatgaataaaagtggtgattttagaaaattaaaacaatactcccactgttatgggttaggattcatagggggtaaacaccgccgagaggatagccgggcggcgacggctgctagggatgagagggggacttaggttgggagagactaatcttgattcattgcttaattagaatgatgatacaaaccatccttatatagatggagggaggacccagtctaatcctatccaaccaactctatccttatccctagggcctcgacccctcggcccactacctatgacacccaccgtccctaaatataagggat

SEQ ID NO: 3242 - DNA, 5362 bp, Oryza sativa
cgtcatcatcggctgcaaaataatcagcaacgccgtcgtcgtcgttgaactccggtgacaaaccaataaaccattgtgtggagtatacgcgaacaggacattaggctcggtgttttcgaccaccctagcgccgcggatgggcggcggctgatcagcacgttgcagcctatgcagcagttcggcgtcggctggctgccggcagtggccgtacgtgacggccatcaatgtcaagcaaaacacagctcgctgttgctcggacatgacgatggactgatcactggccatccgtgagcaattccgtggccaatcatagcggcgtcctccgtctttctacttgatcaccaagcgcgtgggcgtgggcaggatgagacgatgagtcctccatagtagacatgaaacgatttatataggagggggtggcgaagtggagtaggattaatccgattccgattcaagatggatgttatcttggtgggtatcgccgtttgcaccttctggttgggatccccctcggattcgttccttctggcttctattctggccacttggcgctgcgtccctgctgctgatcactcttttagttcaactcgaaatgctgaccttcaattcagaagttctcggtactgtacaaccgtaggttggtctcacgattaatttcttacagtaatagttttgcaatactcatatgtcaaacaattatttattattgtcttattgtaaatacggttttcaaatatgaattatacactgcatatcccaaaacgtcctggatgttcaaccttaagtcaggctccaccaagaaacccagaacatcctccagatgcactaaacggaaccatgttttttctggacggaaaaaccatgtttcaacaagcacatactccttgctgggaatgtgaaacatagaaccatcggatatgaaaacccaaaaggaagtcaagactcattctgtggtttgaactctttggctttcagatacttcactactagccttgatagccccaacaaaactggacatcttgttcagggcactcaggtaagctcgcacactggaaacaacaatatccagtgcggcaccactcccactgagatcaataggcaaagaaattattagttcatgtgaaaaattaaattgataataacaattatagatgttggaaacaacatagaaggaaggtgcccagtgaaaaaaaaaaggtagtataaaggactataacctgaatgcccggctgaaggagtgaccagtcaaagcatgtttagagtcgctaacatctccagtgacaaccactctagtagttgcaattgcatcaatgccttctgtgaccgatgtcatgctatattctcgaagaacagttgggatctgtgaattgcaaattattcttagatgtttcaaaatttctccagttttactaaaatgaatgcagatagtttacaaatcaagaaagtagatgtaggtaatttctctgttaacatcaaaatagtgcattcattttgttgaaagcatgctcataagtcgtaacacatcacacgctaatccttattaagtatggaatctcctattcttgtgattcttgtatatttatcatggaggcaacatgctgaaagttatgttaccagatgcaggatgtttcattctcatatattgaaaaaacacatccatattccatcccattaaactggtatattagtgcaagaaccatcaagaatattgcaactgtcacctgtattatatcatcaacagccttgtaagctgcatcaactggacctgttccaactgcacatgcaatcttctcctctccatccggacctatcagtttgacagttgctgtagacagaccaagtgttccacaagttgcctgcaaaaaggcttcatatcaattttaacatatcaacttctccattagccaaatagtaaaatgtggcaaaattatacctgtacatcagcaagggaccaaaaaaccttgggctgaaatatctcatcagacaacagcgcctcaatgtcttcatcagttacacgctacaatgatttaaaacacataagctagaagttatcaaaatgcttactgttttacagaaaaaaaatggttgaatatgtcaatcgagcaacagagcactcaggaaactgtcacctttttcttctctgcaacctctttgtagcgtttaaagaaatcctcaaattccttgtcagtgatttcatatccaagctacgtgttggatgacaaggtagtgttcagcaacgataactgaaaagaaggcatttagtcctaactagaaaaataaagacaaatacaatacctccactagtttagatctcacagcatgccttccactgaaaaaaaaaagacaagaaagcataattatgaacttgagtttgataatctcaaatcagatttaagtaataattgcaagcctatcgtaagtatttgagcaggattgctgcatcaacctcacctaatatacaagagtaaagatgaaaaagaatatctctattctagagaagtacagaaaaacatatgataaatagataaaaaaaatgaccaggccaggtagaggtttcctcaatgtcaagtgagcaaggtttaacctaaaaaatttaaaaagaaaagcaaattcactaactttaagcaaaggatggcatcacacaatttctcaagtaaaaattgtactgtgacatgatctgcatacatatctctaggaatttagaccttacatggagtatccatatgatatggccattcgacataaagtgtttgatagttggaaagtgtattttgcaccaaattagcagaaagtgcataaagtagaaaaaatatctcctcgagaaacactcagggagaatgttgcaacttgcaagaaatcaaattatgggggaacatatgtatggatgatacctgagtttcccaagaacaataccaaactcgtttgcacgtgttagaccaatatcatcaggagaaattatttcataagttcctttgtatttaagcatcccatcctgaaaacagaataacaaaagtgaatatcaagatcacttcactctagaaccaacacagttaatatgagaatatgcaaggcaaggttcatataaaaccatgattgatctatcatatatcagaaaatgaattcctcggagctgagattaaaaaaaggtatccataaaaataatttgacttccctcagtatgtgatactataaaaatgtgagcaaaactttttcctagtgcaaatatgcaaactgagaactagaaacatttctgaaacttccaaattttagataggaaataaacagtaatgctaatcaattccttagtcctaaaatgtaaattgatggcaagaaacacttttagagttataaaatatagataaatgaaaaacagaaacaagaacctagatgtgacattgtggtaccaccttcagcactacggagaacccagtcaagaaatttgatggcaatattaggacaagaatgcaaatttagttacctgatgaattccactttcatgtgcaaaggcattggcaccgacaatagctttatgtggttgtacatgaagtccactgtgctcttgtacctagaataggcagagcatttgcagaagtgcatgaaattttcagtcacctgaaaaagacaaaagataaaaaaaaaagagcaagaaaacaaacataattgtaccattttgcttgacatagtgatatgttgggtattgattccagtatacagacctcctaagagctctcggcgacatttaattgccatcacaacctgaaaaagattttttttttaaaaaaaagttgcacatataggaaatcaatattacttgcattcattcttctacaaaccatttagatgaacatgtgcaaaataccaacaaacaacataaacatagtatacgagctcacctcttccaaagaagcatttccagccctttcaccaataccgttgatagtcacctctaattgccgtgctcctgcatgagcgccctaaaggttaagtcacattagtgacatgattaaaccaatgataatggatcaaagagacatggaaaaggtagtaccgctaatgtattggcggttgctagaccaaggtcattctggcaatgagtagaaataatagcattttcaattcctggagtgtttgcttttatatcagcaattagcttcccaaattcataaggaagagtgtatccaacagtgtctgggatattgagtgttgttgctccagcttttatgacttcctctagaatatgatatagaaactctctgtttgacctgcaagacagagtgaataatatcatgccacagtcttttgcgcataaaaaaggaggctaattgattgtgactaataaaccacagacaatagcttggcatgagctaatgtttagtcattcattttgcaccaacatgtttgaaagcaaagaatgtacagtaaatgatatgcaacaataagcttcgtgtgtagatttaaagatgaacacaaccacaaaatttcagtagctggcagacatctaccagcagtacaaggatgaaggtatccaagatacaatatacataatactttcctttacagaccaaagtatattcagtacttgatagtaagcaactaggcatacactgcacgcctcaaaatcaaccccacttcactaaagttggatggacctcttacatgcacagtacttaggcatatatattactaggtatggtgtcaattccaacccacatcataatgactgaaattgttggacatttcaacgctgactattttaaaagtagcctaatgatcgaacgaatttgcaattaaaagttggatagacctctttcattcacagtactttccaatatctagattattagctaattagtcagatgccagttccgaaccacattgtaattactactccaggtatgaaacttttggtcatttcaagggttacagtttaagggcccctttgaaacgcaggatagaaaaaacacaggaataggaaaaacacaggaattgaagtggtgtgttttcctaatcctacaggaatggaaaacacaggaaatatgaaaagggtccctttgatagcatcataggaaacaaacaaagaaaatgatagtttccaagaggttgaacctcttgcttattttcctatgaaattgagctataggaatgcaatcctaaggaaaatttcctatactttcctatgaatcaaagggtttcgtaggaaaaattccttgggaaattaaatcttccaaaattctgacaatcctccaattcaaaggggccaaaaatagtgcctaaaaatcaaacaaatttgcagttagaagtgatacatgccagcatcactgagtcaatgatgaatgtgttcaaagtagggggtacatgatgc

SEQ ID NO: 3243 - DNA, 688 bp, Oryza sativa
tttccgatctgtaccgacatgtttccgtccgtattgtttcgtttccggttttccgatatttccgatatcgttttcgtttccgactttaccgtttccgatttcgtttccgagaaaaatatggttacggaaatggttgaggctgttttccgatcgtttccgaccgttttcatccctactcgtcggcacccgctcgctgctcgccgtctcgccgcgcatgtggaaggggccgccgcggacgcctggtgatggaggaggggaagaggaggtagaaaatagagataaggtggtgacggaggatgggaggaggacattccatctttgcacatgggctcgctttcaatgtcgatgtcgtcgaatatcaacgattgaatagactaatgagttaatgaaatactactggacgctgtgctggtctagaagattcttctcttaaacaataaatattgcaacatactaataccttctatttgaacgggatttaccgtaaacttcttttactttttttgacacgggttatctaccttgacgctaactatatgcacctaaaggaaaatcctcacactttctccttgaatttctatggttttgaatcaatactttatagactgatttcaaaactaatatggggcattagctgtttttatattgtttaatagcgatcaaatgttcgagccggccggcttactat

SEQ ID NO: 3244 - DNA, 6401 bp, Oryza sativa
  unsure (1)..(6401): unsure at all n locations
ttaaaaaaatcaaattaatccatttttgaaaaaaaaattagctaatacttaattaatcacgtgttaatgaaccgtttcgttttccgtgttactgtagcgcgctgggaaaacgtccaaacgaacacagccctaatccgtggcgtcgccgatggagcgcacggacgatgcggtggaggcggccatttgggtacttcccaatccgcccgactggagcgtgttcctgttacctcccgcaggagcacgggagggaggcggctacgacaacgacagccgtgtcgagatcagcatcaccacgggcacggggggacaccaggagcgaggcgcctcctcgtctgccggcgggctcagggaaggcggcgctgcgcgcgaggtggagcgcggtggcggagatgtaggcctcacggccaccgccatctcaggacgccgccgtggagatggaagcctcgcagcaggcagcagcatcgctggaggccacggcggaggtactgcggacgacgagccccacagcgagggcaccgtcgcgggtgcagtccaaggccatctcgctggagtgggaagcctccccacacccacagacgaggcatcgcggtttgagggcaggtatgaggatgactataacccatatgtggatctctacaaatttgggcgaccggctcctgatttctggtatagcgtctggatgcgtggccccctcgttttgcatgataagaaactgttactggctagtgattctcttggtgttcatagaggtggggagattcctgatttggcagatgctataactgatgttctagataatcatcctggaccagtttcttacttcagagtagattccaccacatggactgatgacaatcaactagtcaaatggtttgaaactctatccaacaagtctgttgtagagatcacattgctaaacattggttgtccagttagcacaatacttcctatcagtgagctcttgtctcctaacctcacaactcttcgtgttggttttatgaagattctcgattctgaccttctgtcatttgagtattcgtcgttaagcgtgcttcaactcattggttgctcatatcgaggagctgatctaaattatcttgtcagtactagcaatacactaattgagctcaacattggctattcaatggaagatctcacagttaattcacagagtctacaagaactgcacatatggaatagcagggggggctttctttccgtggaatatgctccaaacctcaagttgttgaccacgggccttagaccaaagaaaggaaaatctttcatctcgatcacattaaaaggggctccttccttgagagagattgattaccttctgctgccgtcatcgagtcaccctaaatgacacaatgatctcaaaggtataactcaactaatcatcttgtaacagcctttcagtgtgtcctttagattgttagtcatacataattttgtttgttgttgcaggagatacgatgtgtttcatctatcaggcaactccaagtgggtgtgaactttgcagaacgaagtcacagagctagtcttcgcaatatacttgaatgttttccagaattatcaatgcttgtgatttgggtatgttcaatcttttgttcaatgtatatccaaattatttggatatctgtagtagattaatggttgtttttgttaccctttttttttgcagaggatggatggtattgtctatgataaaggatctgatgtactattcgatagctcttttgtgggtcttggtagtgtctcttgtgtcaagacacggatacagtattttgagttagaaggttttcgtggtgggccagctgagatggacattgctcgtgggatcttaagacatgcttccaggttggctaaatttgtcctctcacatcacaaaaactacagtgaggaagatctggtggagcaacttgaagagataaaaacttgcattcgtgcttcagaagattgtattattgaagtccacccactaaaagactcaccttattaaagcacaaaggaaaaggtatactctctccttgttttttcttttttttttctttttggctatatggggttggatagtggcactcagtctcaaattttattgttttgaaccctttcccgtgctaagtgattttggattttggacttgttgcttatagattagttccccttgtagttaaccacttaatagttgtcagaactgggctgatgggtcatgtgtcgtgcacagcaagatgtgttggtcgagtcaagtagtgtctgaggtgttgatttagaatatggaacgatcacaatggatcctgtggatgttccattaagatgactcaattagcagtagctggctagcagttgttcatataatggttaaaatgacagataaaagtaatgcacagattgcttgaaatagaaattatccattcacaaaggatcatccaatttggttttatacttacgccctgtttatagagtcacaactgcctctatatctattctcgcgacaaaaatggagaaaagcatatagaagaaaacaaagactacatggcactgacagtgcttggcaatattaactatttagtgctttgattgactgcagtgtgaaactatgagttgcctttgtagtgccatgacttattgattaaacataagaagcattacaatcttcaagcaagagatgcttgacacagtctggagcctcagctaaccaaacagcactactgccgtagtgtataatagcatgctgagctagctcatgtgctaccttattttggtctctcttaacctttgctacacaaaccccacccagtaaactcatcaactcatttgcatcacttatgcagccagaattacaagaccaataaatacaactcatttgcatcacttatgcagccagaattacaagaccaataaatacttggtttgcaacgactgataagctaaggtgccttctacacaagctgcaaatccggtttcttccagcattgagcaatttactggccatgccaggaagataactgagtattgcctgcactatctctaatcacaaatccttcaccagctcgcccaatgacagccatgaaaccgccattcacatttaacttcaaataactaggatcagggggtccccatctttccgaagggttgggagtctgtatctttgcctttagttttaaattctccccaaaatcaaaattttcctttcctgtctttcccttcttgttcacatatttacattagcaagttatgcattgcttccaacaatcttatagcaccctctaaattaattccccttttccatgagtaatatcatttcttacattcccgcaaaaaaaatcatttcttacattccaattcttccaaaacacaaacattaattagctttttcatcgacagatattctatccattaataataagaaccaatctggaccagaggtttcatcctttggcaaagtctagtgctaccgcataccacgtagtaaatgttctagagtggggacaattaaccactgcatgataagttatcctccatagcatcctccataacactgccagagaaagtattagtagccacggtgttcatcacaagccaacctccatgcaaaattttaaccttcggtggtacctcagcttgccaattatatttgtaggaaggtctgtcccttcttaaactactaactgtatgcacttttgactgaaaagatacctgttttctcaaaatgccatgccactacatcatcgactggcctcttgtggatccttatcttaagaatttcttcagcatcaattggcaagaactcctaattaatcacattaggtaaccattcacaactagtagggtctataagattcgaaactacattaggtagccattcacaactagtagagtctataagattcgaaactattcttactgttgaacaccgctggcgagtaatcaaattcaggaagtgttcttgtgttatccagttatccagccacaccctaaccatctctcctgaaccaatcctcataataatgccctttttaagcaattgcactgttcaatactccctccgtttcacaatgtaagacattctagtatttcccacattcatattgatattaatgaatctagacatatatatctatctagattcattaacatcaatatttctagtgaaaatactagaatgacttacattgtgaaacggagggagtagctctctaggtgagaatgcattgccagcaaaaactgtatcaacaggttacctgatggaaagtatttcacttcagaagcattgcagtaaactatctagacagaaaactcggcatgcttgccgagaggatagagtttggttgaaaagctgctatctctcaaacttaagcctcccacaccgttggacaataacatattctcccaagagcaccagtgcgctcttattttaccattttctgctccccaccaatattatctttaccatgttctgctccccaccaatattatcgtgtcatttgcatgaactcctcttgtaacgatgctggcaatttgaaaatcctcatcgtgtaggtagacaaggcttgaataatagatttaatgaaaagtttcttacctgccactgataagttaccttccactcctcagctaatcttttccacaaatgtgcctgaaggctacatactactgacagtggttggcaatattaagtattttgtacttcgattgactctagtgtgaaactgagtttcctttgtagtgccatgataaatttgatatgactgtattcggtcaacagtatcaaacaatggcttagcaataacatttttggtgggagcatgtaagagcaatattagttttaagtgaaaattatgtgcccgttaattcattgcgataccatatctaattggtatgtaaggtgaccacgaggccgccgcacgcgaaccggttgatctgcaccagcagcacatgcggcgtcggcgcgtccgtgttgaccggcgggtggaggcgcgcgagctccggcgacggcgcgagcgggaggtggtcagcgagctcggacgacacctcggcctccacgacgagtgcgccggcgccacctctgcccgtgacgaagaacgggcggcgacgggcgccgcggcgctcgaggcgcgcggtgaggagcgggaagtgcgggagcatggcggagagagcgtcaaggagggcgcgggtggtcgggttgggaggcgagaaggcgaagaggacggtgacgtggtacgtcggcgcgacgaggtcgaacacggtaagcggcacctcctccgtctcgcatgtcggcggcggcggcacgaccaaagtcctcttgacctgcacttccattgtatcaatctggttagacagatagataaacgatgctcttgagtgatgaatggatggtggcaatggttcatgtatatatagcatggccggtgccgcttgtgtacatgtattgtatagagtatgtcactaggagtggattttgattgctcgaggggccctcgttatttgcgtattactcaaatggttataaaaaagttttaaaaaaataagaagatgtgttattatgtgatacatcactctacaaatattctctcgagggaaactatcttgatacatcacataataacacatcttcttattttttttaaattcaacttctacatctcatagaagaaagacgagcggacattctctcgagggatcgagatagtttcccgtatgtcactggctcagctgtcttgcgattaacatttgaagtgtgtacgtgtcaatccgttgaggcatgcaatgcttgatttgttgggctgccaggaattcaaccgtgcatacgtgcgatgggtcttagttgtacgggagacaaaaatacctactacgagtactaggaaccggacgtatatacgttcagatgaagcaggtatacgtagacagtgatcaagattgcgtggattactccgactccgatcgaatccgagtcctaatcaatctcgttgtccctcacatcgtcgactataataaaaatctggtactcatccagttgttgcaacaacgcaaaagctggtctgactgctgcaggcgatggatccgccggctcgcagattgatggattctcgggcggcgcagttggcggcgccacttcctgatccatactcggcagaaacatttgaagacctactccgagaattgggagtcgaccctagtatccacaccatagtccgtagcgccgggagatggatggatccggcagcggcagcagcacgagttccagtgagattccaccgcacgctccaacccccacggaatcgaccccaatagcgaaaaacgaagcatccgcgacatgttacaagaggggatcctctagagtcgacggggaggcgttcancattccatttggnggggtgtccaatagactgcattatcgc

SEQ ID NO: 3245 - DNA, 1687 bp, Oryza sativa
caggaattcaaccgtgcatacgtgcgatgggtcttagttgtacgggagacaaaaatacctactacgagtactaggaaccggacgtatatacgttcagatgaagcaggtatacgtagacagtgatcaagattgcgtggattactccgactccgatcgaatccgagtcctaatcaatctcgttgtccctcacatcgtcgactataataaaaatctggtactcatccagttgttgcaacaacgcaaaagctggtctgactgctgcaggcgatggatccgccggctcgcagattgatggattctcgggcggcgcagttggcggcgccacttcctgatccatactcggcagaaacatttgaagacctactccgagaattgggagtcgaccctagtatccacaccatagtccgtagcgccgggagatggatggatccggcagcggcagcagcacgagttccagtgagattccaccgcacgctccaacgcctaggaatcgaccccaatagcgatgcccggagcatccgcgacatgctacaagagttctatcgagtggtgtaccatggagaggtgtactgggctggccgagtcatcaggcctcgtccttcgtccatgccaacgcccgtgataggacgacgtcgccgcgccgccgacggggatgccccgatgcagccgccgagcaagtacgctcgagtacacgccgtgtcgcgcgatgtcctcctgggcctcgcgctgacgaaggcgtgcgacgcgaggcaggaggagtgcgccgtgtgcctcagcgacttcgaggagaaagacaggctgaggacgatgccgtgtaaccactccttccacgagaactgcctcttccgttggctcagggatagctgcctctgccctctctgccgctacgcgctgcccaagcagcagcaggttcaaagctgctgatgatgctatttatgtttcggttcaccaacagatccgtttgtaacttgtaagcatattgccatcgatgtagaagtagaatcatgttctcatcgatgtatagcagggcagttcatcatcagaaggttcctaattaaaacatttcttatcctccactggatttaactagtattgcctgcaacgcaaggccctgtcttggctaacaagccgaaacaacttgccactcatgtgcctagctatccctatcatggccaggcacacggttcttcacaatatataatttaagaattgccttgatcttcaaagtaattaattagtggattgatagaagttcaatcgacttgacattgcaattataaattgctttggagatccagtgtcccagtatataatgccagatgaacactcctcttgcctccatccacaggtcaacctgcaggcaacccagcttgctaccaagtcgatcaatggcaatggacacttactactattccatgctcttcgtcctccctacgatactctacatgtcctaccacctcaccagaatcctcgccgacaagaagaagcccaccacccatggactcaaggcgcacccgctgctcggccacctcccggcgttcgtgaacaacagccaccgcttcctcgactggacgacggagctcatcgtccgcagcccggagatgaggatgggcttctggatccccgggatgcgcaccggcatcatcaccggcaacccggccgacggtgaacacatctgcgcaccact

SEQ ID NO: 3246 - DNA, 2076 bp, Oryza sativa
  unsure (1)..(2076): unsure at all n locations
caaccaccctttcagttatttggtacatgtttgtttgaaaagatgacatcatttagcaccgcgcgtgggtgagaaagacatacctgtagcgcgagtctgactcgggatgggcaccaggaaggcgaatacaagaacgtcgtaggcggaaggcatacgcaccggaccacagttccaagcttctgcgcgaattaggggatcaaccctgcaggtatagaaacaggcgagctggcaagattaacctactcgaacgctgattacaaggcggacattttggtgatgaatggaccagatcatcagctacagcgtcaacgcaaaataccgaatattgttgctacagtgatctacaagatgcgggtgcatgtggaccgttagattcggatctaacaggcggcaggggactgcataagttgtagtcacagtaccaactgcacctgatgcaaatccccagctcgcgtcgccgcacactctgcgcactcctcgtgccgctctgcccactccctacgcctgcaaccgttgccctgcgcgcccatgacgccacctaggatgaaaacggtcggaaacgatcggaaaacagccaaaaccatttccgtaaccatatttttctcggaaacaaaatcgaaaacggtaaagtcggaaacgaaaacgatatcggaaatatcggaaaaccggaaacggaacaatacggacggaaacatgtcggtacagatcggaaaccggtaacaaatacggaaacattaaactataaaaatatatatttaactttacataagtatgttatatatatacataaattcaagcttatactatataaattataaattaacttcattttaaccatgtacaaaagttagagattttattgaagagtcattcaatctataagctgtgggtaaagtatagacatgtcctataatatcgacatatttagaatacggtaattaccatattataagaaacggtaatttccgcaagaatacggtaaatacggaaacgatcggtataacagcaaaaccatttccgttttcatttccatattttttaccatttccatttttgtttcggtcgattaccatttccatatggctcggccggtagaaagtcaaaaacgaacgccggtcggccggtaattaccgttaccgttttcacccctaacgccacctacatcgtcgccgtgccgcccgcctttgtggagagccccatccatgagccgcgcctatttgaacgatcaccagcttgtcctctctcttttctcgttccactattgtattcattataattaatttttatagagggccaggcgttttcgcatgcaaattatttattttgtaattaaagggttgttttggattgaaatcaaaatatgccctaccaaaattttagtaacttaaatagtaattgtgcccatacttaatttggctatattttaaaattttcttcaccgtcttactgaaatttagctttatattgggcatcaaaccgaacataggctagctaattttatcgtaccaaaaaattggtaattttggcactatcaattaattggtaattggtagggtagataaccaattaattgaatattttcttgaaaaaaaaagccgtatatacgtggcctatggcgtttcgatccaaactcccctttccttctaggcttctactgcgacgaggaagcccttgccctggcgtcgtcaaaatccctcctccgcagcttcgctccagtgtcctgcctgtcaatcctccgggatcttggtggatctgcgggtagagtcggattccaactacgattcggagtcctaatcaatttcgttgcgtcccccatcgtcgactataaatctggtatgatcaagttgtttcattgcatcgtttggttgcgcatttatcccctcccatctctcccggccaagttcgcagtcncncgcttggtncgtagcagngtctaacaacaaaangtcgcggggggnggggggnnatgtggttgaccaagantggagagagaggtnnnagtagagggttggaatttggagggtagagagagaaagaggtagtcgaaattgttgagggttngggntngtgggcaga

SEQ ID NO: 3247 - DNA, 616 bp, Oryza sativa
ccgagatccccactagtgaattgggtgccgttatccgtaataatacggttaggcactccaaaccgggctgtgatgcccttaatgaatttaagtgcggagtgcttatcgatcttgacgaccggataagcctcgggccacttagtgaacttgtcgatcgcgacatacagatactcaaacccgcccggggcccgcctaaacggtcccaggatatcgagcccccagacagcaaatggccatgaaagtggtatgatctgcagggcctgggccggctgatggatttgcttggcgtggaattgacacgctctgcatcgccggaccaggtcgaccgcatcattgagagctgtcggccaatagaaaccttgtcgaaaggctttgccaaccaaggtgcgcgaggcggagtgggctccgcaattcgccttcatggatatcggcaagaagctcgacgccttgttcccgaggaatgcacttcaggaggattccgttagccgcgcgccgatagaaggtcccttttaccagcacgtagcatttggagatgcgctggacgcgttcactcccttcgagggcctgggtagagtcttatctgagagggatgcctggatctcagcgatccaagcaa

SEQ ID NO: 3248 - DNA, 672 bp, Oryza sativa
atagtgtatttagctaccctgaatagaatgcaagaatgttgaccaatttgataacttgacatgtacctgtaatgcaagaacttgaccaacatcctcagacgagaaatttagtccgccaaattgtttgtcactttcagaccatagagaaaatatctaaaatttgatttcaattatcatcaaaggttgaaaaaacaactttactgaaaaaaaattcaaaataatgtgtgcaccatatttttctatagaaaggatgctatgaaattaatcatcgtaagaagagaactcccaagacaaaggagaaaaaaatgcaaataaaaaatattctatacagttataataaaacatatagtagtagagatatattaacatatccatgctatcctaatctaatcattcaatttatatgtaatttccctatgatttcattggtggagaggaacaaaattgaaatcgagtaattcatttgtctatgttcgtattaatgacaagatgtggtgaaattgtgaccattggtaatttcttaaatggttcattataaaaaaaaacaaatatggtatgtgtagagttgcctttaaaagcacttccaaagtattataaacttaatagtttttataaacttgctataaaataaaatcaatgctgtagttttaaaagtttgactgaatgttaagc

SEQ ID NO: 3249 - DNA, 5017 bp, Oryza sativa
tttatgcattgtactgttattgttatagtatggtccaggagtgtcatgattcatgaacgacaactttgaatacagtcgcatgttattttagtgagatggtctatcaaatcagcctctgaactatgatacattccaagaaattttaaaattgcgagacattttaaaaaatatagcactaggaattttgtggctccatctcaataaatttccgttaatgcaggttctcgtgggcacaaaaacgccagcatgcttccttccttccaggtaaattttgttgtcttgtgaaaactttgcatggcatatgcctttgttgtcaaaatctgaatgggatgatgtgtaatattctaaatttcagaatagtacagatcttgtaagaatttatccttgtctaaattaatttcttccactcatacaggtgatcagatggtgttctttcttttgaatctcttcgagttgcttggacttatcctcactttcaaaccctttctggccgtaccagagcagcacgatacaaattagactgttcaggtatactacagatctagattcttcagaacttcagatgttggcaatttcatgagccctgcagcccgctgtgtgaagcaaaggtataacatatgctcatctggatcccccaggagcaatagatagaagcgagagtactactctgtcccaaagaatcaaagctagggtttgattatttttgggacggaggggtaggtgccagatatgcaattgcagcatttcagcgaaaggaatatatatagttggggtaaatggtggccactgatggctaggtttttcatggccagccagcatgtataccgagtagcattctaccagtataatgaatatagtactatgtacattgtaactagtaaaactctgtaagtgacatcagcttgagaatgaaattattgctggaatcgagatcagtacattgctaatattattttgtccctttttcaattggaagttcatcatttataataaatccacacgtgagccgtggagggtggatcccctacttggttggagctgctcttctatggtagttcaaaaccgatgaagatgatgctaaacgagaaaacccgttagtgcatgattaattgaattttaattattacaaacttaaaaataatctttttatattttggagtaacttctatatagcaaaaactatatgcattcttaataatcacaaaagaaaaacgaattttctaaaaaaaaaactttcgtaagttttttgcccccaaaacttttagatttgtgatcatcggatcatctcgagatctttgcatgaaggaaaaaaaatgttagaaattttcacacatgtcacgcgtaccatcctaatactaaccaatctatagttgaatgcaagatctatataagttatagcatagttatagtgcaattataatgtagttatagtacaggtacatgtaattacaatggacacaactacaccgagagtgctagctggatagtgctaaagagagacaccattctttccaaaaaaaagctactagtacactcaatatctatggttttttttcttcttagagaagtttctcttaaattactcatccgatttataatccgattacaccgttgtgttcgtaacaattaaatctttacaacaagatctcacatgattatattttgataaaaaatcacatattacttttatgatatgtctaaattacttctagatttcactaagtcacttcttagacatataaaagtaaatttagtaaagcttaaaagtagtttacatatattatagaagtaacttataacaaaaagaaagtaactttaatttagaactatatctagattcattaacatctatataaatgtgggcaatactaaaatgacttacattatgaaacagggggagtaactctctgtagtagaaataattatattgtgagtgagcttaaataagaaactatgtagagtgaattcgcaagtacagtgtagagaagatttataaagtccacaaaatatagaattaactaaaaataataataataataatcaacttagagaattatgaatgtacagaagtaatttagtcaaatatgaaagtaacttatatatattataaaagtaacttagtatataataaaagtaatttataaatataaatattttttcatcgtaatataatcatgtaagatcttgttgtgaagatttaattgtaacaaacacaatagtgtaattggattgtaaatcggataagtaatttgagagaaaactttataagaaggaagaaaaagacacacatgtctaagaggaaaaacagcgcgcacatcagcacgtgtagcagtaattcttctcacaattggatcgtcgttggttaacactaaaccgagaggcttctcggtttagattttaccaattacaatgcagttacacttcaattatactataattatatctaaaagttttttattaaaaaaatttgcggtaatttttttagatacaatcgctcgtattaggccatgcctctggtattcctttgcatttcgatcgtgtagcccaatacgacggcccaaacccaaactccaatcccagcgggcccagcaagtcagcctcacatcttcttcttcatctccctgtctctgtctctgtctctaacctaaacccacacctcgcgcgccgccgccttgctctcctcctccccgaccccgagtcctcttcgtgtgagctcgcactcgcagtcgcagcaatggcgatcaagcggaccaaggcggagaagaaggtggcgtacgacaagaagctgtgccagcttctggacgagtacaccaaggtgctcatcgccgtcgccgacaacgtgggatccaaccagctgcaggagatccgcaaggggctcaggggcgactccatcgtcctcatggggaagaacaccctcatccgccgctgcatcaaggtgcacgccgacaacaccggcaacaaggacttcctcgagctcatgcccctcctcgtcgtaagttcaccttcttcttccatgttcatacctaacctcgagtccactgtttttcctgacctgtttttcttgttgtttgtagggtaacgttggtctcatcttcaccaagggtgacctcaaggaggtccgcgaggaggtcgccaagtacaaggtataatcgatagccaagtacaaggctatcgatctctgttcaatacatacactgcaagaacataacagaacagtgttcaataaactgcaagaatagaaaacataacagaatagtgttcaataaactgcattgggttgaaggggcataatttgttctgtaagtgaaattggtggatttagtgtgctatcttaaggtgatcatgctgagttatgaaaataataataggatatgctgggttactttgaatttagctctatgttgtgccattttatccatatgcgttgtatatattctctgtgtgtggtattattagatgttctgtgagatgtgaaagtacaattttcaaccttatgtaacttttccaatgctatttatatctcaagtattccattgtttatatcatgatgtgatgccatatataatgatacatatagatatagggtttgatattagctagtattggctattgggtcatgatgttaaaagttgacttgttatggtgtgagtagctcaagtctctagctggtttatgtttttcttttcactgcaatctttttctactacaatgtagtttgtactgactgatctctgtaagaattctaactaggtcattatgtcgtgaacttgtgatgctatccaatgagtgaataaccatgatcttgtttttgttataaaacaggttggagctcctgctcgtgttggtctggttgctcctgttgatgtggttgttccccctggaaacactggtctcgatccctcccagacttctttcttccaggtgatcatttgtcgatgtgttaacatattgtttatcctcagagtcaaatacaagttctcactgttctatcttgttacaggtgcttaacatccccaccaagattaacaagggtactgtggaaattatcacccctgtagagctcattaagaagggtgacaaggttggctcctctgagtctgccctgcttgccaagcttggtatccgccccttctcatatgggctggtgatcaccaatgtgtacgacagtgggtcagtcttcagccctgaggtgctcgacctcactgaagaggacctgatggagaagtttgcatctggtgtttcgatggttgcctcagtgtccctggcaatctcatacccaactatcgcagctgcgccacacatgttcctcaatgggtacaagaatgtgctcgctgttgctgtggagaccgaatactcatacccacatgctgacaagatcaaggagtatttgaaggtaacctagtttctatttcataatttccctttttgatgtctaaatgcgtaagaattgtctgaggtagtctgataattagattgcggtactaagctgtagcatgcccatgtcttggcacaaacttatttgttctggtcttaacaatcaatcaatcaatcattgagaatttcatggtttagtaagaaactgaattatctatgatagctatttcacttagtttgatatgcctttagtgcttttagcactttcttgagactgcagtttacttttcttattcacgatgaagactcagttaaatattgattactactggaagctaagttaatgctgatttttgagaacttgggcatttcaccaccacagtttcttacatatttgtcttgcctattcttctcaggaccccagcaagtttgctgttgctgcccctgttgctgctgctgacagtggcgctgctgctgtagcttcttccaaggaggaagagaagaaggaagagcccgaggaagaatctgacggtgacctgggcatgagcctcttcgactaaagcctctgatgccatatctttgccaagtcgaaagttttgtttcagttctaaacatcaaagtctgtctataatctttagcattt

SEQ ID NO: 3250 - DNA, 1471 bp, Oryza sativa
cctgtgtttcttttagctgggccggctgaagataagccaaccatagcctgtgtttttagtactaattctatttgggatcaacttcagatattctctctatgggcagaaagtgacaggaagtacgggggctgagtttgtcatctgaagatgtgggtcaagtgcttgcaatcacaggtagcattttcttgtgcttttaccagtgctattgatgatagtatcctgcagaaaatgatgcatgtattttcttgtactttcttcctagacgaccaaatcttgtttgctgattaaaatagagtgccaagaactgaaaaggcttgagcttagacaaaaaccaaccagaaactgaatttgaacgattctaaggtttctaactgaatttcacattcttccgtgtaaaaaatgcttatatattactatggaaaatttaacttgagttctgtggattgggagtagtctgctgaaaagtgttattagccagtgcttgcaagccagatagaacatccaagttctatacttcatctagtaatgtttttgtggctcaactttctgttatttgtaatggcaatttcttttcaggtgtcagtcttcttgtgtatcaactcttcatttatcctcgtatcaataaggttatagggcatattaaggcttctcgaattgcagctgtgagtaaagagtttccattatattgttgggaagtgtatcactttttttctgaatgtcttacctactgttctttatcttgcagattctgtgcatacctattctctttgcatatccttatatgacatacctatcgggacctggattaacgatcatactgaacattgcgtcagttataaaaaataatcttggtgtgagtatatttccatgtcaaattttaggaatctatgtatgcgattttcagggccgatttgtgcaagaaaaaggtagctttgatatttaaggactgcagtttgccaagtgacagacattaactcagaaatttttatacgacaataggacaagataaatatgatatacatctattattattatccaatctgaccttttgtggtgaaaatggagttgattatacaagacaagacagcacatataaaattattttctcatcttatgtatttgcaactttgatgaaaatttatcaatgttaatgtataaataggttcttgttacactctcttctaatttatgctatactatgttaggttaccatcattacaggctgtttcatcctacaaaataatgctgtggtatgtacccaagataatggttaatttcgacaacattttatacaaaattgcttctgattgatgattgtaaaactgcttacagcctcaagaccaacgaggggctgctaatggcttggcaatgacaggaatgtccttttttaaggcagtggctccagcaagggcgggcattgtgtgagtatactttatttagtgtaaccatgtaaaatgttttatgagtatac

SEQ ID NO: 3251 - DNA, 514 bp, Oryza sativa
tagagttccgggtatcgagctacgaactcaacatgcaagagaaggtggcaaggaaggttgatgaacgcatgcccacacatcggtcccatgatccccagccgaccattcttcttgaaatggtgagcccgtcagaaaacagtagcagctgcgcctcaacggggcaggtaggatcacagagcatggacgccatgcaaacacaggacgaatcgacctgtcccgttgatgacatcactcagcggacaccatgtgagctgcatattcctttcaagaacttatcaataaaggtaagatttagccattccgctagttgctgcttatatatgttgattactaataaataatctctcacaacatgaaggtggcgtcgggcatggccatcccaacggacccttcaggtacttaccactgcaggccgattccagcaggatactcgaaggtcgaagttgagttggtcgaaggcgcgtacgaggacctcgagctggattaccctggaggagacggtgagacgcatcta

SEQ ID NO: 3252 - DNA, 514 bp, Oryza sativa
accccaattattgaatttgaacctccatccaaaattgacaaaaagttgcataaccgttgtttcaagaatacggcatgcagcctttaaaagctcactatcttcctcacacttttggggtatatcctatgtgataccctaaaacaaaaaatttttgccatctaaactgggccgtagtacatgtctcacggtccttgtgcccctcattctgatagagcaactatgggcatcgggaatttctatctaaatatatgtatctctacttttggtggtagggtggtttttattggtagtagggtgttttttatgtcttcattctatctataagctaacaaattttataataaatggccgtaccttctttaaagcaaaagccagattttatccattaaaaaaataggcatcgggatggtatgtgctctaatctaccagaaaaccaggtgaaacatgagatagtgtgacaatggaagaaattaaggagatgattagatgattagatacatacacaaaccaacac

SEQ ID NO: 3253 - DNA, 550 bp, Oryza sativa
aaagtgctatgggtaataataccaccttcgaaatctaagtgaagaggtctcaacttaaatacggagctagtcgagagtctctgttgaccggttgagatggtgcgcggacaaccaggcggggcgaggcgaggcgaggcagacagttgctgctgcgctctctcattttgtaacagacggtaataaacacggagaattgatttcgtatcaatgaacgcgtcggttacggaattaaacgccgtgaattgatttgattccgtcggttacggaattaaacgccgtgaattgatttgattccgtcggttacggaattaaaggccgtgaattgattccgtcggttacggaattaaatgccgtgaattgatttgattccgttggttacggaattaaacgccgtgaattgattctgtattaacgagcgcgtcggttacgaaattaaacaccgcggttgatgactccgaacgttactctcgcgctcgcatatatatactccgcagcgaccagaacgacgacaaagttcttcacgactcttgtacttcgagttcctcctcct

SEQ ID NO: 3254 - DNA, 1414 bp, Oryza sativa
cccccccccccctcgggggaaatcaggaggagggcggacacctcaccctcgggcccgacgtccccgaaggtgccaggccacgtgggcgattgcgtctgcctcaagcctctggtcatgatactcccggtcccatatcaccgacaatcatattaatttatattttaagtcttctctagctacttaattaatcatgcgctaataagatacctccttttttttgtcacacttctttttgtcacacttgtttttttgacaaatttttaggcccatcgcttggcatattggaggaaaaagtgaaacgacatattcgtaaatgaaaaatgatttgtgaataaatcttttgtatacgtgttcttaacgatctaaaagcaccagttgaaaaaaaaaactacgatgaaaaaaccccaaaatcgagaaactttactataagaaaagatgcataacagatggatgatgcttggagggtagaatactaatttttttcagtccattgctaaaaaagatttagaataaatatcatcttgcagatctgtgatcagtctggataggttatttatttgcataagcaaaatgtaagtctagttttaagaatagaatgaggatctctactttttccacaatgggttttgatttgttagatctattctcacatccaataattttggacagtcttgtatatcctttctctagcttgattaacataatctttctgataaagccctttgccaaatgggtttaatggttatttcttgaagaaatgttggtatatcattgctaaagatttttacaggcttacagctcactttcatgctagttgatatgaacccactagggtataagaagagggggagaatgaccacagggtcgtgctctaaccctaggatacgcccctaatgggcccaacttataaacaatccattcgacccaaaagaggtgacgtagcaccgtgaacaaaaaatactcggtagtaaaacgacaattgcggctgctccataactgatatggacatgtggctagatccatttgaaagtagacttgataagctttccgtgaagtacttgcacgcccaaatcggagttcgcatgaagtcgtggcggccatcagaagttggcgctgtcctgcagtccgaatccaacccgcgtgaatcctctcccctttgtatcctctccattgttcctgaataaaacaagagtgcacatatctccggggtataaaaaagtggaacatgaactcaagaatgaactctcctgatagttgatttgacgtgcatgagcgtgggtaataggaccatgaagttgtacttgtggggacgtggatgtatcaatggtgttgatgtcctcatcatcctccccttcttgcattttaatcgtcctcgactcaagctcatcttcttctcccaaatacgacttcaaat

SEQ ID NO: 3255 - DNA, 4538 bp, Oryza sativa
agatttgaccgagggggtaggacgtaaccacagtgacccgatgcgcttggaaataatggcgcagtttcctcgaggccatcagaatagcgtaaagcatcttctgggcctgagggtatcgggttttggcgtcccggagggcctcactaacaaagtaaacaggccgctgcacctttcggcggggccgatcctcttcactaggggccgtatccccggggtgctcttcgtccaagtggcctctcggggcacactcgtctcctgcgctgatgacctcggggtccgaagatgacaggtgcggccttcccacagtggcctcggggccgtcctgggggtcgggggctcctggcgtcgtcagacacgcgggcaaagggccagctccggtcgtcaggggcctcaggcctccgttcggctcgggggcctcttctccctgctctctcccgggtcgaatcagcacagggttagcctcggggtcgaagggtggtaggtgcggccttcccgcagtggcctcggggccttcctgagggtcgggggcacccagcaccgtctgacaagcgggcagagggccgactccggtcgtcgggggccttaggccaccgttcgactcgggggcctctcctccctgcctgctcccgggccaagtcggcacagagtgggggtgcgcagaatgagaattgtcctcatcgcgctccacaaccaacgctgcactaactacttggggggtcgctgctaagtaaagtagcagggactcatttggctccggggcgactagaaccggaggagagctgagatacgccttcaactgggcgagggcattttcagcttccttcgtccaagtaaacggccccgagcgcttgaggagcttaaataagggtagcgccttctctcccagcctcgatataaaacgacttagggcggccatgcaaccagtgacgcactgcacatccctaagtttgctgggggggcgcatccgctctatagctcgtatcttctcggggttggcctcaatgcctcgggcagagaccaagaacccgagaagcttgcccgcaggcacaccaaacacgcacttatcggggttcagttttatgcgggcggagcggagattctcaaaagtttccgctagatctaaaagtaaagtttcttggttgcgcgtttttacaaccaagtcatcgacataagcctcaacattacgtcctatttggctacccaaagaaattcgagtagtacgttgaaaagtaggacctgcattctttaacccgaagggcattgatgtataacaataggttcctacgggggtaatgaacgcagttttttcctcatcctccctagccatgcgaatctgatggtaaccagagtatgcatctagaaaacacaaaaggtcgcaccccgcagtggagtcgacgatctgatctatgcgaggcagggggtaaggatccttaggacatgccttgttgaggtcggtgtagtcgatgcacatccgaagcttgccgttcgccttgggaacgaccaccgggttcgccagccactccggatggatgacttcacggatgaatccggcctcgagaagcctcgccacctcctcgcggatgaaggcttgacgttccggggcctgccgccgcactttctgccggaccggccttgcgcccggccgcacggcgagacggtgctcaatcacctccctggggaccccgggcatgtccgctggtctccatgcgaagacgtcagcgtttgcccgcaggaaggagacgagcgcgtcttcctatttgccatccagaagaccaccgatccgtgtggtcttggatgggccgtcgcccaaggcaacctccttgaccgggacctcgtcgcatgtggcaatccgctgcctcggggcggtgggggcggaggtgccaagcctctcgtcaccaccctcgggcttggtcgcagcagcgaggtggtccgcgcgctgctccatgcaagcgagcgcgactttaaggtcgccacggacagagatggggccaccggggcccggcatcttcatctggaggtaggcgtagtggaccgccgccatgaacttcaccaacgcgggtctccccaggaccgcgttgtagggcagactgaggtccgccacatcgaagttcacccgctccgtgcggaagttggctgatccaccaaaggtgaccgataggtcgatgtgacccaacggccatgtgtgccctggcgtcacaccgatgatcggttgagacggctggagcaccatccccggggccttgatagcatcaaaggccgcgggggaaaggatgttgagagccgctcctccatctatgaggacacgccccaacttcacattgcagatggtgggagaaaccaccatcgcaatctgccctccccgggcaacgcacggtgggtggtcggtctggtcgaaagtgagagcaacctccgaccaccgcgcccgacgcatcgcctcatgagtaggggccatggccagaagctctcgcttcatagccttgaagctccggcgagagacgtgagcacacgctcctccatcgacggtggcaatggtggccccaggttcttggaaacctaggtcatcatcaccatcatcgatgtcaacagcgggggccttctgcttggcctcacttcgccgtttgctggaaggaaccgccggggacttgccctcacggcgttcctgcctcctgtcctcctcccacttcctcgttcgctcagccaggtttttgactgcacgacagtccgcgagatcgtggagggaggtgttgtggacggagcaccacctgccggcggggcgctccctgctgggagtaccagcctctttctttttgtcgctcgcaggcctcccctttcgagtggcccgcggagcgcccttgacggcgaggacatgaccctcgtcgccggaacggtccgacctcttcttcctcctcctgtcacgccgccctgtctgagcggcggatccgggggcggccgaagctgccactccggaaccggaggagttccatgtccacgcttcctccttacgagccactcggtccgcgagctgaaaaagctccgcggtagtctggggctctttggaagcgatcttttcgagcatgcggttgtgccgcacgccccccctgaacgcgtagatcaccgcgtgtgcagggatgcatggtatagtattgcggacttggcaaaaccgctgaatgtacgagcgaagcgactcatcatcgcctcgctgtactgcatgcaagtccgcttcttcgcctgggcgcggatatgtgccttggaagttcatggtgaactgttggcacaaatcttcccaggagtggaccgacgcgggtggcaggttcattagccaaccccgcgcctgtccttttagggccatgggaaagaagttcgccatgaccctgtcgtcacccccagcggcctcaatcccggtcgtatagacctggagaaactcggtggggttgacgctcccatcgtacttctcggtgatggtgggccggaaccttgggggccaacggacattccgaagactcgccacaaaggctctacagccaacaccaccggccgggggcacggagggctgatcctcacgtccatgtcgaggtgacactctggacgaagaggcaccctccgttgcgcggggagtacgccggttattacgccggcgctcgatgtcgatgcgggcatccggctctccatgctgatcctcccgagttggaggtgtcgacgagggagtggcggccgaatggcgcgcagcagccgccgctcgccgcgccctccgccttgacgacacggagccggtggtagcggcgccggaggtcttggtggtggcggaccgtccaccagcacccaggcgctgctgtgccgtcatgaccaagttggccacgtcgtccagccatcgctgggctggagactccgggtcagggacgacaggcgggtgtcgtaggagcgcgccagcagcctgaagcgcaccctgaggcgtgctgccgtcgccgtagacgaggaggcgacgctccccatctcgccgttctcctgcatcacctgcgactggtgatgccacggatttgtcgaccctctcaagcgcctccccctgcttagggctttggcgcggaggaggtgggggagtacgagctcgacggcgtggattcggctccccatcgtcgccgctcacactcggagagaggtcgtgcgcttttccttgctcggccattaggctgaacaagaaaaacttggcgcacacggaagagtctgagagctcagaaaacacacactgagccccctacctggcgcgccagatgacggagctcgtggctcctcaccgggagaccgcgcaggcccccctttgccagttcggccgggggcttagggtgagatctcaagctctctctgtatgtggaaagattgcgtgctctcaagagaacatgaaacacaagcgatgtatacaggttcgggccgctgagaagcgtaataccctactcctgtgttttggtggatctgtgtatgaagggactacaaagtgagagccaacctctccctcgttctaggctctgaatctggcaagaatcaat

SEQ ID NO: 3256 - DNA, 1278 bp, Oryza sativa
caaagcttgatgcccatgtcctcgcagtagtcgccgaagagttcactagtgaattgggtgccattatccgtaataatacggttaggcactccaaaacgggtcgtgatgcccttaatgaatttaagagcagagtgcttatcgatcttgataaccggataagcctcgggccacttagtgaacttgtcgatcgcaacatacagatactcaaacccgcccggggcccgtttgaacggtcccaggatatcaagcccccagacagcaaatggccatgatagtggtatgatctgcagggcctgggccggctgatggatttgcctggcgtggaactgacacgctctgcatcgccggaccagatcgactgcatcattgagagctgtcggccaataaaatccttgacgaaaggccttgccaaccagggtgcgcgaggcggaatgggctccgcactcgccctcatggatgtcagcaagaagctcaacgccttgttcctgaggaatgcacttcaggaggattccgttagccgcgcgccgatagagggtcccttctaccagcacatagcgtttggaaatgcgttgtacgcgttcactcccttcgcggtcctcaggtagagtcttatctgtgaggtatgtttggatctcagagatccaagcaatcaatctaagggagcttggagcgctcccttcgggtcccgaggcctggactccgacgggcctcgggggccggtcaggcgcatccgtctcccctaaggggtcgggtcgcgccgacggctgggtaagcctttcttcaaaggcgcccggtggggtctgggctcgcgaggacgcgagccgtgagagttcgtcggctatcatgttatcccgtctgggcacatgccgaagctctatcccgtcaaaatggcgctccatacgccgtacttggcgcacgtaggcgtccatctgcgggtcagagcaccggtactccttacagacttggttaacaaccagctgagagtcgcctaacaccaggaggtggcggatccccagcccggctgccaccctgagtccggcaaggagtccctcgtactctgccatattattggtcgctcgaaagtcgaggcggaccagatatctaaggacgtctccggtcggggaggtcaacgtgacccccgcaccggcaccctggagggacagagaaccatcgaactgcatcacccagtgggtggtgtgaggcagctgcgaggggttcgtgctggcctcggggattgagacggtctctggagcccgggtccactctgccacaaatcgg

SEQ ID NO: 3257 - DNA, 563 bp, Oryza sativa
cggtgcttctgcagcacggactcatgatggtacgtgtggaggaattaacagcacgtaaacattggtgtgtgaataaatttagaatctgtgagtagttaaatcaagtggttgagaattttgttttaaaaaatgatcttttaaagaattttcgaagccaaatattgaattagtcttacttgtcttgattttacgacaaaaatatattcagttgatgggatagataggaaattaatgttatggatagagcctatatgttttgcaccaaagttaattactgtttgctttgcaggatggggtgacttggcttatgaactcgcccaatgagtcgctaggatacattctagcggacaatgggtacgatgtctggattgccaatagccgtggcaccgtctatagccgccaccacacttcgctcgtctctagtgactcggtacattcttcaatttattctctaacgtaaccaacatttggctataaaattaaaacacatgtctatacaaagttatgtttaaaagttaggagtaccatatcatggtaacatgcattggtgaagccaagattaa

SEQ ID NO: 3258 - DNA, 8404 bp, Oryza sativa
gtgtgtaggccctcactgcccgtgtaataattttatttacgctccagcttgttaaactctgaattgtatcaacttttggtgtacctagcctcctgggacaaggattaatgcacgcacgtaaggaatgcccgttgggttatttccggtcgtgacacgatctccgcccattaaagagaaaaagaacagtccagtttggaaagggaagggtgcatgtggtatccccttgaagtataaaaggaggaccttgcccatagagaggggatggattgattcttgccagattcagagcctagaacgagggagaggttggctctcactttgtagtcccttcatacacagatccaccaaaacacaggagtagggtattacgcttctcagcggcccgaacctgtatacatcgcttgtgtttcatgttctcttgagagcacgcaatctttccacatacagagagagcttgagatctcaccctaagcccccggccgaactggcaaaggggggcctgcgcggtctcccggtgaggagccacgagctccgtcaatgattgtttaaagtaattttcttatataatgttcttagaaagaatttttagtagttgagaaagcgtgcacatggaaaatgaaagggtagaagttggaaaaaaaaggaggctaacaaaggtagaagttggaaaaaaaaaggaggctagcaaatgttacaatggtgtgagatgaaacagaactttaccacaaaataatgtcttagcatggtctaatcatgagaatgcattagaaatcttatctatatattaagtttacggttaagtatacactagtccagcataagttacatatagcatgggcttgatgacatcattttatagtactaccctacttgtaataaaaaaaatagattgcaactaacttagataatgcaatcatcaatatttatttcatcccaaaacaaattcatgttctactttcattcagtaaatggaagcaattgagttggaagcaataaaacctagggcgacagatgtctctgatgcatactaccatatcaagcaacatggcccatttaggttgactttcataccacttattaattacagtttatcttgtagtactatatggaaatggttctgaggaacaatattatagcgtatcaaaactcatccccaaaatactcgtcaaaaatatctctccaagacctctctagtttgaggatttcaacctctccacgtgcccaaaaacaaatacggttgtcgcttcattcatggcaagacaaaaacatccaaattgcgaaatttaaattgtggatggagagagaggatgcaagaactgaaattaaatttcataacttcagaaaatattcattacaaaagtgttgaaagaaaacactcaaagacaagcaaacatacaacttcacatatgtttgattttaaactctccgaaagcggcaaactctcacaaagaggcgcgcaagggacacaacaaacactagcattcatctccctatttataggctaaaccccccaaaaattatccaaatgtccttagggagaaaccctaactcatctgaaatcttagccgtcccactactaccaccactaaaagtcatgcaatctttcgcctcaagccctattatcccataaccactcaatcctatagtagagaaccatgatgtagcactaatagattctttcttaaaaaaagtaaaccataaagaatgttttggaaaaagtgtgtgctacattatttttgcaacaatatctattatatattaaaagcctactaaactttctataaactctctcaacctgccaagtgtcactcctacaaatgcttctaagtcgctatgtggcactctaataaataaaaaaaaaatcatagaatgtaaaaacaaaacaaaacatctatctttcgatttccacttaaatcggtgggcccataattttaaccattagattagaaacaaaacaagtacacggcaagaaaaaggcaagcattggtggttctggatggttctttttctctatagcgctaaccaccgcgacgcacttcattccaaaggaagagatacgcggctgtgttcgttacttgagggttgggaacccatctccctgcacggaaaacggaacagtccattagtgcgtaattaattaagtattagctatttttttaaaaaatagattaatttgtttttttaagcaactttcgtatataaactttttttaaaaaaacacaccatttagccgtttgaaaaacgtgcgcgtgaaaaatgagggagagagattggcaactagaatttccaaacacagcctcatgttattaccaaaaatagtaccgtatactctctctctctccctcatgtacatcattcgaaaaagaagactccatgtagttcatgcaccattgcaccactactagtagtattctttttataaaactatttatatcatttaaaccgaatattattttaaagatccttttgaaccatcatacttgttggtatttcttaacgacattaatagaaatataattctcacaaatggcgcagaaatactcctggtatattatgattacagagtttatccgcaagcgcacggatatactattatagcatttcacctgagagtattccaagggtatcgtatttattttatcccgtgtgacggagctcgtggcccctcaccgggagactgcgcaagcccccctttgccggttcgaccaggggcttagggtgcaatcccaagctctctctctctctctgtatgtggaaagatcacccgcccgcaagacacacgagacacggcgatgtatacaggttcgggccgctgcgaagcgtaataccctactcctgtgtttttgtggatttgtgtatggacaagttacaaaagattaacttcctttcccctcagccttccaaaaaggaaaaagtcccctctctaaatgggcaaggtcctccttttatatctcaaggggataccacatgcacctttctctttaatgggcggagatcggtacggtttccatccgggagcccttctgatgggacagcccacacctacccccacctcccccgagggcagagatgacgcgggaccgtggctgtctgtcgatgacgcgaccagtgccagaccggtcattcttgtccaccacgcgtcagcttaacaacgtgcatgtttgcccttcttcgtgtaacaccttgcctgtaatggttaggatgaagcctggtataaatctgaccagggctaacgtgccatctctaagagataacacgctagctccggcttgagacgagtgcctagaggctttcgtcttgacgggatggggcaaggcgtgcgtcagaccgccagtcgccacctaacccgtgatctgaccggtctgtgactggtcacagaccggataaaggaacgcgctgtactgcgttgcatgcagcgtgacacgcttgaccagactgcaataaatgctgttaggtgagcacagctgtgctcacttatcccatatatgtggcgcagacttccttaaggggtcggggtgcctcggccctcggggccggggcaagcgcaacccgacccccccccctcgggggaaatcaggaggagggcggacacctcaccctcgggcccgacgtccccgaaggtgccaggccacgtgggcgattgcgtctgcctcaagcctctggtcatgatactcccggtcccatatcaccgacagtagcccccggcgttatgccagagcaatttcccttccccagggaagcggtcaggtgtgacgccacccctaaagcctggtgacaggtgggaccggtctccgtagttgggcaaaatacccaacggtctcaatccatgcacattggtattggtaactttggttgtccataatgggcggtctattcaagactgccacaccacttgagcagcgcgcgaatctgggtgagcagatttgtctcgcccggagatacggtaacgccgcttcggtcggcgagcgtaattaacgcgcgcacgatacaatccatttcgattgccacaaccgcatatccacttcatgcgccgtatgcgggcgaatgggattagtggaagcgtgggcacgggaaacgagggagcgagatagcgagatacgagggagcgaggtagtgggcgcgagaaacgaggagccaggcccagcgatggcaagggtataaaagcatcgagaaaaggatttgcttccttcctttcgccattgttcctcttgccttcgccgcctgagctctaactctttctctgctacgccctactttcgccacacgcgctcgttctcaatcatctcttcctccaccgccatggcacggggctctgctctgctcgatggcagtgtactaccgccttcccgcatcgtgagcgagaggcacgccggactgccgcgccgcttcatgccggagtccgccaccggtcgggagatagtgatgctgggcgagggacgcccggcaccagactacccggggcggtccatcttcttcctccccttcgcaatggctgggctggtcccgccattttcttctttcttcatggatgtcctggagttctacgatctccagatggcgcacctcacccccaatgcggtgatgacattggccatcttcgcgcacctgtgcgagatgttcattggggtgcgcccctctcttcagctgttccggtggttcttcaccgtgcagtcggtgtcaccgccgtcggtggttggcggctgctacttccagccgcgggggccggtgttgaaccgctacatcccctgcgtcctccgcaagaagtgggacgactggaagagcgactggttctacacccccctcgccaacgaagcgcgcctccgacttccaagccagcccccggcgcaggtctccagctggcgggcgccggtagatctgggggaggactacgacgccgtcctcgaccgcctggcgggcctgcgatcccaggggctcaccggggccatggtgtacggcgattacctccgtcgccggattgcgccgctccaacggcgcgcccggagcgcctgggagtacactgggcctgaagactacatgcggacccaccagggagccagatgggattgggctcccgaggacttcaagatcgtggtccaaagggtgctgaatcttagctccgtggaggcgtctcgcattcctcaggagatcctccccctctgcagcgatcccgaccgcgcctccattctaaccattatgatgggggtcggggcctcagaggagagagcccctaagggccacgacggcgcgggcgagcgccgccggggggaacaatctgccccaggagggggtcgtgcttctgggccccgcgtcgggggctcggggagcagccgccctgccgacgcccaggggaagaggaagctgggaggaacacctcccccatctcctccccgagggggcggggcggcgcgtgccagcagtcggcgcccggagggggccgcgccgacgtcgcagcccgagggggagcgcaagaagaaacggctccgcaagacgggggagacggaaccatgccggggaaacctgatttcccctccaaggtggtcattcaaccgaccccctcgcaggttcgtctcactctcattgcaaccatctttctcccaaaaggaagttttttcttactcattttgttcgtcttctggttttttcttctgcttcagcgatgtcccgtcgcatccctcccgccaccccaagtccggccagtccgaggccgaagatccagcggccgcagaggagcggaggcgagaatctgaccggcgtgaagccgcagatcgccttcgggaagctgaagaggccgcccgggaggccgcccgggttcgccaagcggaggaagctgctcgggaggaggccgcccgggctcgccaggctgaggaagctgctaaggaggaggccgaccgggctcgccaggctgaggcgacagctgctgctggcgcgtcacttgggcccactccctcgggcggccctcaggcgacatcctccgaggcggctcgcgacgaggccgcgggcgcatcgcctgggcctacctcaccgggcgacgcccaggaccaaacgggcccgggggacatccccgagcccagcgcatcctccggggggccaagccgcgtcgcattttctccaaggcggctcttctcctcatcttctgtcgccccgctgagcgccgagccccttctgcaggccctggccgcgcgcaaacaccgcagtgctggatgggttcaacgcccaagtggaggccttgcgtgcggaacgagcggagctcgaggccgcatggacgcgtgttgaggaggggcggcgctcggtggacgccatggtggaggtgggccgtaaggctcaccgccgtcatgtctcggagcttgaagcccggaaagcggcgctggcggagatcgcccgtgaggtggaggaggagcgggcggccgccctcatctctaccaccgcgatggtcgaggcgcaagacaccctccgccttcagcacgcaagctgggaggcggagctgaagaaaaagctcgacgccgcccaaggggtccttgactccgccgctgcccgagagcggcgggtaacggagactgaagcggcgtctcggcggcgcgaggaggcccttgaggcccgtgccatggcgctggaagaacacgccggcgccgtggagaggggcttgacggaccgcgaggccgccgctgatctccgagaggcgacgctggcggcgcatgaggccgcctgcgccgaggaggagtccgcgctccgcctccgcgaggatgcactcgctgagcgggagcgagctctcgaggaggccgaggccacgacgcaacggctggcggacagcctgtccctccgcgaggcagcgcaggaggagcaggcgcgccgcaatctggaatgcgtccgcgccgagagagccgcactggagcagcgggctgccgacctcgaggcgcgggagaaagagctggacgcaagggcgcgcgtcggtggggcggctgcgggcgaaagcgacttagccgctcgcctcgcggctgccgaacacaccgtcgctgacatgcagcgcgcactagattcctccatcggggaggccgaggccctccgcttggcgggcgagatggggcccgacatgctttgggactcggtctcccgcatggatcgcgctggtcggcaagcgggcctctggaaaggccagacgaggatgcgccccatcaatctggaaggcctcgctccgcacctcaacaggatggcctgggtcctcgaacgactccccgaggagctcgagaagaccatcaagtcatcctcgagggacctcgcccggggggcggtcgaactcgtgctagcgagttaccaggcccgggaccccaatttctctccctggatggcgctggaggagttccctcccgggactgaggacgacgcgcgcgcgcgcgtccgggatgccgccgaccacatcgtcaacggcttcgagggctcggcccctcggctcgcgttcgcccccaactccgacgaggagggcaacaccagcagtgcagacgatgggggtgacgaggccgtcgactcgggcgcgtcggaatgagcccccaagcccccgccaatctttacttttttctttttctttcttctaaggccttcatgcctcttttgtgtacaaattaacttaatctgcaatcagaaatgacgaaaaaatttttgtgttagttttattttgctatacatacgcgatgaggatgatctgtgccatggtccttttgcgccttagcttgaaataagggctcgtgcccaagtcccagtcctcgaatggctcgggtcggggctagtgcctggggagatccacatgtcgagactggccaggccgggaacgtggtgaccgaggggtatgggtgacccgattgtgggtttttgccgattcccccccggagttcaccacgccccggggcacggctcggttctgggccccgtttggcgattttagctgaccgaaccgaacccccgaggacaaggttgagtacgagtgaccctattttaagtcaagattcttcaaaaggaaataacagcacagacacaacctttaggaaattgaaactgcttctattgaaatgttgaaaaaagagaaataagaatgtaatgcatgtgtggtagcccccggccaaccctgcacacccgaggggggtgcggggttggcctgagccaaaacctgacacctgacctccccctcctcaggggtagaagctaccaaggggcgctatgttccatgggttaggcaagtccgtgcgctcgcccgtggccagcccgaccgagcccggccgggggacacctatcactcgatacggaccctggcggttggggagagttgctcaatccagcacgcggtgcgacgccgcgtgcgaccagttcgtcgcgcagagcgatcgggctccgacgtggcgctgatggtagcgccgca

SEQ ID NO: 3259 - DNA, 635 bp, Oryza sativa
cctccaaggtggtcattcaaccgaccccctcgcaggttcgtctcactctcattgcaaccatctttctcccaaaaggaagttttttcttactcattttgttcgtcttctggttttttcttctgcttcagcgatgtcccgtcgcattcctcccgccaccccaagtccggccagtccgaggccgaagatccagcggccgcagaggagcggaggcgagaatctgaccggcgtgaagccgcagaccgccttcgggaagctgaagaggccgcccgggaggccgcccggattcgccaagcggaggaagctgctcgggaggaggccgcccgggctcgccaggctgaggcaacagctgctgctggcgcgtcaactgggcccactgtcgcgtcccaaatcgactctaaaattcatcctcaaaattgtgcaaaagaataattaaaattcatgtgaaagcctccaacaattaaaatgtgcaaagataaaagtcaaatgaggcttggaggatttttgtatatttcctaaaagcctaaaatacttaaacaaattttagtggaattttcagagcacaaataataatggaaaagaaataaacaaagttgaaatggttttataaaaagaaaatcctaaaagaagttcttttt

SEQ ID NO: 3260 - DNA, 816 bp, Oryza sativa
tcacaacttcagtttgtccatcagtttggagatgacaagtagtcaaaacaaaagcttagtccccaatttggccgacaaagttctccaaaaatagctaagaaatttagtgtcacgatcagaaacaattgtgtttcgcacaccatgcaagtgaacaatttctcgaaagaacaaatcagcgatatgagtagcatcatcagttttatgatatggtataaaatgtgccatttcagaaaatatatccacaaccacaaaaatgctatcacgccccctcttagtcctaggcaatcccaacacaaaatctattgaaatatcttcccaagaaacagtaggaacagagagaggcatatacaaaccatgtggatttaagcgtgacttagccttttgacatgtagtgcagcgagcaacgaatctctccatatctcttctcatatttggccaaaagaaatgactagcaaggatgtcctccgtcttcttggcaccaaaatgtcccatcaaaccacctctatgcgcttcctgtaacaacaacaagctaacggagctagctagaaggcatagcctgttagctctaaaaacaatcccatcattgaagatgaatttgttccatgttcttctatccttacaatgcagcaacacatctttaaaatcaacatcatgcgcatatcggtctttaatagtttggaggctaaaaatcttatagtcaagttgtgtgaacaaagtatatctcctagacaatgcatcagcaatgatatttaccttccctttcttgtgtttgataacataaggaaaagaattaattaattcaacccatttagcatg

SEQ ID NO: 3261 - DNA, 1013 bp, Oryza sativa
caacacatatacaccatgatccatctttctttggtaccaaaatcaccgcaaccacacatggactaagagactcacatacgtacccttttatcatgcaattcctgaatttgacgctgaacctccttggtttcctcagggttggttcggtatggcgcacagttgggtagtgaagcacctgtgatcaagtcgatttgatgctcaattccacgcactggtggcaaccccggtggtacttccttgggaaacacataagagtactcctaaaaaatgttagaaacagcaggggggaaaagaatactgcatatcgtgaagtgaaaacaaagcatttttgcataccgaagcataggcaaccgaaggtaaggcaatcaattcattaatatcagatttagtagcaagtaaacactttgttttcaaattgatctcagttttcttgccagcagattgggcatttttatgactcccacccttggatttggcagctttagcaacatcagcatgcaaaatatctttaggagacatgggatgcaacacaattttcttatcatggtatagaaaagaatactggtttgacctaccatgatgcatagaatccctgtcaaattgctgaggtctacctagcagaatattacatgcttgcatgggcacaacaccacattcaacatcatcatggtaatttccaattgcaaaattaatgtacactagttttgttacctttgccttaccactgttgttcagccattgatgtagtatggatgtgggtgcggtttggcgctgagttcaagcttctccaccatctcgctgctagccaagttattgcagctacctcaatcaatgatcatgcggcaagaacgttatttgatgacacactttgtttggatcaacgtgtgtcgctgattttgctccgccttcttcatttgtgcgctgaggacacgctgcataatgaggctctcatagtgatccgcatcttcagccccaatatgctcttcaggtggctcattatctacatggtcagc

SEQ ID NO: 3262 - DNA, 525 bp, Oryza sativa
cgccgatcacgatcacccgccgcccgaccggcagccgcgcgaggtcgtccgcttgccgcagctgctcgatgaacgccaccgcgtcgcgcacgccgtcgagctgttcgccctcgatgccgagcgccttaacgcccgccagcccgagcccgagaaacacggcgtcgaagcgctcgcgcagttgcgcaagcgtgacatcccggccgagcgcctgcccggcctgccattcgatgccgccgatcgacagcagccagtcgatctcgtgctgcgcgaagcgctcgacggtcttgtaggcggcgataccgtattcgttgaggccgcccgccttgtcgcgcgcatcgaggatcgtcacgcgatggccgtcgcgcgccagcgcgtgcgcgcacgcgagacccgccggcccggcgccgaccaccgcgacgcggcgccccgtgtccgccgcccgcgcgaacagcggcttgccgcccgcctgttcgcgcgccatctgccagtcggtcgcgtggcgctgcagcgcgccgatcgccaccg

SEQ ID NO: 3263 - DNA, 817 bp, Oryza sativa
gcgcaggttttgccactagttgaggcttttgaatccatcaactttgacttggtaagataactttctgggtacatcactttagatatatcggatatcccatatatctgctcttagctttgtatttgtcgaactgtgttgtggatttttttgccactctaaaagtgtgatgcatttttactactaaaaaggtactccctcgtcccaaaatataagggattttgggacgaggggacatatcctaggatgttcagattcatagtactaggacgcgtcccatccggcccaaaatcatttatattttgggacggagggaatggtattaggatgtgtcacatctttttgcttggttttttatctgaccagtgacgctattgatgaatcataacaacaatactgccttgtgaattttcctcaacgatactgattttcctcattcgtgctattatatgaatgttaaccaacagttgaaacaatttagtcttgtgtttgaccatcaaagccagtggcaaattcattgtcttatgaatcagaaagaaatgtatttgactatatctggaatgaatctgtgcagagtatggtagctactcaagtaggcgtgcaaaaaatttctggaattacactgtatgccgtgcaggaaaagaagctttacgaacctttgtcagacatagaggtaaagataagcaaattcggtactatcaattactctttcttgtagtgttctgcatgtttgtttgctaaagctacattctcgtgatagcattatagttctttaaagttctcatgataaatttgttgaacataagtgctcgagcatgtg

SEQ ID NO: 3264 - DNA, 1170 bp, Oryza sativa
gtcggacccatcgtctaccttcggccgccgccgcccgaaaccctagcgcgccgccgccgccgttcctttccaaatccggccgttcctttccttctccggccgaattgtttgaggcgaaacaatctccgggatctcctctaccttttctcctttggaatctttggctaaatcgttttggaagttcgtggaatcgagttcgtttcggatcggtttccctctctccaagccgagctttccttcgccgttgccgccgccatgggccttcgccgccgcctctgagcccctttaaaaggacccccggtgtctcctctacccgtcgccaccttcgccttcgcctctcgtcgtccgaaaagccctagcgccgtgtgccctagctttgccgtcgccgccgtcgctccagccgtgcgccgccgtcgttttagccgtcgccgtcgctcgggaagaccaccgtcgtgctcgccaagtcgtcgccgtcctcgtccgccctttcgccgtcgccggagatcgtcggagcttcgtcgccgtcgtcaagccgaagagcttcgccgcttcctcctcgtcgccgtcgccgtccgttgaccttccgccgtcgttttggtcgccggtgagttcgccgtgccgcccgcttcatcttggtgccctccgtttgcgtcctcgcgccgccgttcgccggcgagcgtgcgccgttcgagccgtctcctccaccgagccgccgccgctgtcggtgacgtcaccgctgacgtcatcggggtcgtccgccgtgagccgccgtggacccgatcgatctcggccgtccattttggattggttcgatctcggccgtccgttcgtgtgaaccgccgcccgtgcgcccggtccaccaaaccctagcccgctgacgcaataaaccctcttttccttttcaaaaataattcattattgcgtcataattcaatttaaaccgatataagtgttttaatccgatttaatctttaaaaattcataactaattcatcttagctccgatttagttggttcaagtctctaaatttttctaaaattgagatctacacattaaaaatatccacatgtactgttcatgcttgtttatgtgctgttttggtgattttgctcttttctgcttagattccgtcgtttccggagagtccgttttcgcagaagaagagtttg

SEQ ID NO: 3265 - DNA, 890 bp, Oryza sativa
catctttcacgaaaaagacttgcgttacatcattggcaaggacaaaaggttggtccgagtatccaaccttgttaaggtcacccgttgtcatcccaatgtcatcaatcattactcctccaccagtcaacttaacccattggcactggaacagagggactttgagaggaccatagtcaggttcccatatgtcctcgatggcaccgtaatacgagccagttgttccatcgtgtcccatggcatcgacacgaacaacgctgtttgggttcgtgctcatcatgtcttgggctctcgtgtagaatgtatacccattgatctcatatccctggaatgtcgtgatcgacccagacggtcccctcgccaagaagacaagttgttggttgatcgactcgttacccatgagatgttgtcgtagccacgcggggaaagtatcaatgtgatgccgtgtaatccatacatcggacttaccgatgttcctggcgcgaactagagccaagtgctcctcgatgtatggagctaccaatgaagagtgttgtagaacagtgaaatgggctttacggaataaattgttgtctaccgtcataattgctttccttccgagagttccctttccccgtagtctcccttcatggcgtgattccggtaccccgattgggcgaaggtcttcgataaattctacgcaaaattcgatgacctcctctgttccataacccttggcgatgcttgcctctggacgagcacggttacgaacatacttcttcagaacgcccatgtacctctcgaaaggaaacatgttgtgtaggtacataggcccgagaatacggatctctttcacaaggtgacaaagcagatgtgtcattatattgaaaaatgaaggtggaaatatcaactca

SEQ ID NO: 3266 - DNA, 977 bp, Oryza sativa
ggagaggcatgcaccagacatgaagatcacctatatccctgaagggagccattttgtgcaggagcaattccctgactatgtgaatgagctccttcttgcattcttgaaagatcatcccgtggataaatagatgttattgtagactcaattgtgcttcacccgtagtacaagttggcgatggaaacattgtgctatatcatgatatgaattgtcaacaaataaaggatatattatggatggtttgttactttcagtaatgcatgtttgagcttgtgttgcgtttagtttctcctgctaatgttgtcagcaatgcaaaggccaaaatgttattatattttaacctagtattgcacttataccatcattttagcaagccaatgatgtgaacttataccatgatgttagcaagtcaatgatgtaaaagatggagtacggagttatttcttatatgtgtttgtgatgagcccatttgtggccgtgatgaccaagacctctggtcgttgctaggatcggccgagtgtgaagtttaggacgatttttttgtgaagtcgtcaaggatcaatgatggattccctctttatcaccgaatccgtcagggaagtctaaatctagtgttggtagggaagtgataactcgaatttgcttttttttttgtgtcgtattaaaaaggggaaaatttggtaaggtataaacttattgtagtattgcaaaacataacctagtttcttggttagacttatccttcagagcctagcaacttaggttaatgagacaatccattatatgccactgagtttgtcatagctctacgatttaccactgtctttgtcacgttctataatataccatcgacttttacttaacttctatgatttaccatcgccgtccagttagtctccgttagtactgtacaattttgtccaaatgaccaaaatacccctgggataaaacttccaaaatgtggacaaaaattccga

SEQ ID NO: 3267 - DNA, 8799 bp, Oryza sativa
gctgctgctggcgtcggtggcgctgctcctcctcgtggcgctcggcgcgctctcgctgccctcgggcggcggcgtcggcgtcggccacgccggcatcggcctcccccgcccgcgcccgcgcttccgcagatccgccgcgttcgagtcgtgcgtcgtctctcgcgcgttccttttgaattcctcccccgcccgcccccccgtgattgattgatcccctctctccgtgggatcccccgcgtgtggctgacgtgcgtgcgtgcgtgcgtgtgtgcagggggctggagatgcgcgggggcgagaagggggagccgtggacggaggtgctgtcgtgggagccccgggcgttcttgtatcacaatttcctcgtgagttttttctttgccttgttccttgttctcttttggtttttggggggaacaaaccgcgcatgttggatgatatgttcattctacgacgccatttcactccattgcttgatgagatcttcagttttttttcaggttcaaataaccctctaattaggtgtttttcttttctttttttggttgatatgatcgatttccgtccgtcctttgggagattcgcttgttccttattggagtaaagaatctggatggggtgggtaaatttggaaattgtcttgctttagatgtaggaatgccaggtgagatttagtggtgttgtgaatcagagacgggcagagtgggattgctttccagatctgagcagctgcaccattggcattgcactttttacagagggagttgttgtacatggatgtgttgttcttgtctcgatgtttgagctgcgccgaataatttgtcgtcttctatttatttctttttgaggttagagagtattcttgtagcaatactcactggcattcttagtcagtttcaatctttgtttttttaagtttcaagcaataaaattgaagttcatgttgattgttgatgagcttgcgtggagcccaacttttgttttactgcaactactcatatactcttgtttggtttattactgatcaagaaatgactaacttctcttccttctcagtcgaaggaagaatgtgagtatctgatttcattggcaaagcctcacatgaagaaatctactgttgttgatgcatcaactggagggagtaaagatagcaggtttggatatcgtagattattctcttgaaaacatgttacctcaattacaactcgtttaggcttaatggcatgtcacatgttcagggttcgaacgagttcaggaatgttccttggaagagggcaggacaaaattatccgtacgatcgagaaaaggatatcagactacaccttcatacctgtaggtatggcacctttaacacagtcaacttatcgacctcctgaaaaatagaataagtagtgcagttttccttttgctaaagtgcagaactttagtcattgtagaaaccatacatttaaacttcgttccttggccctaatacagataattgatatccctatatcatgaaacagtgcaaggttttgaatctttctttatcttgcaataccttatgtcactgaatcaccaaaacttacactttatagtgatgcatttgaacacttagctacctgctgtggaaccaaatatgaaaaagcattgcctttacagagtgcaattgtactgctcttgctctctccttttgatctgatattagcagagcaacgcccatagagaaatgttaaatccagatcacttgccagtaatggtttaacactttaactattgttttataaatccagatcaataagcagaaccaccaagaaaaacacaataagcacaataatccagatttactgagttactatggcctggtttagttcccaacttttccatcacatcaaaactttcctacacacacaaacttccaacttttccatcacatcgttccaatttcaatcaaacttccaattttggtgtgaactaaacacaccctatattgagagcatattagagctagaaagtctctgttatcagatttttttattacccctgagccctgtcattccttgaattctgttcggcagctgacatttgtgaccaataacacaaggcctttgcaagtacaatggtacataatgagcatgttgtagtacatgtgaaagtcaaacttctcatatttacaaaaaagggccagtgcatacttgaacagaaacccagaaagatctacacaccaatttctgaaatgtcctgtacttattatgtactcaaatttctttaggcttttcaaacattacatataccttttgagttattaaacgtgggtggtttgacactggcgcacttcaataaatagtcagtaaggtacacaaccaacaagatgcaatgtacatggccggtattgattttttttttcttttttgcagtcaggaataataatattattattacaaccaaatctgatggatagtcctaataattcctaaatatattcaactatcatcaagtgcaacaaattttttatcatagaaatcacattatttttttatttcaagtttgttgcaaatgttgttgttgttcctttctgttcatactcataatttcgcagagaacggagagggtcttcaagtcctccactatgaagttggacagaagtatgaacctcacttcgattacttccatgatgaattcaacaccaaaaacggggggcagcgtatagcaactcttcttatgtatctgtatgtactataatattggtaattcttatataatgcaacgccgctgattcatttgacatttgtttttgtcttatttgaaatttattagttctgatgttgaagagggtggtgagactattttcccctcttctaaagctaacagcagctcatcaccattttataatgagctgtctgaatgtgctaagaagggtttggctgtcaaacccaagatgggagatgctttgcttttctggagcatgaggcctgatgggtctttggatgccacaagccttcatggtgagattccaatactttggtacaatgtcaaattgttttgtagtgaatggttatgccacaacatgatgacatttctatttaccttcaacttcctctaggtggatgtccagtgataaaaggtaacaaatggtcatcgacaaagtggatgcgtgttcatgagtacaagatatagacatcagaaactagagattcagaggtacgagtgagctgctctgcaatttcctccacgtagcactgtctgttcacttggtttttttcttcacgcaattcaaatgtctgtgatcaacccttctgattcatttaaaatttgtttgatttatatttattttcaactctttgcaggttactcacgaattcaaatttgtcgatgttgttgcttaaagaaagaaaagaaaagcggtcatttttggcgcatgttgaggacttcaatttttccatagagaagcattacaattttttttagctgtaaccaacatgttgtacactaacttcttaggcttatgaacaatgatcatcgctttgcttatgaacaatgatcgtttcaaagcgatggatgtgtcgaatgtataaataataattgccctcctaaagtcgtaatgaaattcatgatataatgcctgatggactcattgacaaaaatagtctcaataatatgtgtaattttttcctaaaaagtaatatgtgcaattcctgcagagatctggtagtactccatctatcctaaaatatagcaatctacttcttccgtttcatattataaaactttctaacatgtccacatttatatatatatatatatatatatatatatatatatatatatatatatatatatatatatatatatatatatatatatatatatatatatatatattaatgaatctagatatatatgtgtgcttagattcattagcatctactatatgaatgtggcaatgctagaaagttttgtttcagaggtactccctctgtttcacaatgtaagtcattctagcattttctacattcatattgatgtatatgtctagattcattaacatcaatatgaatgtggaaaatgtctagattcattaacatcaatatgaatgtggaaaatggtagaatgacttatattctgaaacggaggaagtaggggctgtttggatggttgcctcaacctgccaagccacatattaggcatgccacacctgcttagcctaccgtttgtttagagaccagatttttggctgctacaaatagtctgccacaactcagttgctttgccattggttttttgggcaaagacgcggcgagcaaattattcgccacgcttgcggcacgactgttgcgtgcggagagagagcgcgctacactcaccttcgtgaagaacggcgtgaaaatccttttgtgaatagcgcgaaacatttgacgttttggcgcgaacaatctggaaaaaaacgcgcgaagctcggtatctccgaggctcccatgtttattatcctctcttgttcctcttttctctctccaattcattctcccgtgcagctccaagcaacaggcaactattcccctctttattccattagcttttttcatcttctgctccatccctttcagatcctcttttttttctttaaatcacacaagtaatctgtttcactgatgagtgctcaagccatggagcaatctgtttttttcctaaatcatctccatccccttcatcttatttagatccatatgttccttcctttccttcaaatccagattctaattaatttgttcctttcgtcagggcttgagtcatggagtaggctggtgaagaggagtaagtagtgtggctagagcaaagatctggccgtgattcctcgagcgtccgccatcgaatccaacgagccagcaagtttcatcacggtaagcacactgcacacagccgtatttgtttttttgggatttggggtttggatacttgaactttattttgacttctgaaaaaaaaacttatcatccaactgacaaacttaaaattttcgtaaaattatttagtaaaaaaggaagtgtacaagaaaacagtagccgttgaggctacgaactccatgtgttacgtgtagctctcaactctgacatatagtacacgtgcgcgtgccaccgtgtcatcgcccagcgccgcggcgactccagcaaattcgcgagcattttttatacaaagccccagccgcggcggccatgggaaacggtggtggtgggaacaagaaggggaggagagactcgccgtcgccgccgctcgagacccccccgcgcggcgagttgccgtcgacgtcgtcgtcctcctcctcgcgcgccaccaagcgtcaccgcgtggcgggcatggcggaccgctacttccccaacgacctcccggacttcgtcgccgaggcccccgacggcggccgcggcttgctgtcgctcccttactccagcctctccgaaaggctcctccgcgccgcgctccggatcaaggacaaggttaggcatgcgtgtgcctcggtttgggtttgggtttgggtttgggtggcgcgcgcgcgcacgcacgcaaggtgttcggctgatttcccccgaccgctccctgccccccccgcaggtcatggaggagacgtggacagggcgcggcgacaggtgacggactacacgctctacacgggcgcgctcggcacggcgctcctgctgttcaagtccttccaggtcaccggcaaccgcgccgacctcgccctcgccggcgacatcgtcaaggagtgcgacgccgcgtcgcgtggcctgccgtaagacgacgagccttttttttgttttcgttctgtacttctgttggttagataatcttgtactaccagttgatgagttgatacacctgggtgtcatggcctccttggtgttaaattaagacgcaggttcttgacattcatctgtgggagggctggggtttgcgctcttggtgcagtgattgcaaaacattgcaatgaccagctgctactcacacactacctgagctcatttgatgaggtgaggagccaatgcatgtgttcacatttctgtcctaatgtgctccatggctgtaaaacagcagatgttatgtctaaattctaacattgtagactgagctatctttgtttgtacttctgtagataatagtcactgagaaagttcccaatgagttgttatatggaagagcagggtatttgtgggcttgcttgttcttgaatacgcatctcggcgagaagacaattccccatgagcacattgtatgtctgtactgcgattctgttattttctttcatattgtcagttccatagtgctatagaaagcatcttacctaattttgtgaaattactgcaactgtgtagacttctgtggcaaaggacatcatcgatgagggaagaaagctggctaaaaaggggaactgccccctgatgtatgaatggcatggaaagaagtactggggtgctgctcatgggcttgctggcattatgcatgtcctcatgcacactgaactcaagctagatgagaaggatgatgttaagaacactctgctatacatgatcaggaacaggtatcctactggcaactatccatcgagtgaaggcagtgaatctgaccgcttggtgcattggtgccatggtgcccctggtgttgctcttacactcgctaaagcttatcaggtgactgcctacatcacatcattaaagtgtgtacacatgtttatccaaagcatctatgtgtacttatcttggtggttgtgcaatatgcatacatggtgtagctttgttttctgcatcaacaaaaatgtcagcgatttgacatcttgtgaaattcttggttgaagattagattccgcgtgtgatccaacatagataactgaatgtttctacttcaggtcttccatgatgaacatttcaagcagacggctgcagaggctgcagaagttgtctggaaccggggacttctcaagagagttggaatatgccatggtgtaagtgggaacgcctatgtatttctctcactctaccggctaactggcaatgttgagtacctgtaccgggctaaggcttttgcttgctttctgcttgagaaagctgatcagttgattgctgatggggccatgcatgggggtgatcacccattttcattgtttgaagggagggctgggatggcttacctccttctagacatggttagcccatcagaatcaaagttcccggcctatgagctttgaagggcatcataaatatatgtatcctgttaggatcaaatgctcagtgatccatccatccaaagtagctgtattgtgttttcttgcgtacccagtaatgtgtgcattgtaatttgttgtctttgtaaagttcagtatccagatggtgcaagcttgaacctttgtaaaatacatgtttgagggagttccttgaaatatgataatatttatgttggttgttgcctctatttgtttactgaataaaatatagttttgcctccatggataagttcagcaaacaccaaatttttgccatgctaaagtcatgagattaaaaggagtttgtattttcttagcaagtcagtatatggttgatgtttcagtatggtgtttagctgaaaacaatagatgtacatacatgccagagcaggctcacccaggttattagaacctttcatgtatatctagcatggcacaccaattagtttttagtagtttgtggttgaagtttccaggtttttgattttcttttgccccatgcgttgacataatgtacaagagagttattctactggaagttgaaatagctcttgcatcacatcctgctaggtggtacaaatttgtagtattaaacctgaaaaaaagaggataattttcttcagttgcacatttatttatacaacactaaaatagtttgcgataccatcatgagcacgacgttacaacgtcaactctttagtggtgcacatcagtgaacgcagtgctcaactgttaccttttgcagtctggggatttgtcaaattgcaccttgtttttgttgctatctcatgcatgtttactgacgaagtctatcacaagctgattcaccaggtcagggaattgctcctgaacaaaatgggatccttctgggatgtaagtgatcccgtagtctggagcaatttctttcagtttttcacttgacatatattccttcagtgctggaaacttgaggatgtagtctttctgacccataatcacaaacattggcatttcaaaccttggattagcaccttctgcttttgcagccttggtcctattaaatcaacacaagtgttagtaacatccttaggtttgtacaagtatcaaagtaattgtaatagcatcatatcaggacactgagaattgcttgtcatattttgttgtgttttttgcatgtgctcacctatatggaatttggatagcagtcatgagacctgatttctcatacaggtcggtgtaagctgagaggtcttcttcggtgaaccactgaggcatcggtgttgattcatctgcaaggtccatgatctcttgtccttgcttggcaactggaatctcactcctggagaagaggatgtagattgtgcgcaagatcctcctcgtgtcgaatcggccaaaatccgcctctgctctcccaggttcctactcaggtaacatagttgcatcacaacatcaatcagaattgcaaaacctatgttcagtataaatgtattgactgtaaactgtgtttaccaaatagtcagaaagaataaaaacttgatcgatgagtgtttaattaatttaccctccatctgtgtatgtaaaatccctcaggaagt

SEQ ID NO: 3268 - DNA, 11998 bp, Oryza sativa
taagagcgaattcaaggtggactggtgttttttcataattcgtaagagctggtaattatcacctcaaatttgttcatttttatgttggtttcttaatcgtattgaaatagttaaattttacttataccttcacactatcatctgagtcactttgtctcatgtgaccatgacctttgattatagaaggtcaccaacggtcaatggtggcctgattgagtttgcagttttatgtatatgtatatatcaccaacaaaaatgtcgttacaatgaaacagatggatggttggttcagtatatttctttttttttaacaaagaattaatagttcagttttacccgagtgtcagatttattactcaatacaattcttataaaaaaaaatcctttagttaattgtcttgcgcactgcacatactaccaacatttggcaatttatattggtatttcctttgtattcacaccacaataattcgtgtagttgctactgtctaatttgttatactccgatgcagagttcttttattactttcagttcagtctaggaccaataataagttcagaacttcatattactgacttggtcttttctacaatgaaatgcacactatgggatattttgattatcagattatggacataattttttatctaatgttatattttattttcctattactatttactagaatatgcaagggaaagaggaatcaataattaaaatattgatatggcaacttgcttcttgctggtgaataaacacttgaacaattctagcagctaacttaggtgcggtcaatcacagaatctttgttattgatcctatagtttcttgcaaatattcctaattgattgtgttgtaagcctaaagattgtatttactttttatttaattcagtatgcctttcatgctatactgcgcaaattgtgttgtaagcctaaaattctattcactttttttttaattcagtatgcctttcatgctatactgtgcaccactaaaaagcacgtcatagtttagattttaatagtaccgtgacgagcagaactgttgcacgttgcattcgttttgcatagcaacaaaacaagcatgtggtttctgttagtctattgatttattttttttgtcttttgtctctgctaatgttttatttgttgctctcatgtctcaaaatagatgtcctcttatagtaggttcgatcaagtgatgctcacgcaactaatatttttatttcctaattctctatatctgtacaatttcactctttttcgatatgatttaaattatgttctccagttaaattggatggtttatgggtcgcatttaactttgtccatattttcagtattatgcatcacacgaatgcaatatatactgatgtatgctatatatgatatctaactgatatagttcttaaaggtacaaatatgatttatctttatatttttctcaatgaatcctttgcaatcccgtagcaacgcgcggggtatcatctagttatgttaatatgaaacgccttttgttgtttactatcttctcattaaaatataatgcattaactaaaggtcagaacctaaagagtggcaataagatagcaatacaaaacaatacatacataacttacagattaatataagagtaaaatactgccagcattctattcatattgcaatctgatgtcagcggttcactgctgctgacatttaaaattctctttcaatcatagcaagttctccagaaatgatatgaatcatgattcttctcaacccagaaaacgctaaatttattgtcatttagcctaatcattagttcaagctcaacttgagtgatgtgtgccaaggaaaatcaggcatctcatgaaagcaaaaggcaaaatggccaaatgctaaacatcatggatcataccactattgcataatttcaaataaccatacgagaagacaaatccacacagcaccaagacgccatgacatgcatagaagaacgcaagttcctatataagcagttatgtagcgatctatagacaaatactcaaatccatgagccagttggtttgcacttgcttgacacaaggacaatgaaagaaattggtcagtaatacgcgttatgcaatcctacgtacctagtggacttctccagcaaggatcttatctgtttcttcatcagcctcgatgccatcttttttcatacgatcaagcaagtctgacgctggttctcctgcattgacatatgtcttcagtaacccatggtaaacatcccttgtcagaggaaccaatctctgtaataagcttgccatctcctcagctgcttctacattcttttgctctgcgaaatagtttatgctcatcagcacatttgccaggtcaggtttccattcattacttgcagaagcaagtgccttctttgtgagatctgctgccttcgacacctgaccaaccttgaaatatccaccagccaacttataccaagtattggaaaaaagtgtcctccctttcttgatgaattgatcaacaagagcttctgccttctccataagaccttctttgcagtaagcagtaagcagtatgttgattaatcgggaatcatggtaaacatgcttactttcccactcttcatatgctttctcagccccaacaatgtcattcatcttaagtaggacacttatcctgcacatgtacattgtgttgcatgccgatgccggaactttggatctatagacatcccagatacggtccacctcactgtccatctgtagatcggcatacatggttagcaaaaacccataagcgaccctaccatccttcctcgcagtaatcctcttttctgattcttgaaaagcctgcaaggccctttcttgcatcccagctttcatgaaaaccttgcctacaatggcaaatgagtgccaactcataagattattacacgatgccttctcgagaaccttttcaatcgcctcaacatcttccacatccgcgtatgctgacaccagattgtcaatagtgaaaatatcaggcacaataccaccctcttccatagccttatacatggagtccaccctctcaacctgcccgatttgcgaataaagattcatcatcgcattgtaagcataagaattggccatccccatgccccgcatattctcgaagagctcctccgccttctcgacgcgctcggcctccgcgtagcatctcagaagggagccgtagcactgcagttccctcagctgattcggcacagcgtcgaagtactccacggccttgtcgaggccatggaccttgctgatcagctccagccggtacgcgacgtcgccgggggataggtggaggtgccgccgctcggtcatccacatggaaagctgcaaaaaaaaaaaaaaaagccaccaaattgcatgatcagatgcggcgatgggggtgggcatcaaggatgaggagttcgtcgcgcacctcgagcgcctgggagaagcggcagcgacggcgcaggtacttgacgagggactggagctcgggcttcgagacggggcgttcctcggcgagccaccactgctccaggacgggggccagcgggatgcgcgggtcggcgcccgcgacccgccggaagagggagtcctcgccctgaaggcgcggcggcggcggaggaggaggaggtggaggcgagggggagacggtctcctcggcggacacggagaggccgcggcgacggcggaggaggccgccacggaggtggaggaggagtccccgccggtgcagcagcatggtggtcgccgccggcgatcgcgcggcggcggaggcgagggttttggggggaggaaggagagagtggcccgaaatgagcgtctcgtgatgtgtaaagaatgggctgaagattcgcagaagtagatcagcaaggcccattcaacagtcctgtttcggcccaatatttatgggccatacgtggatcacactagcgttttggcccatattaaatgggcttggaacaggccgcattggatgacaatcccattttggcccaaataaaatgggccaaacgtgaatcgttataacgttccggaccaacttaaagaaacagtacagtttttgcttagacagagccaaacgaacagtacgtacattcttttagctttagattttttttttatcacaatgccactacgaaccatcagaatcaaatgtcattctgccactgaaaagataaaaggtaatttgctgttgtgccactgaatgaacgaccgtgacaactcatccaccatttgcagcagcaatgggttcccaatttcccaaatccattacgcgaccgtggcaatcaggaaggtttacaaaaccgtgcggttatcacacggtaatcttattagtctttaaaataacgctatacctcatggtaaccatacagtttttacaataaccacatggttatcacggtaactgttaaaccgtaaaaccacgtggttatagtggtaaatgccaaaccagtttctacaataaccacgtggttatcgtggtaaatgccaaattgggaagtaatcataaccctttccaaaatggtttgataaacccgatcaggatatagcggccacggaaatgaagggctgataactgcgggcccaccaccggagtccaagaagcgaggatcaccggtgagctcgtttgcctcgaggtgcacgcgcgttttccaccattgctatgcacaagcgtttttgctagtaacaagtacaaaaatactagcagtattcatattaaaaaaaaatcttcatctgatatcagcgctgctgccatttaatttttttctttctaacttagcaaatcgttcagaaaatgatacgtatcatgattctacccagggctcccttcgtcccataaaaaaccaacctagtactagatgtgacacattctaatactacgaatctggacatacatctgtccagattcattgtattagaatgtgtcacatccagtcatatgttcgttttttttttggaacggatggaatagactctgaactgaactgattgacattttagactgatcattcattcaagctaatgatgagtgatgcgtgccaaggaaaaccaggccttctctaaaaacaaaaggtaaaatgctaaacatctcagatcctaccactactgcataattttacataaccatacgacaaagacatatccgcacagcacaatgacaccatcacatcacatgcatagaagaatggcaagttcctatataagcagttgtacagaggtttataatcaaatactcaaatccacgggccagtgggtttgcacttgcttgccccagaaacaagaaaaaagacacaaaataagtaactaaaaggaataattggtcagtgatatgttttatccaatcctgcgtacctagtggacttctccggcaaggattttctctgtttcctcatcagcctccatgccatcttttttcatacgatcaagcaagtctgacactggttttcctgcattgacatatgtcttcagtaacccatggtaaatgtcccttgttggagtaatcaatctctgtaataagcttgccatctcctcagctgcttcgacattcttttgctccgcgaaatagttcaggctcatcagcacattcgtcaggtcaggtgtccattcattactaccagaagcaagtgctttctttgtgagatctgctgccttcgacgcctgaccaaccttgaaatatccaccagccaacttataccaagtattgccaaaaggcgtcctccctttcttgacgaattgatctacaagagcttctgccttctccataagaccttctttgcagtaagcagtgagcagtaagttgattaaccgggaatcatggtaaacatgcttactttcccactcttcatatgctttctcagccccaacaatgtcattcatcttaagtaggacacttatcctgcacatgtacattgagttgcaagccgatgctggcactttggatttatagacatcccagattcggtccacctcactattcatccctagatcggcatacatggtgagcaaaaacccatatgcgaccctattactcttcttagcaatcttcttctctgattcttgaaaagcctgcaaggccctctcttccatcccagattgcatgagaaccttgcctatagtggcgtatgagtgccaggtcataagatcattgcacgtatcggccttctcgagaaccttttcaatcgcctcaatatcttcagcaaccacatacgctgccactagagtatcagtagtgaacacatcagcaacaataccactctcttccatagtacgatgcatggagtgcaccctctcaacctgcccatcctgcaaataaagcctcatcatcacattgtaagcataagaactggccatccccatgccccgcatcttctcgaagagctcctctgccttctccacgcacttggcctcggcgtagcatttgagcagcgagccatagcactgctgctgcttcagctgatccggcatgctgtcgaagtactccacggccctgtctaggccatggaccttggtgatcagctccagccgatacgcgacgtcgccgggggatagatggaggtgcagccgctcggtcatccacatggaaagctgcaagagaaaagaaaacaaaacaaaatcgaatgatgcggcgacggaagtggtgaacaaggggattcgtagattcgtcgttcgtcccgcacctggagcgcctgagagaagcggcggcggcggcagagatacttgatgatggactggatctcgggcttcgcgatagggcgttcctcggcgaggcaccactgctccaggacgggggaaagcgggaggcgcgggtccgcggcggccgcgacccggcggaagagggagtccttcttgcgccgcggcggaggaggcgagggagaggctctctcctcggcggccacggagccctcctgcggtttccccggcgagggcgaggccgtttcctcgtcatccacggagtcctcctgcggttgccgcggcggcggaggaggcggcgacggggagacggattcctcgaccgccactgataggcggcggaggaggccgccgccgccgcggaggaggagaccacggcggtgcagcagcatggtgggggggcggcgtcggcgctccggcgaagtcggggcgagggttttgggaggggagaggggaaggaaatcgcaaaaaaaataataaaataaaaaaaatgaaagggcgtctatagcaacgcgtaatgggcaagcccagctgcggtagcagcggatcagcgaggcccatctagcccaatcaaatatagctcgcgcgtgaaccgcaatccccctgtctcctcccctgcgcgcggcacaaggcatcaccgccaccacctactcttcttctcctcacaagggctgcgtacgttgacaggagaaaggggagactgactcgttttccgcacgcacttttttcaaactactaaacggtttgttttttataaaaattttctatagaaaaattgttttaaaaaatcatattaatctatttttaaagtttaaaatagttaatactcaattaattatacgctaatgactcacctcgttttgcgtatcttcccaatcccttctccctcgaacacagccaaggtcaccataggaatcctagcggctagattctcccggatccaaaacggcggcggagcatgggctgcagctttaacggcgctgaccgcggccactgcatcaccggcgactgcccaaaacacgatggcccacgctgtcactggcacgacgttggccaggtacacgctcgcaagtcgcaaccccggcgtcatcgacggcttcaacgtgccggtgagctttcagccaaccaaaaatgtcgctcgctgcactaagatacgctgactgacgtgcgccgtcgagatcagccggagacggggggttgcgacagcacatgctacaagtttagcaacgtacgacacctactatagctggcctgccaggggcagtgcgagcacccaccgaccaaatactcgaggttcttcagggacaagttccctatacgtaaaaattcacatcctctaccataatggtactaccactacaaccactgacgtgtggagtaataagaggatagaacccccatgtcagtgactataatggtagtgacattatggtaaaggattcccacccctgcaaggagggatgatcagagcagcatcttcacctccactgccggaaccaactgccatatcagttgcccatctccaaggttagacattactacatcacagctccttctctggagcaaaacatgggtattcttgaatgatgttttgaatattagttatgctgcaaagtacaacttgcttcctaaatcgaaattttaattggatattgaaacttttgctgctgtttaatgtaataaaacttgtaaatcatgttaaactatatacttttcaacatgtacaattaaaagcattcctttgctgatgcatgatttcagttcagttcataacataattttacattttgttggtggtttatgaatgcaaagcatattaagagagcacaaatgagattgtcaggcaacagggtaagtatgtgcttggtgctcctaaattgcatcagaaaatatattaggaagtatgattgtatgaatctttcatcctcattaagagaaagtactacttccattttcaacatgagtcattttttctgctcatttcaacgatttcaccattgaatgattgaaatcagttgatgatgtacaaaaataatattccccaactacagaaggagtaacctgaaatcatgcccttactccaggtgtttaaaaaatcagaaaatttacgaaaaaaatattaacacataaacaaaagattaatggcgccactgcaaacggtttattacttatgaactcacggtgttcaccccattagcatttcaaaggaatctgcaccatgagcacactggtactaattgtgtgcacctagaaggtcctgtaacaaggcagcagctgattgcacttatacatatctcaaactgcattttcttaaatatgaagtgttcctggagtttagtgaatctgggcaaagtaatattctcataagaatatccaaggcaacgatatgcatcataatgcgtcaaattgctaaaaaaattttctaactcagattgtctatggagacatgcatttagtgaaaatccagtgtatattcttgtagaactattaaacatgagaaaatctaagcggtagaagttcgcccgtagacactaacttcctgtattgcaatgaattatttctcatgtttaatagttcttcttggattccatcacaaccaaatgaaagagcttggcatttctgaaatctgtacatcttttgtcaggattgaggtcctctgcagtcaaatgcatagtgcctttatcactgacatatgggtccaagaatcattgggcccatatgtcaatgacaaagtcacgtgacttcgactgcagaggatcctgatcccttttttcaatgagcaatgcaataagttagtttctctaatttttattctttgtatgaaccgtttgttgatttacgcgcatggccaattttatctatatttttatggttgtacatttatatcctggcaaagttttaccccaatgtaagattgtacatactgaattattcataaaagaatttattgttggcaaatatataaccgaaaaacaataaccacttgattattcaaattaacgtggacttcctgtgaagagagaatagtgacagttcaccaccagctgcaaccgataatttaaagttttaaactgttgtaaattaacattctgaccataaaagaactaaaaatcatgtcagtttaaaagtataatcatgtaattaattttaattctcacaattgacatttctatacaacttatttaaataaatggccttttgtgtaaaataaaaaaaagacatactaggtttcctgctaaatatgttctctgaacatctatgtagaatagaattgaatttactaaaattatatctattacaagggaagtataaacaaattatattataaaaggagaaaatactaatttatgttattaaatattattttaaaaaaatagttaattattatacatctttatagagaaggaggttataatcgtgtaaacacgcaacactagtttagattgatcatttgatcattcattcaagctcatgatgagtgatgcgtgccaaggaaaaccaggccttccatgaaaacaaaaggtaaaatactaaacatctcagatcctaccactactgcaaaatttcacatagccatacggcaaagacatagacatatccgcacagcacaatgacaccatcacatgcatagaagaatggcgagttcctatataagcagttgtatagtggtttattatcaaatactcaaatccacgggctagtgggtttgaacttcattgccccagaaacaagaaaaaggacagcaaaataagcaaagaaaaggaattggtcagtgatatgttttattcaatcctgtgtacctagtggacttctcccgcaaggattttctctgtctcctcatcagcctccataccatcttttttcatacgatgaagcaagtctgacactggttttcctgcattgacatatgtcttcagtaacccatggtaaatgtcccttgttggagtaaccaatctctgtaataagctcatcatctcctcagctgcttcgacattcttttgctccgcgaaatagttcaggctcatcagcacattcgtcaggtcaggtatccattcattactcgcagaagcaagtgccttctttgtgagatctgctgccttcgacacctgaccaaccttgaaatatccaccagccaacttataacaagtattggcaaaaggcatcctccctttcttgatgaattgatctacaagagcttctgccttatccataagaccttctttgcagtaagcatccaccaataagttgattaaccgggaatcatggtaaacatgcttactttcccactcttcatatgctttctcagccccaaccatgtcattcatcttaagtaggacaccaatcctgcacatgtacattgagttgcacgaattggccttctcgagaacattttcaatcgccttaatatcttcagcaaccacgtacgctgccaccagagtctttttttttcttagaactgccaccagagtgtgagtagtggatacatcaggaacaataccactctcttccatagcctgatgcatggagtgcaccctctcaacctgcccattctgcaaataaagcctcatcatcacattgtaagcgtaagaactggccatccccatgccccgcatcttctcgaagagctcctccgccttctccacgcaattggcctcggcgtagcatttaagcagggagccatagcactgctgttgcttcagctgatccggcatgctgtcgaagtactccacggccctatcgaggccatagaccttggtgatcagctccagccgattcgcgacgtcgccgggggatagatggaggtgcagccgctcagtcatccacatggaaagctgcaaagaaaatcaaatcaaatcaaaacaaataggaatcggtggcatgatgagatgcggcgatggaagtggtggccaacaagggggattcgtagattcgtcccgcacctggagcgcctgagagaagcggcggcggcggcagaggtacttgatgatggactggacctcgggcttcgcgacatggcgttcctcggcgaggcaccactgctccaggacgggggacagcgggaggcgcgggtccgcggcggccgcgacccggcggaagagggagtccttcttgcgccgcggcggatgaggcgagggagaggctctctcctcggcggccacggagcgagggggaggcggtttccccggcggtggaggaggtggcgacggggagacggcttcctcgaccgccacgcggcggatgaggccgccgccgcggaggaagacaccacggatgtgctgcagcgtcgtggtggtgtt

SEQ ID NO: 3269 - DNA, 25065 bp, Oryza sativa
agcggcactagggaatgtgataacgctgttggtctgcaaggtacatgctaatgcagattgagatctgcattattccatcaaaggggtgtcgaatctttaagaggcaagagcaaactggaattgagaaatgaacaacagtgatactaacagtagtaggatgcatccatctgatagctgatagccaagaggaaggataggtcccattaagcttgttgactcaagagggtggaacattggtttgccaagctagtctgggtagcagccagcaagaaagccttggtcagcaccatcagagttgtcacggccaatctctcatgaagaatgcccttgaatacatccatccatagaagattgcaaatcggaaatgttacccgatgtcaaattacttgtttggcaccacagatgtgtgagcagaaaatattttcaggtgtgttaacattgaacgattatttaataatgatctgctattgcttcaataaaaaatgatctgctattgcatatttcctgtcagataggattattgtactattgtattctaatgaatatggaaggaaatatccagcctgtgacctgccaatgattattcgagtaatcacattcactatacagattggcagaatacaactcatatttcattaaaccatccaaatagtcaattgataatcaatccattggtaatggctcaactgtcatattaccaatccaatgccaccatcaacgcgactgtagtagtatgttcaaattttagcaatggacccttttactctaaagaacactatgtaaactcgcagaggtaccgtatttttaatcatcaacacaagagaatttcaaacagcatactgcttaagcgtaaaaaaaaaggacatgggacaggtggtattgtctacgtactgcttaatagggcttgcacttatttatgattgtcatgaaattcaccaatctgtatgagtttggagttatgtatacttttcacaggatgaatttcatgtgcagaagaagcttttttgctgttgaatactgtacacttgcagtcttggatttgaagttctgtatcaactatcaagaaaattgtttgtaaagcttctatattatgaaatcctcatgtgttcctaatctaggcagaaggcaccaattacctagtattatttgcttgtcgtgtatgcttcctgctattatgtccatattatttgtctattaagagaaattttaggtgggggattccttagcaatgatgtatgagttatttttttatgtgtatgccaggtaccctgcatatgaaaaattagcttctcttgaacaatgcaagaggtaattgactttattagcttctccaggaacttagacttttcccatcggtaatatagctcatgttgtgtttgctaagagtgtttgtggggtagttgggctgggctatggtagaaagctctgagaaatgtttgtaagtagtaactagtaaagacttgggggtccaggcaagctagaactaacatgcgacattgcaggaaatccaacgctgtaatttggtctcgatgaaaaagttgaaatggtgcactactcaaagaatgtccatcccttttctttggaagaacattatttcagatttcagaaaaaccaacttttcagaaggttgtaatgcaattgtttatcttttcttatatgaaaaggattgaattgctttgtgtatactgattattgcatcctggataattagaactgtagagttaagaacttgaataacacagcaacactgggacaacttaaagccgctacagtcagggactcagggataaattggtatctggattcttgaggctggtgcaaactcaaggaagaggtatgtcagctattttgaatctcactgtccttgatcgtttaaattattttattcatccattttgtgggcagtttcttaggcgaaagagatcatgaactgctataactgttataactgttgttactacagtaatatgccgtgctttgcaacgagccagaaccatataattggggatcagctgggtgggtggattgagaataaattactggatcgattgctacgcacacatgaagcagaccttctacggtgggaagggaacaaatggaggatatgactccgtttttaaagttgtagagaaaaaccttctgctactacagggtcttctccatcgaagtggttctctcatctgttggtgacttggtgtaatggtgtactatgtgtagatggtcatctttttgccgggccggccaagaaaggccaaccaaatttacttaggattgaagaatatatacaaatatacaaagttataacttcaacgagaagctgtcgaagtaatggaaattgtcaccggagcaacttcccaaaagcaaaagattacactaacaacttcccaaagtgtagatggtcatcttactttagtcagatgcatgaacctgaattgtagtgtcgcctgtcaacccagtgcgacagggggctgccaatcaattttgaacatgcgaacttgtaataaagttgttcagaagtgttttaacagcaactgcaagttttgattcgaaatgagtcattttcatagcatttttgttcattatctagtgcttggtgtctactgtggagtcctctgcttatcaccctgaaagaggaagatgaattcaaggacaaatctgttcttccatcgtgtgccatttctccacgccttctaatactaaaaaacatgtcgatcagtggagtcggcctgtgtgcgcattcatgaccatgtttttcacctccctggaactggaaggatggtaattcccaaggcctggtaattgtccctcatttgataataacattgtcacatactctgtcagaaaaaaaaaactaatcctagggatgtatctgaacaacgtgtatgtccaaatacattctcaggattgaattttttttatgagatggaaggagtagtcactgactgtgcttgccgccagactataaacaacaccacagaagttggagacaggcaatcaagcaatgcagccacgcagtcacctagtcgtcaccatcaggggcagatcaccgtgagtatcagaggctcaagctcttattacctaataggagcttcattggttgacttaataaaagcacatattaaaatttgaattttcaactgaattttagagttgattttaagatattttcagcataatttctttttagcgtcgacttttaagtcgatacgaataaacatataaaaattttatctataaatcaatttttatttcctaataaatcgttttgtcgtattaggaaatataggcaatcgatgatgccctaaatccttgtggagagacgaagaaagggaatttggaagaataaggccctaaaaaacttttgcgtgtcacatcgaacgtttgaccagatatcgtaagtggtttttagacacggatgaaaaaactaatttcataactcacctgaaaaccgcgagataaatttattaagcctaattaatccgtcattagcacatatgggttactgtatcacttatggctaatcatggacaaattagactcaaaagattcatctcacgatttccatgcaaactgtacaaatagtttttctttttatctatgtttaatgttccatgtatgtgtctaaaaatttaatgtgacgtttttaggaaaaaaatatgggaactaaacaaggcctaatatgagatatacacggtttatttttgcccctagtcagtgtttatttttgcttttttttttccctgagatatacacggtggaatgacgtggatgatcactcatgtcatggcctcatggggtccaggcctgaaccccacaactcgctgaactcgctatacggcaaggcgacgctgcccacctaacgtgccagataccacgaaccgtctcgcccaacctcccccacggggatacgtatgatatgtgtgcgccccctcctcctgccggctgacgcgacggaacgtgagtccgtcacgcgtggcgaactagtagagcgttgatgtcatttttaaactatactacctctctcatacacttttagctaatttatgacaaaataacaggattgaaaaataaccacagcgatcttatttaatgaacacaataaattcacacatttcatatataaaattaattaaaaggaagtttgagataattaaggaaacatttttagattaaaaggaagattatgggatggaaggcttggagatcataaggaaagatatttagattaatcaatttgttaggtcacacgtgattagaattataatttttgtgggataaaacctgagagccaaaattgtaatttatatgggacggaggtagtatcatcgtttattaagattgataaatatatgataatatttagtttgttatcaattattggttatgtttaaagaattttaacaatatcacatttagcctagagtaaattacagttgggccaccttttattgccaaagtttcactttggaccatccctaaactaatattttcactttggatcgggtaactttgccatatttccagtttgaaccacccaactctctttactattcatgtttaccctccattctggtgaagatatggcctgcatatagacggtgaagttcaccgatgtatcgaaaccgatttgattgagattgttgatgggcgctgaagaaattgtttaggatgatctaaaccaaaaaaatggtgaaattacccggtccaaaatgaaaagattggtttaagggtggtacagagtgaaacttggataataaaatatatggcccatattgcaattcactccaccttttcattaccaaagtttcactttggtccaccctttacctaatatttttactttggactagatatttttgccttctttgcattttggaccacccaaactttcttcgcgagcatattaacagcctcaagctcatcggcaccttcatgccgatgatctcccctgtttaggtgtaggtcacatcttctgccggaggagaggttggacatggctagacaaaagaattatggtgatccaaagtacaacaaaggaaaaaatacctagtctaaaatgaaaagattggttaaagggtggtctgaagtgaaacttcggtaataaaaggtggtccaaagtgcaactcactctttagcctattatattaaacttggtaatgttaccaatttgctaaatttttaacaatatcaattttttaaaaaattaaaaatgactacaaaagtgacaaaacttaagggtgtgttcgctgttccaggttggggaattggaatagtacgcacggaaaatagagcggttcattatcgcgtgattaattaagtacttcctccatttcataatgtaaatcgttttatcatttcctacattcatattgatgttaattaatctagacatatatatctatctagattcattaacatcattatgaatgtggaaaatactagaatgacttaccttatgaaacggagaaagtattagctaatttttttaaaaaaaggattaatttgatttttttaaataattttcatatatatatatatatttttaaaaaaaacacagtttagccgtttgtaaaaaaacatgcgtgagagaggttgggaaaatttggtgccgaacacaccctcagtttttctagccgcgcgcggggcggcaacgacgaacgaacggctcgcgcgcggtgggtgggtgaggcggtggcccgcgagacacggcgccggcagctgccgcgtgcccgcgtataggcgcggcccccttccgtgcgagagggcgcgcggcgtgatcgcgtcaaacctctcgtgtgccgcgcctttgccgccgccgtcgcgatcgaagccaagccgagcgcgaggggagccgcacggcagcaagggcacaccgcacacggctccaccatgctcgcccagccaccactgtcacgcacgcgcggcgttttgttctacgtacgtgttccatacgcgcgcagagacagagacggagggaaactacggccctgttttgattccaatttttccgtcacatcaaatttttctacacacataaatttttaaatttttcgtcacatcgttctaaattcttcagactttcaattttagtatagaattaaacacaacctacattgatcttagttctccgtaaagttccataaagtttgtagtcctgttacaaactttacgagtacgcaggaactacattgatgtgtgatatgcgtgttaacgtgagcaccacaaatttagaagtttttggttgacattcacactctaccgcagctaatcacttgttgtggcgacattatttctacttgtgaacaatgctaaaaagttttacattataaaacggggaaagtacgagtaggaagaggactgcaggaactacattgatgtgtgacatccgtgttaacgtgagcaccacaaatttaggagtttttggttgacattcacactctatcgcagctaatcacttgttgtgacgatattttttctacttatggagaatgctagaaagtctaataaattaggtctaacctgttattgtctcggaaagatgttactaccaaatgaactagatatttggccgaaaaccaaacagaaaacaatcacttaaaacaccgatgaacagtaaaacaaaccaacgaggaaattttggcacgtcgctttctgcaagggcgagacaatccatcgaccagtcctgcgtggcgacgtgctgtactgcgctgttcggcggccaacatgcgtagggaggacagcacgccacaagtccacaaccaaaacactactactcttacctctatcaactttttcttatatttatcggccaaaatttaaatttttaatcttaaatttagagctgatttagattttttttcatgaaagtttatttttcagcctttatttttaaatcgctaaaaacatgtatataaaaattttattcataaattatttttggtttgtaaatataccgttttggtttatttcatgaataaataagcaaaacaatggagccgactactactctatcaacgctagctgagcaaatggacggacggtcacgaggaaaagtatctctatcaatctcagccccaccaaccttgtgaggaggtgacatgggccaaacggtcagcaactaaaggacaggtgaaaaagccagctttaacgctgacgcctgtggctggctggctgctgctgctgccctcaacctcaagtggcgtagccgttcaagatgcttttctttttcctagtggagtagtatatcttttctttttttagggaaaatccaagagagccggtataatagtaagctataagctaattataaatatatttttaagagataaaggaagagagagtagcagcaggttacatatctataaccagctgcagcacggacttcaagacgtaatgtgtgtataacaaataagaccaagttagtaagcaattattatatgaatttgctattacattggttatagatgatttagagctagcagtggattatactattatacttgctctacgaagaagaaaaaaaaagaaaagatcaagtggatttttcagaaacctcgaaaggaaaatgtgaatgaatgccagtccagttggatcgtaatggggtaaagaaatttcataggcaggggccaaggaagggtaatgatgccgtaaagagcacgctcacatcgttccaatgaaaaatctcttcgacgatttcgttgttgacccatgctccgctcgagagatatttaaccatttaccatatttagatgtggcaattaactttttgtcactgaactcacatgtcatagacatatgtggacccacatatcattgagatagggatggtaaatagttatttatcaaatctaaaagtggcaaatagttaaaagcccctttgctggagcaatatgtttttcgctgtcaaatttgtacaacctaaaatgaagtctactagtggtggctttcagtcatctgcaatcactctcacacacacacacatcaggatttttttttctcacctccaggttttcaagctaaaatctgccttgtcatctcttcaacaaactatgctttgcatcgcatcatccgcacatcagaacgatacaatggagaagctagcttaacccccataaactgggcatgaaaaaaattctgacaatagaacagaacagcacaaagatcattggcaatggcagtaagaatggcaatggctctcctgcgtcgaagacgacgacgacgacgacggtctgcaggggctcgtcggagtccgaaccaccggcaggccacaggctcgccggagctcgtcataccggcggagatcgaaatcccgggcgtgcatcaaccgcttctgcttcgccgcaaaccggctctcgaagaagccctcgaaggagggctccttcttggtccggaggaagaaggtgtagccggccatgaagtacatggaggtcacatagaagcagatgggttccatgacatcccatgagagctcccagaatgtgagcctcatgaagccggcagtctggacgacgaggtatgccagccccagccaaagctcacggcgcacctggagcgccgcggtgcggtcgatctcgaccttctgcgcctccatggccttcagctcttcccttgctgggccatccaaggcaatgggttgcgctctcggaatcggtatggccttctcgatggctttgacaacctgcaatggtgaatagaaagaacaaaaaaacatttcgaaaatttacttggttgctcttcttctcaacagagaaccatcaaagaaagagcgatgttcgcaagagaagattacagccatgaaatgcgaatcagttttcaaatgattaaatttccaaaaggaagtgcaagatataattgtgtttccaacacattgcaaatgtgttttcaaaagtaaaagaattatttgatactgaaagaaaaaccaatattgtgtatattgttaggacaataatgttaaattgcttaaagaaaagaatccccacgccgagccaagaggatcagtctgtgcaggataagattgtttagttggacaaggaacatatgccgcaaaagcctcaacctctatttttatacttatatgaacagcaaaaaagactgtaaaataagaacagtttacttccaagactaaaacatgcaaaaaagattttcccaaaaacatctatgccatgcccaccaccaccacttgcatggggtaaattgccaaattgtctgactaaccgcacttgcatggaacaaaacaaacagtaaatagtacaaattatgctgcctacgaatgctgtgacctactctagatcagatggcatgtgacagtgtccccctttactttggctaggtcaggacataagaaagtagatgtgtcataacctgttagccgtccattaatcttctagtattattctaatgtgataaagatgtagcttatgtattcaacagatattaaaaaaaaagggcttctttactcatgatagtgttgattacttgatttccaactagtaaagtgaacggtagcagcaatagaagcaagcatgtaagaatgtcaaaaagtaagaacagaagtaagaatttgattctgaaaagtctgcaacactgctaattatctatgctcctaggtccttgaattcactcttaagaatttccaattaattcacattttatggttgtctattctctaacttcaggtgattctcatttgctgaaccaaaactagaaattcttccaaagcaacttttaccaaatagtaagccaataacaaggacaccactatgagctatcctgcgttataaaccagaaggagctgatctaaaaataacatacaattctagcaaatgcacagaaaaggttatggagcaaaaagggaaccacctagtagcacaaaattgtttgatatgtaactaactttcagttttggccctcaaatttgttgggaggtatcacaaagttaaaaggtactacatcaatactccaccaccactggcatgtgatggggaatgcaatggcatcttagatactgaatcctctgccatgcaattcaaacatcatttttatactatcagttgtgcagcccatgccctgtaagagagaccaaatatgtctccaattgttgtcctcatgacatggcatttaaattgcatggtagaaaatccaatagaatactaactatgaacatttccataaatgatataatatcagggaacataaaagttttgagtatgtgctggatgatgactattaatatgcatccttcctccaaaaattttggctgccacaggttaattctcctcatgttcattcatcggagatcaagattaaaattatcactaatgtcaattaagttctctccttttctttcttgctccctcaggtataagatttgaggggctaaagaatagtttttttttttagttttgtttttagtcgatctggttttgtgagaagaaaagacactcccatgtcggacggagtaaaaatccccaaactttgtgtgtcaacaactgctcttactaccgtttaagaacagcgccctttctttcattcttttcctgttgggaaacatacaaagaaacacgcggaaaatctcatcagatctcgacacttctgaattctcaacccggtcacccggaaacaaaaaaaaaagaaaaaaaataactgcaaggagagagaaaagatacgagaaaccagcgtgtatttctctcatgacatgctaactgcaaaatcaaaaaaaaaaaaactagaacaaaattgggagaagagacggatcaagcaagcggcattaaattaaggtggtggatttgaagctgatgagatgggggggtggatcgtaccatctcgggcctgaggaagacggtcttgccgaggacgatgacggatccggactcgtcgagcgcgcgcgcgacggaggcgccggactccgcgccggcggcgtcgcagcagagccggaggaactcggcgtacggcacggtgcccgcgcccgacgcccgcagcctcgcccgcgccgcctccatctgcgtcgcccgcagcaccttcctcgcctcctccaccgtcagccccgccaccgccgacgccgacgcccgctcctccctcgccaccgtcggatgcgtctgcggcggcgccggggggacgaggccgtcgaggttgatgcgcgggaacgcggcgccgaggtcgcggatccggtcggcgagggggatgaacccgcgtcgctcgggcggcaccaccggcaccgccgcgggccggaacgccgtctgctcctgcatgaagcggcggagcccgcacgccgccggcggcgcccgcgccgccctcctcatcagcgccgccgccattgcaacctctctcttcctctctcctcacggagctcggaaatcgagggaagcaatggcaacaaaaaatggggggaagaagaaatcgaaacgcacccggttcacgcagctcgtttggtgatttgtgggggaagacgaagtgaggggggtggaggctatttatactccccgcgattcggacgcggcccggtcggtcggagtcggagtctggcccggtcgcatccggtcggaaggtttgggtttttggatgagtacgaaagtttgttcgaaattttgccaaatttcggcagggcccttcgtaccgtcggtgacgacggacatgttcacattactgccacttttaacattaccaatttttgagtaacaaactaaacataattaaatattggtgattctgggtttttcctcttcccaaaagctttttcaaatttgcgtaaggctttaaaccaaagggtccaacatgactaaatctggtaacactaaaatgttgctaaattttagtaaggttttcagcaaggaagtgaacaagcccaacatctcgctcaattcgtcgaagttcgtacggtgatattttgacacaggaaacatggggaagtcatgtgttatactccattgtagccagcaatttttgaaagcctttaattgagtattactaggggattataacacctatttttcttgtattgattacttgctttgaatgaaatttggtagtcgtagtacattccagataggccggagcggaacgtgtttcttgcttgttctgccagttatacatgacttgtattattgcggtacgttttggcatcgtgtttttgttggtctagtactcctatatgattactgatttttttttggtatgtttccacttggaaataagaaatttcctcatggatatgtgcttggtttttttttctaaaaaaaatgtcactattgagccgaggtgaggtaatcgtcatttgtacgagcatccccacattcacacgtgtcagaatttgtgtttatccttttttctagatgaaaatggtttgtgtttatcattacatccttgtttattgacggtaaggtcgatttgaacataggagtttcacactattcatgtttaaatgaattttagttttatttcaaatgctataatttttcaaaatgtatgattgaactagttatccgtgatagttttctccaaattgttcactaaattatttcgttccaaataaggcatttgtaagaaaaacagttcggttttcggaaaatgttgaaattaatccgtcctcgttttaaacgggttctaataagtgggtaggtacgtagcaaaaggccgtgagcttaaaaaaaagtgaaaagcatatacatattaatacatatcctacatagtccaaaagaagctttggattaaaaatatatgcacttagataagtatggattggatcaccagctcccgatgacgatgaagtgtagggaatatttcgtaaaattatgttgcttcttgcagggcgcatgaagagcctcagccccacatgacacaactacacgatgaagaagaaaagtccaacaaaaaaaaagatttgagcatgagcacaccttacgcatatacaaatccaaaaacatccggacgcgcgattgcatgaatcaaaacttcacatcaaaaacattatattgatttatatatagagagatactagaaaaaaaaagtctcgcgcgttgtaataggtaaatgttattttaatcttattttttatacggtttagctaaagtaaaattcactgtataaatttgtttagatattgtttttataagttagtatgagagtttttctaaagagatttctcatacgactcaatctatatttcaaaaaacgaacaaacttaatattcgactcaaatacaaatatgtaatttcaaaaaacgaataaaattaaaaaccgattaaagatggataacataccagagataacataccagagtgcctgtaacaataattttaatttttataacagtagggatatatcactttatgccacgagttaatgtgaacttgtcaataggcatgtgtcctagttgctgcggcacagtgctggctgctttttagcctcatttagccttatcgaacagtattatattgttctaaaaaaagaacagttttattttttgtaaaacatatttttcttaataaaatggatatattcattctagaaacctgacactaacactctgatcttgcaaataaaagagaaaatattataccactcgatgatttcatttgatatgtctagatcataattaattgccaagattgatcgtggttatatacaaaatacacaattataatcataagatagaaatataaatcgcgtattaaatcaaatacagttcgatctgctccacacaattacacaggaaatctagtttgtcactgctccgagctttattgttatcaactgtcacgcagttgcgtgaatcgattcttttgttccgatcagcatatgtgatcgaggcatcaatcctggtcatatcattttatcgagcaagtacgtaagattaacagggagatcgacacaattcattatcacccgtgcaatgctttagaagaatatgtaaacctctattacagccgaagtgtctggcacgcaaaagctggacatctttggtgtgtgcgtagtactaacaagacatgcatgcaccaactcccatctatctatataattcttccaaaaaggctcaaaaggatattggtgtgaggcacagcttgtgccggtgttatctccagctttgaatcgtgttccacataccagcagtaaggaatataatatatatatcaagattaaaacaagtcaaaatattttataaatgagttttaatagtagagtttccaaacatacctctatctataaggaccacttgaatgcgttttctagtgcatgccgatttaccatcaaacacaccgtatgtacttagtatgcctttgctatctcccaaattaacaaacacccatattaaatctagtatttcttttttttcctaaaatataacacatactaagatacaccgtatatgtgattatgtgtactactatctatatactatattattatatattgtagaatggatgtagtattcatacatgttgacaagttcacttgaggagtcttgccattttaactacgcttaggccttgtttagtttacgaaaagaaaatttttgggtgttacattggacgtttgaccggatgtcagaaggggttttcggacacgaattaaaaaactaatttcataactcgcgtggaaaccgcgagacaaatttattaagcctaattaatccattattagcacgtggatgttactatagcacttatagctaattatagataaattaggctcaaaagattcgtcttgcgatttctattcaaatcgtgcaattagttttttattttatctatatttaatgttctatgtatgtatttaaagattcgatgggatgtttttaaaaaaataaatttgaaaactaaataatgccttaattctgaagggatgactgttagtatcaaatttcccccaaaacaagaaaagtgactactacatcgttccagaaagttcttttgggtcgagttgtctaaaaacagagcacgtccaggtccatcacggatccatcaaactagcttgtggagtactatgggctcgttcactttgctatcatttttaatcttaccaagttttggtattaccaaattttagtaaagttgctaaaattttgacaagattgtcaaattttggtaagatttcatatctacttactaaaatttagcaataaactaaacgtagccaaaattttagcaactttatcagaaaatagtatgtttgaaaataacatcaaagcgaacagggcctaagattatcctctcttttcttttttgacacaatccaaagctcaagctcatccacgagatcgttcaccgttcacccaaggtgacaccccgctgtacgcgcggccgcgtacgtgtccgcctcgcccgccgcacagctcaacaccgtctcgcagccatacgagctcgctcgctcgctcgctcgtcgtcaaccgcgtgaccggccccgacttgtcaactcgtcgacaccgcgacgcacgcactctcccaccctccctccctcccgctgaccccgcaccgagtcgcggctgcaccgggcagcgactccccccgtacgcccaccgcttcgcgcagcgcaggtgtcgcgcagcgcggcatccgcgcccacgcccacgccccacgcgcaacacgtactacgtacgtctccccgcgcgcgcggggatggaggagagcgagcgcgagacgctcgtgaccgaccgacctggcgccgtagcgcgcgcgggcgcctcctacccgcgaaaaaaagtcagacgcatgggtggagactggagaggatggggagatgggcgggggcggacgcggcaggccgtcggcgcgcggtaagacgtcgcggtcgccacatttgactggcccgcggccgcggcacaacgcgaggagagaggccagggccacacacgactgcccgaggaaaaggttttcgtgctgcgagtgtgacctcccctggttggcgatcgatgcgtacgtgccgcgcgctgttgcggctgcaccgtacgcgtcaaacagcaaagcgaaccgcttgatctgcacgcacgcacgcacgcacggcctcccccgctcgccgaagccgaacagctcgggttttcaaccgaaagcgtggacgtttcatgagaacgtttcaaccgcggcgtgaacggctggttgctgtggcctgcagtgtcaccttgtgcctgcctggtgctgcgtgcctgcgtttcagccacgggttgatttgatggctcggccgcgacggccggcaggagcaccggctgaaagcctgggactcgcagggagctggatttcatttaacttttggcttttttttaataaaacttacttgtttagattaaaaaattttggcaaaacatcacatcaaatatttggacacatgttatgggagtattaaatgtgaaaaaaaaaccaattacacagttcgcatctaaattgcgagacgaatcttttgagcgtaattacaccataatttgataatgtgatgctacaataaacatttgctaatgacgaattaattaggcttaataaattcgtatcgtagtttacaggctgaatttataatttgttttgttattagtctaagtttaatacttcaaatgtgcatcgtatacttcaaaaactttacacccaaagaactaaacacaaccttattttacaaatagattcctcaaaatacttattttataaatgaacccttttcacagcgctaatgtcattggcgccatgtgacgttagcgccatcccatcatcccccgttaaaagctactccctccgttccaaaatataaaggattttggacagatggaacatttcctagtataacgtatctagacaaagaggaagtgtcacatctatcaaaatcccttatattttagaacggagggagtaagtaaagggggacggtaccaatatcattggcatcgaggatctattcataaaaagaataaataaaaaaagaccaatttgtagtaggaaaagatctatttgtaacaaaaacatttacaaataaatcctcgacgtcggtatcactaatatcaaggaccaattgtaaatattttttattacaaataagtttttttacaaacaagtcattttttacaaaaattacaaataagtccagatatcaatgatattggcgccaccccctttcacattagtaacttagctttcaccggaggtcgaggggaacgacaccaacgtcattagcatgtcaagttagaccacggcaccattgatgttgacactgaaaaagaactatttctaaaataagtttttttttctattagtagaataagttttccaaaatattgaaagatgaaaaaaaaaatcagcgcagagaccttcacgcttttatcgtctcgtgaatctggaaagttcagctttctccgatggatttggaatatgttttgttttttcagaatttctgaatgcccggctttctgtatcaacacaagcttggaatgtgaataactgaatctggatgctagctggctagagcgccgaaaacgtctaggtgtcaactgaatgttagttttcattttacatacagaattacacaggcaggatagatacacattctaaaaaaacacacttctcttcactttttgcccgagaaaacggcttggtttgtgccacagcacaataacttccaactgtatttttacggttaccctgttcctgcaatttttttctacaattgcacggtagatgcatacatccacacaccactacatataacagtaacatatttacacctcacgtatacatcttgtgatcaacggcacctcataatcttactaaaatcatattgaaggccttttacatgtgcatttcaattccgctgataaaaactacactactctctagccagctaaaaatgtacccaaaatatgtttcttcatatagattcagcattcatgaatcccaaaccgatcgaagtgaaacaccgtacgtgttttcgaggaagagcactcccgacatgtcggttcggctttgccggctggtagatgcaaacaaaaataccatacgaaatcatggggaggacaggctaaaacaataaaaaaaagaaaaaaaatggagattttggattgtgtggttgtatagctgatgtatattagtatatgctggcttgatttgatgggaagattccttgtaagatctgtgtaaccttgttgccattttatttcctcagtggaaaaaggaatattccttgtctcatggatatgccctgtggtaaaagcttcatgagagagtgtgtttagcggtggacatcttagtaatgtcaaagccaaattattcttattacgactgtaccatctccatatataattggttgattggttgagttcaataaaacttcttttataaaaaaaatgttttgggatataacacacatatatgtagacacataacatcttgtatatgtgcctaattataatgttttgagagcaggtagaactttttttactaccactccatttcatattaaatttaagttttcaagttgtatataaagattaagaaaatgtgactttagagaaagtgattttttttagagtatttccatttccacacttacagtccgccacgatttacacgcgacgcgttgactatgtaaaaacactgcacggaagaatttgtactacgtactttggtttggcagcatcgtatgaatgtgaagttgggcttgagcttatcgtggcacggaaacatacggtgggtacttagtgtacaattaattaaatattagtatgtttgttttctcaaataaacttctagacagtagttttgcacgagatatattgtttagcaattctgaaaaacatagtaacagaaaatgacggagaagcccaactgaaaagaacgatacacctgataagctggctatggttgcacaactgtagcggccacgcgccgaaccgtgaacttttgctattgggtacctacatccttaggctctgttcttttggttgagttgggaactcatccctccggtacggaaaacgaagcagtccattagcacgtgattaattaattatttgctaatttttttttcaaaaatggatcaatataatttttttaagcaactttcgtatataaactttttgcaaaaaacacaccgtttagcagtttgaaaagcgtgcgcgcggaaaatgagatgggggagttgggaactccagcaaacgaacagagccttagagcacatacagtgagaagaagtggcgagcaccctcaatgcgccacgtccttgccgctgctccacattgattggtcatgtgctctcgcaatgtttgtaccgtaccgccttgcaatgggcacgatagcctggttagggcaaggccacttgttgcggagccacacctcacgagacatgttgagagcatgaatatcctcaacgcgcatccccgttcacgcgcatttagaaagggatgggctcgacattgagatcctgagcatggaggcggtggtggttggagaagaggggaagttctagtagttatgttgccactgcgaaactcatctacatggaaggtcttttaagtgccagttgtacttgcacagaagttttgtgtcctcaactatactaggatgcctctagtagtaacatcataacaagcctcaccatggataactcaataatcttctcgcatcatggacctcgtcaactagagcccccaccagctctgtgcgaggacctacagtctagtgacaaactgacaactcgatttaccaaacgatgtcgcctcaacctactcgtcgccatctcaatatgcgctcgccaacgagggaggacggtagagaggtctactgctaccatgctcattcttcatgcgtagaccaccctgtcaagctcctcgctccatcctgcaacgaggagggtacgatagcagagaggatgacatgatggaaagggaggagaggacacaacagcgtgggaggatgctagagagggcggtggccggataaatcactagagaaggtgggcaggggcaacggcggaatgggatcaagcaatcaattaatggagtagattttatactcatttcaaaattttagggtgtctaatgcaaaattttggacttagatgtgagttttcttaaatatgaggactaaaataaaaaacgataagggttgattagaaaaattaaagccacaccttattgtgggagaggaggtaagcctcaacctatatatcacattatattacctctcctctcggaccggtcgtcagggtggcctccgtccactgttaatgcccttacaaaacgcaacgttgttgcttactgcttagagcaagttcaatagtatagccaactactagctccaattcttctatagtcaatctaatagatcattcatacaatagttacatattacactattaatatctggtcccacctgtcatacacaccccgcgtcttggagtccgtgctacagctgtttataaatctgtagcccgctgctcttctctctcctcatttaacttcttaaaatatatttgtagctgacttatagcctgcttttgtacttgctcttatgaagaggtctgcaggccgggaatcctctgagcagttagcttgggtgcattgcatatgcaacgagttagctaaccacagcctgttggtctcctgacaaaggcacttcctccccatcacttccgtgccgtttccttcaccaagacaccaacaataatgctccatccgagactaggcacaagtctttattaaaatatcggaggttacgatcgagctgacaccgccaagataggtgtgatgagagagatccagagtcatcagacagtgaatcgagcaagcaacgcgaggacacgtacttacgcactccaaatattaaggcgatcaggcgatcagcaactgcactttgcaaattcggccgatgatagcgtatgcgtgatcaattaacgtgtaattcttttacgtgttcgcaaaaaaaactagattgcatatgcatgacacctacacacgtacacggtacacacgatggatggatggatggattgggcggctcaccgaactggcctcctctcgcacgcacgcacgaaggcaggcagccagctagcatcgaggacgtacgtccgagccggcgaacggatctctcccgtgcagcaaaggcgtacgtatctcgtcgcggccggcaagacgtcccgggctctctctctctctctctctcgtctccaggggatcgatcgtcggtggagcacgcacgcacgcactcatgcacaagagtgtgatcacacaatcctcggctcacacatgctaattaacagctggtgcacgcatgcgctagacgaagcggcgtacactaacacacaaggccatgtgtcatgagttggaaactcatctcccatacatgaaaacagaatattaactagttattttttaaaataaattaatataattttttaaatcaactattctatcaattttttttaaaataatattgtttaacagtttaaaaaacgtgcgcgtgaaaaacgtgtagaatgaagttgggaacactgagtaaagaatacatcgtgagagcccgaggtgctatcaagcctaagcgatcaacaaagtttccgagtatatcagtgatcccacgtcgtagtttttgtaaaaatacgttttagagttatcagtaaacatcatttgatagtggagatgctagctgcggagcctaagcaagacaagtttaactgctagttccgttgttagggtgccgcgttctaaataggggttaggccgacctaatctctcgtttactgtgagcacgcttctaaacggtcaaacaatatattttgtaaaagaactttttatataaaatcaaataaacctattttgaagtttataataattaattattaattaattaatcatatactaataatacgatcccttttacggtaccactaactagcttaaaccaacagctatacaaacacaactaagggcctcttcagattatagccaaaataaatcttaccaagttttgtcaatgccaaaaatttggcaagatggcaatattaccaaaattttaatatgatttcttttgtattgattaaatttgacaacaaactaaacgtagacatttttttggctactttaaaaaaaatagtatggttgaaaatgtcatcaaagtgaactggccctaagttagtgagagagtatattgaaggaaacctggttgacatatgagatgatttgtattacagtgttgctagaaaactttcaaaaaaaaattttgcccccaaaacttttagatttgcagcaatcggatcgcctcgagatttatacatgaaagggaaaaaattgctagaaagatttttttcatacatgtcacacgtaagatctcggtgctagccaatcaaactaagctgaatacaaattttatatactccctccgtcctaaaaaaaattcaacctaggagcggatgttaaccctcctaaaacaacgagttatccatattcgttgacggaacgagtaagttatatcgtacttacagtgtatataatataattatactttagttatagttatatttgaaaagttttctaaaaacaactgtaacagttttctagatacctcccatcacggaaagattggcttattgctcttctaaccggtgtggcagccacgtagataattcaatttcctcgatgggattacaccgtttcgccacttccggcaagtgtgggggagggtacaaattaacgtgccgttgccgtgtcatatggacccacctgtcacatgatcactgtgctggacactgatgtctctggagtctagagtctataggcaggtggtggcaatcttttttttttcatttgttttttttttgggcgtggcgtgacaatgcccacgagattttgttaatgggaagatggggtgatgatttcataccactagccttttgtcactaagtccttccactgaatggggagaagttgctgatgaaacagacaaagatgactctaatgagacatcgtagtcaatttctttccaactcaaccgcacatatctattgcctgacgttggagtcgaggacatgaggattgagatatcatctatagtactatatgtgcagcgtatatcacttacatataagttcaatgtaagttagacctatatatcagtcacatctgttacacatatagtactttcttcattttataatataacgatcgggacataccgaggcatgtacatattcatcgtactatgtagcatcccattcgattttagattgtcatattatggatggagactgaagagagtaatactacggatgatgcgtgtccatgttatacacattgtattatttattaagtgattcttgaattatggcttgtttcaatagatggagcaattctttcgaactatagtactctagtgggacgattgaattgaaatccatatccgaaattttcttctcgagcaatcaacggaaggctgagaagaacccctgcttatcatcgattttgtggtactcacacagtggataaacaggcgtcgttagaggttttttctccaaattaaggtcagaagatgtctaaacaatcccttaaaaaaatgataaaatgaaaatggccattagccaatcagtaaggtgtccatgtgttgagctccttgctgggaatcttataattttggtgtaagtacagaaccaactcaacagatttgtacgatgacgctgagattcgttaacatgccaagattctgattctctttaggcagcgagcttagcaattgtactcatatataggcaaagagattcctttcagattcttgctcttgcttaagccaactaaacacgtacccaatggagaaatgcctcaacgagtcagtcgaaagcgatcaacggagaaaccacacactatcagctatacatatcaacgcatggtgatcatgtaactatcaccaaaagagccaaacaaacggcctttgttttctttaccctttttgcagagataattcgccatagatcactcggcgacagcgaaaaacgatgtccatgaatgtgtgagttttcttctgaaatttcttcatgtccatgccacgccggcctctgcacgagtgaagaccaagggcagcaaaaagaacaactcattcaggatgtgatgccacatggtgttgatgggaagaatatgggtgattagtcgctgactggacggacagaccgctttgtcaacaacaaatcaaccaaaagcttcacatggctttgaatcgaagcggaccatggcgtagggagagaaaacaaagaacttaaacccgcgcggcctcatgtatcatgcatgattgttacaaaaatgatctaaaaactactaaaaacaatgacatatggtgtcaagagcaaccaccatcatgtaaaaagacgacagctacttctaagaggagttgcaaacgtatgttttggcaaggagctaggattgatggaaaaaaaaatcaatcaatcaatcaaacaagctgaagattcaggtttgcataccagattgcttgcaatttcaaaatcaagtctgaacagctctgcaagatggtaatcctatatacctatacaagtgatccccactaactgcagttattaccaattctctgcactgtggttgatccacgtcatccaaaaagatagcagccgttggatgaaatctcaatggtatgatatcaatgcatatgttatcctggtgagaacacccaagtattacacacgaaaagccaagctgttcgctccccttccccacgtagatgcggcgccgcatggttccccttcccctgcgctgcttcccctccacccgctcaactccctccctccctccctcactccctccccgtgcgtcggttcccttacctggccagcagtacaccagggagctcctcactcccataggctgtggctccctggtgagtattttactgctaatccgttttttaattcctgtaattgacggttaaggtgagaggccaaacttcttggatttcttttaaggtgtgcatctgccctcaacccttccctctcctcttttgtaccaccgatcatgtccttctttgcaggtgccctcccccctttctctctctcatacgttgctttgtttacactttacactgctcgatttgatagtttgtttcaattttctta

SEQ ID NO: 3270 - DNA, 1238 bp, Oryza sativa
gccgaggagttaatttttgaaatattggatcaaggtatcaatcccaacattgtgttttttaatacaatattggacagtctttgcaaagaagggagggttatagaatctaaaaaactctttgacctgttgggacatattggtgtgaatcctgatgtcattacatacagtacactcatcgatggatattgcttagctggtaagatggatggagcaatgaagttactcactggcatggtctcagttgggttgaaacctgatagtgttacatatagcactttgattaatggttactgtaaaattaatagaatggaggacgcattagctcttttcaaggagatggaaagcaatggtgttaatcctgatattattacatataacataattctgcatggtttatttcgcaccagaagaactgctgctgcaaaagaactatatgccaggattaccgaaagtggaacgcagcttgaacttagcacatacaacataatcctcatggactttgcaaaaacaaactcactgatgatgcacttcggatgtttcagaacctatgtttgatggatttgaagcttgaggctaggactttcaacattatgattgatgcattgcttaaagttggcagaaatgatgaagccaatgatttgtttgctgctctcccggctaacggtttagtgccagataattgcacctaccggttaatgctagaaaatcttatagaacaggggttgcttgaggaattggatgatctacttctttgaatggaggagaatggctgtactgctgactcccttacactaaactgcatagttagaaagttacttcacaaacgggaggtaagcaaggctgaggtttacctttctaaaattgataaacataacttccacctagaagcttccacggttgagtcgctggttttgctggtttccaacagggagtgtgatcaatatatgaagtttctcccagaaaagtatcgccccgttctgaaatccagggctggttgatactgcctgcagttacactgctgtaactagacattgttgatattcttatagaccttattatataaagatgacattctggattgcagcataatgggagatctctctttttgtctgttatgtgtggactgctagttatgaagagcaaacccctgttccaggtcatctcgaacaaacgactactggttatagcacagttttatcattcctggcatgcgtacctgataatggttataatcactg

SEQ ID NO: 3271 - DNA, 4829 bp, Oryza sativa
gcatatggcttgtcattctgtgtcgttgccggagtcgatgaggcaggtctcgacgccgccggtcatccagagaaccaggcgtagctgctgcggtgctggctgctctgcggctcctcgtcgatggcgcgggtgaacatgtcctccgcgccggcgaggtcgccgcgtgcgtgccacatgaacagcgcgtacctcctcatcgcctcgccgtccaccggctccgccgccaccgcctgcttgaagtagtcctccgccctgttcgtcaccggcatcgatcacggcatcatcgttaatggcgaccacgtacggggagcacgcgacgtcgatggcggcgacgagggtgtgcgtacctgtcgaggtccttgtcgaactggtagaggagctgcgcgtagttggagaggatgagcgagttgacgtcggcggcggtggcgatgatcctctcgtacgccgccttccgccggtggacacgggcgatgtcgatgatctcctgcaggccgtcctcgtcgtcgacgaacaccggcgtgtcgtcgtcgctgtgcatgatgccgatccgggaccagagctccgtctccatgtcaagctccaccagctccggcatctcggcgtcggcgtcctcgatctggtcggtgtcgccgccgtcgttgtcgggggcagcgttgctggccgccgccgccaccgacgcggacggctcgacgttcttgcgtttgatccggtccatctccgcctccatgaccgtgccgaggcaggacgcgacgaggccgaggaggccgacggcgaggtcgggcgactcgaggtgcaccttgcggatgacccacgccatggcgtccccggcgccgcgcgcggcctcggcggcgcccccggccgcggcgccctgcacggcctccaccgccgcgaccagcgccgcaaccgcgctcgtcccggccgcccgcggcaccaccccgcgccgcaccgcctccagcttcctcttcgcctggatcgcccgcagcgacggcggcatcgcggccatcgacggcagcggcagaatctgcctcttctgctcctcatccccaccaccaccgccgccacctccgccgcacgccgccgccgccgccaccacaggcctaaagaacccacccctccccctgcccctcccccccccgccatgaacgccggcggcgcgcacctcgtcggcatgccaaccacgatcgccgacggcgtcatcccaagatcgaagcccctcccctctggcgttcgttacgatccgatcgcgagaggctctcccaccaaaggcggtgctgtggcagtgggggaggagggcgcggcaatggcgggggaatatatagccgcgcgcgcggcgcgctcccgcgtgccacgctggtggcgagctaaaggcgcgtgacccgcacgcctcggcgagggggaggtgtcccggttctccatgcgcgcgcctcgcgcccgcgtcgcgcgtcgcgcgcgcgccagttcacgtcgggctaattttcgtcagggagaagcctcgatctccatcggccgcgcggcgctctcggcgcgggaggtggtggttagagagcttttggccaagcgagccgcgcgccgcgcgtgagcgcgagctcgcgtccacccgggcgccgtcgggaccaggctggaagacgatgcgtgcgggaggagtagtggccggagtggagagcggagggtgcacgcgcgcgcgcgcgcgcgaggccattcgagaaggaaaaaaacgggaaaaggttgcggaaaagttaaaaaagaagaagaagaagaaaaacgaaggtgttttgttgtgccataccgccatgcatgacagcgtgatgagttttcggggtaccactggagctaaaatgtcgatgggtgtaaaatttcaaatcgagagaaaaacccaaatcttgatggtaccattgtgagtgattttacggtcgttaagaggtgcccgattaaatttgactaacatataatgttatcgaaaatctctctctcaatataatagaagtgatccgaattaaatgtcacgatagattattttttttctgcatttcgcgactaaattcccgacaatatatatggttggagtacacggtaggtgtgatatgctttacacgaatattgataaaaaagagtgataagagaatcggcggtgcaccgtaggtttccaccattttgacgtggaaattctcatatatatatcgtgcacgattaaataataaataatgttgtcggtatcgaggataagctatgacttggcacctatgccacgaaccaaaattaaccgataatttggagaaaatgtatacaacacaagataggtaaggtaggcacataaaacaagataggtaagataggcgtgtgatccataaatatctttgtcatttggcgtaaaaatatcacagcaaacacatatgatgacgcattaaaatctattttttccaagtgaatgtggacacaataatcaagaaaccatgactaaatacttcctttggtgatgctctaaatcgtcatatatatcacataaatcgatgcaaaaacataaatcaacgttatagtcttagaaatcacaaaccattttttctttatgaaagtatgcagtagttcaacagttactcaattctctgttcagcggtaagctagtcacggtaacacgactcatgttttagagatatttaactatttgtcacttttagatgtgacgtttaaaaatttgttattgaacttagacacgtgaggacgcaagataaattattaaagggactatctacaaatcattcgccataaaacgaacccaaacgcagtcggatttttctctactgctaatccatacctaacgatttagtggacctccaactacgtacacccttttacgattaattagggactagtacgtattttattttttaaaccatatgattaataacacataaaaattacaatgtaattattctataactagtaattaatgtaagtggtatgtaaactgtagtgtgagtggtatgtaattacattgtaactgtagtgtaagtggtatgtaattacgttgtaagtgtggtgtaagtggtatgtaagtgatatgtaagtatggcgtaagtattgtaagtacctagtgaatgaattttaacttaattttggcattgaaatcattaatcctactatgctgagttggttagtcactctgtctaagacctagaagaccatagttcgactccccaccactgcgtctaaattttttcctttgcactggcgcgaatctcgatgaatatcgtacgggcaagacctacaagaccatagttcgactccccaccaccgcgcctgaattttttcctttgcactggcgcgaatctcgatgaatatcgtacggacaacaattcaactgttttttgtttgaaaatctggcgacacatttatagcaaatgtcattagaaacaacggacattctgtactttttttttaaaaaaaagaaacaagtttcaactgggtaattttgtgtcacttgcatgtgggtccatatcactatggatccacatgtcagtgacacagagctaggtaacgtacgtgtacgtcagagaatcttgttccgttcaccgcggggttgggcaacggcccaacgccaaacacagtatcagtcttccgctccactgctccttttgctaggtcgccggagtccgggcatctcgccgccgccgcgtccttgaggctgggcatgtcacgccgcgtccccgctcggagtacgcgaccgaagggcgaggaggccgcgcgggtggcagtggcgccgaggacgcacgccacgtgtttgacgaattgctccgtcgaggcaggggcgcctcgatctacggcttgaaccgcgcgctcaccgccgtcgcgcgcgacagccccgcggccgccgtggcctgctacaaccgcatggcccggtccggcgccaagaaggtagtggctcccgacttgtgcacccataacatcctcatctcctgctgctgccgcgcgggccgattggacgtgttggtttcgcggcgttcggcaatgtcgttaagaagggatttagggtgaacgccatcaccatcaatactctgttaaagggcctatgcgccgagaagaggacgaacgatgcattggacatagtgctccgcagaatggctgagctcggttgcataccaaatgtcttctcctacagcattcttctcaagggactgtgtgatgaggagagaagccaataagctctcgagctactccacacgatggctgatgatggtcgctgcccacctgatgtggtgtcgtataataccatcattgatggtctcttcaaagagggtgatgtggacaaagcttacatcacataccatgaaatgctggaccggagggtttctccagatgctgtgacttacaactctatcattgctgccttaagcaaggctcaagctatggacagggccatggaggtacttacagtgatggttatgcccaattgcttcacatataatagtattatgcatggatattgttcttcaggacagtcggaaaaggctattggtattttcagaaagatgtgcagtgatggtattgaaccagatgttgttacttataactcgttgatggactatctctgcaagaacggaaaatgcacagaagccagaaagatttttgattctatggtcaagaggggtctcaagcctgatattactacctatggtaccctgcttcatgggtatgcttccaaaggagctcttgttgagatgcatgatctcttagctttgatggtacaaaatggcatgcaacttgatcatcatgtcttcaacatattaatatgtgcatacactaaacaagaaaaagtagacgaggtcgtgcttgta

SEQ ID NO: 3272 - DNA, 1647 bp, Oryza sativa
gtctgaaatttctgctgtcaactgttgcaacactgactgattgatatggtattctattatctgtggggggcaccctaattttggcaaatgctttctgtgcaatgtaaagcaagaaattcttatactgattactataccagtgcatgtgaaattgtgagttcagatttgagtgcacatataaatggtttttgtacatatctggagaattcactcaagaagtatgcagcgtattttgtatttctgatcacaaatttcatttaggaaacactgacatttttgctccagttgaactgcaaagtaaatggtatcctataggtatgacccaaatatatgcagtattatgtaagtcagtacaaatttacagtacatttgctcttctaaactcattctagcctcccagagttatttttcttttcttcaatggctttatgtcttcctaaaataacatcataccctgtttgctctggttgttagaggttgcctccactgtccacagagccaaacagatgcgagcgtgcttttgtcgggaacacaattggtcaggcaaatggggtgtatgacaagccactcgatctccggttttgcgattacacaaacgagaaaactaatctgaaaggaaaatctctagctgcagccttgatgtccgattcaaagtttgatggggccgacatgtctgaagttgtgatgtccaaagcttatgctgtgggggcaagcttcaaaggtaaactaactcaccttctgtcattcatcacactattgctgcattatttccaaaatcatgtacctttgaattgataaacagaacactagatgcttatatctcaattgttttcaggaacggatttcacaaatgcagtaatagaccgtgtcaattttgagaaggccgatctccaaggggcaatcttcaggaacaccgtcttgtcaggatcaaccttcgatgacgctaaaatgcaggacgtcgtgtttgaggacacgataatcggctacattgaccttcagaagctatgcaccaacacttccatcagcgcagactcaagattagagctgggctgcagatgatccacccaaattcccacctttctataaccgtttatgtcaatgttaacagtgtttcgatgattaagtcaagcctgtttatagagccgacatgaatccttttcttcgatatgtatctacaaacctctgcacaacttttcttccatatatgtagtatttacaaacctctgtacatcacacatattcggcatgcaatcaaatgcactacaagccacattttgacattcatgtactcacaatctgtgcaaactgcaaacaccagattacacaaaaaggaagaacattatgcctctcccatacatagagattgctcacaatttctggaataacattactggtggttttatgcatgatttattccatgagatcactatagcaacactctacattaccatgtgtgctagcttgcctgccaactcttttgttgcctctctcagctcctgccattgttgccatgcatgcacactgatgatcagttcttcttctatgctactcgactactatatatagccatgggtaggtaggccatggcgatgcctaggtgctagctgcaccgtcgtctacatggccggcccgtcgccgggcacctgc

SEQ ID NO: 3273 - DNA, 24771 bp, Oryza sativa
gggggccggcgtcggcgctccggcgaagtcgggtcaagggttttgggaggggagaggggaaggaaatcgaagaaatggggaataagttcaccgtacgtccctcaacttaacaactagtattttttttggaataagtccactttggctcccttaaaaatgacccgaatctaatccatgaccctaaaccgcaaaaccggatatctcgacccccgaactatcgaaaccggtgcaatttgactcccttggcggttttggagggtggtttcggtgacgtggcgctgacgtggcggtgttgacttagtctgtggggttgacatggcgcttaggtgtcatttgaattaaaaacggatatgtgggacccgtttgtcattcacacattaaaaaacatggggcccactgacatgtgggacccgttcttcttcctcccttctctctttgtttctctctctcctctttggccggccaggccgccgggggagcacgagctggagcggcggcgggtgggggccagagcggcggaagctgaagcggcggcggcggtgggagtggtggcggatggcgctcgccctgcaggccgactgcttcaccagcgacctgagctagctcatcgccgacatgatgtccgggtcggtgccgcttgacgcaacacgcaagcacaagtatccctgggagggtggccatcttgggtgtgttcaagcgagacaaaattaattgctcccccctgcctactcatcctattcttcagtggatggtgaacgacctgctaacggtcaattttatctctggttagttgctaaatgaatcaattttatttctagatttttgtgatgcttgtggccttagcagcactagttgaaggagacgtaacgggggatgagttggtggcgatgatggggctggcgcgggagttgacggccacgcagcgagctcgagcaatgacttgacgacgtcgtcgttgcaatgctgaatggcgtagctcgatggcggccctcgcccctaactagcttgacaggttcgatgtcggccgtgtcgtcagcttgtcgcatacgccggatgcccggatcttgttgttgcaatcggcggagaggccagagcgccggatattgttatcacggacggcgagaggcggcggagggagcagggagctcgttccccggtgagggcgccatgacggtggaggtgaggactggggttagggcgcttaggtgccgtgccgtcgaccgccgcccccccgctcgatgtcgtcggcatcggcgtcggcgctgccgtcctttcccgcctccttgccggtcatcgagctgcccgttgccgctctggaacccgccgtcagctctagcccgccgccgctgcttcagcttccgccgaccaccaccactctagcccccgccgctctagccgtgctccagtccccgcggctggccgaaggggagagaaagagaaagaaagagagaacggaggaagaggggaggaagaataaagagagagatgatgacatgtggaccccacattttttttatgtgtgtgaatgccaaacgggtcctacatatgtgtttttaattcaaatgccatctaagtgccacgtcaaccctatagactatgtcaacaccgccacgtcagcgccacgtcaccaaaaccgccctctaaaaccaccaagggagtcaaattgcaccggtttcaataatttgggggtcgacatacccagttttacggtttagggtcatggattagattcgtgtcacttttaagggagtcaaagtggacttattccttttttttttagattccttaaccacaaatttagaaatatgtaccctaaactcacacaaaccgtgcactcaacgtcctatgatataatatataggtggtttcacttacatggcatcctagtcaggaaaaaaaagtgcgtgagacctacatgtcagttgcactttttttttctcttctctcgtacttctcatctctattctcttcttcagtgagggaggctggcggcggacgagaattcacaagccacacaagctgctgtctggtccatggatcacaacttgaacgagttgtttgagcttcccatggatttgaggtccttgtacggccccgacgaggtgagctcctgctccatccccgctgggtagccggcacaccgccgccaccgctgctgccttctctgccgcaaccgatgaccccacctaagctccggaggccagactcgcaaggatcagcgacagcgctgctgtcacggccttcacgccgagcgacatgcccggctgcgtcgagctccgcggcctcctgacctctcgcatatctgattttgcggttcgatgacgttttttatctcactgacaagttgagagaccttcagtgtactttttcctaattttgctaaggctatgttcgtatggggtggatgggaacttattccctccgcatggaaaacggaacggtctattagcgcgttattaattaagtattggctaattgttttttaaaaaatagattaatttgatttttttaagcaactttcgtatagaaactttttgtaaaaaacacactgtttagctgtttgaaaagcgtgcgcgcggaaaacgagggagatgggttgggaaaaaggagttacaaacacagcctaagcctagctgcggtagcagcggatctgtaaggcccatctagcccaatcaaatatagcccgcacgtgaaccacaatcccgttccggcccaatttatatgcgacttatgggtggctcatataaaacctcgaaatcaactccaaaattaccaaaattaagttttaagatttaaattttggcatcagcattatataatatacacgttatgtagtaaaagacgtggcacgtacgcaaaatgctgtttatctcagacttcactgtaaaatcgccaatgacaccagtatatcacagacatgcacaaattatgcgtacattctaattttctaaagcaccctctattaattgcgataataaggaagttgcaacgcttcaaggcagagcgaaagcgaggcggcaaaatgaactggcaatataaccgtactgaacaggtcgtcttagttattagccgtactgaacaggtcgtcttagttattcttctgcagatgtcacagttaaaagcgatgtggcacaggcatatatctaagtttgaaatacggatctatgaatacaagaaaatgccatcaatagagcaaactcgatggtcgacggatggtagaaacaccaggaagaggaagatgcggatacgacggtaaattttcctcactccgaaagcgtggacttcagctctccactcttctccagctcaagaacgatgtcacagcctccaatcagttctgatttgtagtacagctgagggaacgtgggccagttggagtacgtcttcaagccttgcctaacctcctcgtcggataggatgtcgaacgctccgaagctgactcctgcttgcttcagtgcattcacaaccttcgaactgaagccgcagcggggggcatctggggtgcccttcatgaagagcatcactggggcagaggaaatcagggccttcaggcggtcttctagactttctttcgcaacgatccctttctcagatagaaccttcttaagctccccactcttatgcatctccataacaatgtctgatccgccaaccagttcaccgtttatgtacagttgagggtaactaggccagtttgagagaagctttagaccctgcctaacctcatcatccgtaagaatgtcaaaacttgagaaagggatcttctcttgcttaagaatatgcactagttttccactgaatccacacttgggctcctcaggtgtaccttttataaatgccatcactgtgctgaaattaacaaggctttccaagcgttccttctgagctgcagtaagcaaagctggttcagaaactgcaccactcttctcagtatcaggcttggctttcactgcctcctcgtttttgcttccctgtggctgcagcggaatgttgtgctccttaaaaacatccttcagttcaccgctttcatgcatagcaatcacaatatcacatccaccaagcagctcacctttgcagtagagctgaggaaaagtcggccagtttgagaactttttcattccttcacgtacatcgttatctgttaggatgtcaaagctcccaaattcaactccttcctgcttcaaaacgtcaactacttttcgactgaaaccacaccttggttgctcaggggttcccttcataaataagaagacgggatgggaattgacaagctgctccaatctcttgttcaatgcatcttctgcactactagtggcagaagctccattttgctgtgccatctcttgaaccttttcaagtacagcaggcccagcagccacacccaggctagcaggcacagcagactcagcaacgctggcaggcccagctaactttgcaaccttattggccaagctggctggatttgcaccctccagagtatcaacagttttaccttcctgcaaaccccaaaaaaacaaagacacaaagatgacaacctctttaagtaaaaagcatcatactgatatttcaaataatttgctaacaaatattcagcaatatactaaaggacctatgcatgcaagctttaatagtaataatcatatgatcaggtgcattggttcaagagcacaattcacagctcatactgattgtaagtccatgaattgagagagactgtgtgttacaccatcagacaacacacctcatcagatgtcataagatacattcataaggagtctttagtgcagacagttatggtgcactaaattacacaacaaggtagaatctttactgcacctctaaaaaatggtaacttcactgtaggcagctaatgtcagtggagacaatccaaactcattacttcagggtatatgagcaagcaaatctgatcactattttgtggaataaaaaaattattgcacctctcatcttgttggaagaatacaagctacttattcagcattatagccatactagcattatacaaggctagaactcatccgcatcaagttagtaaggaagagtatcatgatcctaccagaagttattatgcaaaaatatataactatgtgaaatggttcgtgtcagaacaaattatataaaggcagttgcgaataccttcaagaaaacaaaatatggcactgctgtaactccatatgcctctgaaatttcgggttgttcctcagcttcaacctgacaaaagttactagtgtatgagaaaacaaacaagcaaatgatatagaagtcaaattctacaatataatacagtgattaacaattactagagagactaataggaatataagtaatgcccaaagaaaaatagtcacaaagaagagctactgaattataacagtatttattatataacactcagtttgatggtatcactcaatgaaactacagaataatccagtagcaaaacgaatcataattatgtaagggactggaaatatttatattttgtctcatactcttgagtcttgacagatttcagagtccactgagaactcaaaaggttgcaggacatattctagcgctaagagtatggttcctagcacaatagcaactagtcagacatgcagtaagctacaacccaaggtggaataaacagtgaatcggtgctaagcaggaaaatgatcagcgcttaaggatgttacacaactacctcttcaggagttgcattcaaccagtaagtcaaactggataaacaagttggatgggcaatcaaagaattgtacgctaagcaggaaaatggtcagcgcttaaggatgttacacaactacctctttagttagttgcagtaagtcaaactggctctttagttagttgcagtaagtcaaactggataaacaagttggatcggcaatcaaagaagaagaattgtacttgatagttgatacatccctacacaatactatgaagtaaaagaaacaacaccacagttacaaatcaaacacagaagtagagcagcttcaatagcatttatcctacacagaacatcgaagaaataatcactatcaataatttatatactatgggctctatattatggcagaactccaggcagccaggttagtatcaacctctcaaaaacatatacctacttcccagatatataaaagcaaactaattccaaatctactcatgattcttgaaacaagattcacaattcatcatccgaaaaacatctcatatgaatctactaaaacaaatggtaggaaatacagtatgtgaagccaccagcaagcaagtcactgtaaccttccaccaaaatccttaccacaccataaccctaagcgaactaaacagctcaaatctaccgcgatcggggaggacaccagcagtggcacgagcgcacgcacgtacccggaggaagacggcgtgggagaagtcgacggcgaggtgcgcgaagacctcgtccatctgcttggacgcctcgcaccacgccgcccagaagtgcaccgcggcggcccgcgcccctcccgccgccgcctccagctccgccttcgaccccacctccctcaccgccgccatcacgccctcccccctcccctcccttccctcaccggcgacgacgagagatgcagcagcaggcggcggcggcggaggagagatgagaagacgactcgcggcgggggggcttgcggcttggggttttcctctgctttcctttttttttttcggttttttttcttcttcttttttacctcccgtgacgaggtgcgaaggcgacggaagattccagaaggggcgggcggggcggcgggtgggccggaaagtctcctggtatttgggccgcttcgggcccactcgttaggcgagttggacttttttttttttcttttctgagcgagacgcggtggtggggtctcggcgccgccgggagcgcggctgcgggtcgggggagtgaggctataaaaggggtgaaaaaaggggaggggttcacctgatggggaaatggactcgcatggccagaaaccctagcctccatcccctcccgagccttcgccgccgcaagtagatctgagactctctgttttttttccccttttgtatctgaatctctctgagcaatccagcaggatcagatctgtaaggcgtaggagtagtgatctgaaatccgtcagcagtagttgatacatctgggtttttttggttattgttgttttttatgtgatttttgtggtttgtgtgtgagttgggtgaatcaagtggatcgatgatgcttttcaagaaatactgcgttatcttcctgattacatgtgaggctgttgctatcatggccatggcctcctgatgacacaattatcttgctgagatccaagttgcggtaactttgccctcttctttttttcttctcttctgaattttttcatggtttttgggagagattttcgttacttgattacagttctaggaaaaggccaccttgttcaaacagggctttcttgaaagggatcaatttgctaggagtacatgattctaaaagcgatttcgaaataaaacacagttctcgatctcatacctgaaaacaaaaggcccatactgtgtaaactgtgattatgcttctgttaaaatgggatatttgtacaaaattgacgccaatcacctataaacagattgtgagcttttatcttagtaaaataaaatgtgacattctactcagtgttcagtgatccgatgtcgtctcttctgcgtacaacttctaacagccgttttcggtagtacaaactagcgaaacaccaaaaacgcagcatttgagttctggaatacgctgaaattgttagaatcaaccacgaaaccaaaatcattgttcagaaacgttgcaacgagataaaacacaagaacttgttttaacaaagcatacggacagtacatatacggttacaacacccagtctttatacagttctgctggagttccatctactggctgtcattgtatctcaggacagacaggttaacataggtacaacgcaattacaggctaaaccgaagcgaactacactgtcagcatctctaacagtatcgtcaagcaagcttatttacagctgctctagtaaatttacaacgtccctggcagaatccctctcgtttctggcagcgacgaggcacggtccatggccttagcaggacatctcacccgtcagctgcatagaaagcaaccgacttcagtggaatcacctgctcctgcaaaaaagttggttcgatcaatcacgcgtttaatccaaaacaaaatgggtattaattatgctagcctatgaagctacctcagagttctctatttgctctgcagggaaatgaagtccagtggaacagttctcaagcacctcagggctcttcatccatgctttgtgtgcttcaatggctttcagcttatagcgaaacatctgcgatacggatctaaaattaaggatgtcgacaattacttaacacaacaaataattgaagcaggtccagttaaagaaaagtagcagcgaagaatagcactctgaagtctgaacctcagataaagaaatggttggtttttccagttcatctccctcaacatggattccagtaccctggcattctgggcaaaggatggatgttattttcttaggtgcattttttgcctttcttcctcgattgctttttcccttgcttgcaattttgtctgctagcatctcatattggcataaaatagtccagtgcacaaggcaagaagtgtgaaacaaatgaaatgcctgcaaaattagccgtacaaagtcattggaggttgcagcagaatactacaaatttttaaagaagaaactatacactgtctatgttttgcttgaaatgaattcaaccactttgcattatacggtttggaatccctggtttgtgagaactgtaattccattacaacagtgaagaagttaccataactaatgaatggaaattagtcaaatgcctaattttttaggtttgctttaatttatttatctgtgagaaatgctaagcatgtcatgcgttgctatcttcaagaaatactaagaaactgcaaaggcaaagaatgtttgaaataacttaccccgcttgagtttctactgctgcaggctagatttcctgtcttgcagttgagcaaggtagctacatccttttcaagaagcattggtcgcccacaaatatcacaagctttctcagcagcaaggcgcttctgcttacgcaactccctcctcatagatttggtggataagaggccaacttgaagattgtgtgaagtacctgtcggggaacctgttatgatagcttggctattgtcatgggcggagctgctttgctcattcgactcctctgaagatgcttcttgatctgaaaatgacttctttcttctctttccacggtgtccagcatcatcaatcacgaagaaagatccagcagagataggaaggtcctgatcatcagaagaccacttcctgcccaactcaattgtataagagaagttgacaatggcaaagtcagattgctcataggtgtcacactcatccaagccatgggagccatcctgtcctacccaagcacaccagatcttgctaatctttttacttcctttgctagcttcccataacctgtatgcaatatttccatatcccaaaagatgcacaggcataatccgaaacaacatcctttagcaatacactaggaataacgagaggaccgtcagttccactttggtttgacagcacatgatcttcagatacagaagcagttctaccattaccatgcgcatttgcaccacggcgtgtgccttttgcgccattgcgagagctagaatcatctctcaacctcgaagtcacttcagtgtcgttggctggaaccagagccagctctctggtgttctgcgagctcgagtccagcaagagcgggtccttctcgcgcgagttgttgaagaagagcacgccgtcgttgaacggccatggcatgggcccgaacagcgtgaccttagcctccgcgtagcgccgggagtgcaggttccccttcaggtgatcaaacagcacggtgtcgctgaagcactcggtgaggcagatggtgcagaagaagatgacgcgcttgccgacacggcggagctcaacgtaggtgtgcccattctgccggacctccctcagcgtcgccttggcggcaatctcgcggatgtccacggggccgttctttctcaccaccaattccttccccaccatggagaaaccccctcaattcaccaccgaagctcctcctttttccgctattacagatccctactcaaatttcccaccaaaaaaataataatcccccaaatttgctttcaaaccaaactgcttgctgttagcactgcaccacgcatcaaaaaaaaaaagaggaagaaattccagcgttaattggagggaaatttactcaacctaaattcgaacggatccctaatctacacccccaccgctggggctgccaccaccacgccgggggggtcacgatgcggagcggggagggaagagagagacggctaacgaataccttcaattcgagccgggaggcgacggggggcgtcgggaggggcgcggccgcgtcgtcgctccgagcgttctctcgccgccggccatgcgcgcgaggagggggaggtcgggaagaggaagaggaggaggaggaagaggaggaggccaccctcggcgcgcctccgggagtgctcgccggggcgcgggcgcgcgtggggtggggtggggaggcggcgggagatggtcggcggtggcttcgccggggagaggagaggagaggagaggagagaggagatgcgtggagagaagggaaggtgagatgaaggtgaatggtatgggcgggcggctttggtccgtcgttaacttttttttttctctgtggactccgcggggacaatgttgcgtgggaattgggattagtgagttcgaaagatgagtttttggtaatcgaattaagggacacatatgattttgatagaaatataagcgtaaaatagattattgtaaaatataggaaaaaccgtttgattgaaccgcaggaaaaacacagaaattggatgagagagatagactcaaaggaaattaaccaagaggttgaagctcttgctaaatttcctctaaaatctctataggattgtccattccataggaattttaaaggatagaaaatttttttataggattgaaatcccctaaaattcctatatttttcttccaattcaaagagccctaagaataaaaatcgaggaggaaaaggataaacttcttgaaacagtcagtaaactactactactatgcagcaggatatcccgtatgttgttacatatgaccatgtaaagataaatagttttgagaaaagatgcaaagctaaatactctcttcgttttatattgtaagtcgtttgactttttttctagtcaaatttattcaaatttgatcaagtttataaaatgtcgacgtttgataccacgatttcggtatttgcatagtatggggatcgttggtactaggatatatgcgagattgtaatataaaatatggggacgaggatttttatataggttcgggcccctaaattgtgaagcccggtcgttgctcttattcaccataatcacatcagtccaatatttggggtagcctatctatctgttgtcgacttggtggtctgaagtgctgactcatagttgacaatagggtagccttccttctcgaatccgcatccggcgagatcaaagacagcgctatgtctctcctgacagtatccgtagacaccgtatgggacaagccatgcttatctctgaagtcaatatctggcgtcttgtcttggcgtatgttggcttgtatgttgatcttgtgtcttgatctattgttccgtgtcccctctcctcctagggggtcttgtatttatacccataggtgtcctcttgtccaagtagaactaggaaaaccaatatggatacaattcgagtagtccttgtcatttccatatagaaccctattcatccttccttatgcggaactcctcctatatccgaaggttatttccgtataagacatgatatgtggtgagtcctgccgagatctagtcaactactattaggtatgtggtattcataatcctgacataaaaattttttagcaacatataaaatatcaaattatttttattaaatctaacattgaatatattttgataatatatttgttttatgttaaaaatactactatatttttctataaatttagtcaatttgaagaagttagtcttaaaaaaaaaagtcggacggcttataacatgactgaggaaacttaaagacttctatacttgttacatgatgattggggagataatagtttttcaattaaaaattaataaaggtaagagaacaccttgtaattagttaatgctttcgttatttcctgaattttatgagctatctattgggtgaaccatgtaacaagtggttatggcctttctgaagcaaaagccggacttttttattatctaaaataaatacaacgaagaaatgaatgttactccacatgagcagagaccttctagccctccaatgaacgatctaacgatttaagattttttaggatgatgtagtttaatgcatactgatcttttgactttacctgtatatgatagtgggtcaagttgatattcctttttcttaaatcgatcacgtatcgttactgtgctatgatcattttaaaaaaatagttattgttttgtgaaatttactcaaatatagattgccatgtttgggtttcttattgttcatgcacacaacgttttcacactcagcaatgagacacttcaccgacaggtggccccaataccttacttacattacctgatgcacctaactcatgcagaaactctgatcatcatgcgctacgtgagaatcactcccaccccttctttttgcaaatactcgttggttttaattatggttgacaatgttttgaccacaacaaattttaaatgatataataatgttacatcaaagtggtatatttagattcgtaataaaatgtactttactagtaatactgtatttctttttggcgttcgcaaaaaaaaaactgtatatttagagatcaacttttatattatctaaaagaaataaagaatacaactataactatacccatacaattgaaacaaataaggactatatttaccttaaaataaattaatcagtacgaaagcgaccctaacttattcgccaacggaacatttcatggccatataacccagttcaattctgcgatgaactctcacgcggatgcgaatatgccacagggcttctgccgcgacgccgacctccgaattgacacacgagccgcgccgacacgacaccaaccaaccaaacagaacaaaataataataagaataattgagtggagagcagtgcaatgtcacgcaacagatttgtttcgcacgatgtgacccattcaccaccgtgcgctcgtgcgagtcaacaacatggcacagtatttgggagcaaaaattgggcacgggcatatccagattccatagcataattcaagtgaaaattatagagatccaaagggcatatcctaacccagtcctttaatccttctgacactaggggattcccctttgctacgggaattactaagtaattttcaatattatttttcgttacaattcagctaggagtaaaaagaaaaaaaataatcaaatctcagggcttatcaattttttttaatcatgaaagcactttatattaaatattataaaaatgatagagataattgtaaaactattgtggaaatgatgtgaaaggtagcgattgaatatgcttgcatgttaatttatagaactaaatagattgtagatgatcttgcatgcttgcacgaggttgaatatgtaattattgttagtgggtgataatgtggcatggttgcatgttaagctttaaagttagtgggttataactttatagaaagtatagatagctgttgtatctagagatagcgaatcaaaaatattacagtaaaagaaagcaaccaaaaacaggagcctagtactagtacaagaattactatgaggcctggtttagtttccaattttttttcccaaaaacatcacatcgcatctttggacacatgtatatagcattaaatatagattaaaaagaaactaattgcacagttagaggaaaaatcgcgagacaaatcttgttggtgatatgggtccgggggtatcatgtttagagtttggaggctgccccccaatgcctcgtggccctcccccaaggggagtcaggcccgaggtggggtggcggccactctttcccaaagattagtcggaggaggctgtcccccaatgcctcgtggcactcccccaaggggagtcaggcccgaggtggggtggcggccactctttcccaaagactagtcagaggaggctgtcccccgatgccacgtggccctcccccgagggggggagtcaggcccgaggtaaggtggcggccactccttcccagagactggatggaggagactgcccgccgatgccacgtggccctcccccgaggggagtcaggcccgaggtggggcggcggccactcccttgccgagactagagggagaaggctgccccaggcgccacgtagccctcccccgaggggggatcgggcccgaggttgggcggcggccgcccgctcccgtgactaggggtcgggctcccccgaccccctctctaggtcaccatgtacggtgggttaagtgtccgcctccaggtacccacctacccgcatttatggcggcccgagcagtcgcgccacgccgcatttaatgcggtgtgcaatgcactcaaccggtctgtgaccggtcgaatgaccgatgggactggggtagtgcgcctgtgcgctgctcgtgtgtcaggcaacgtgcagcctgacatgtcccatcaaataatgatggtgagaggtcctcatcctcttatcccagccggagtcggtcctcccgctttggtcaaagcaaggctcccatttcccggtgtaataggagcccagaagtcttcacccattaaatggtgactgacaggggcacccccgtgtcaggcggcaagatttgacaggcctcatcatcaagatgacgtgcgcttgcttcctaagtcaagagacaagacatgcatttaatgcaaagattgtaatccttctccgctaagttatgtttttgggcccatgtggtaaccccttgatatataaaaggaggaccttgcccgccgggaaataggacgactcacagaaaacctgaactctaggagaagaagagcgagagtgctctccggagtttaggaacccttgtaacactcaaccataattccaaacacaggagtagggtattacgtttctcagcggcccgaacctgtataaaccccttttgtcttatcatttttaggggattaaaccccctcaagatcacacagcttcgctcaccaagccctcgaatctcatccgctgcccccggccgaactcacaaaggggggcctcacggttccctgatggaggggttcattctccgataaatcttttgagtctaattagtccatgattagccataaatgttacagtaacccatatgtactaatgacgaattaattagacttaaaagattcgtctcgtggtttccaggcttccaggcgagttatgaaattagttttttcattatttgtgtcaaaaaaaactcttccaacatccgatcaaacatcggatgtgacacgtgaaaattttcttttttcgaactaaacatgcccggagtttctctcagtcgttggagccccctgactggcaatcattaacaggtaactggacttactgtgactgccttaaaattaattaaggactggatctcgtctggatcattttcatgttaatgttaggtggggcacatgatctccaacctggagactagcaagccaaaaattttgctgatcatgtcacaacaagcaaaaccagaaaccgagattatagtgtacataacatgcgaaatactacaatttattgaacctgggctatgatccgggcaagagtagatgactatcaggcaggaaggcatgtggaaccgtgtcgaatgagtaacagaagaaatgcagagcattgcagaatggcaagcccttgaaaaatgcttatgcattctccacaccaggcgcaacgtcctcatcaggcacagcgtcgtctgcattctcatcaggctcacctgccctccgatctacaaagtcgtaaccatattcctcctctgaaagattcacctccacagatctgccataaatgaatggtctttggcccattgttgtgaaaggcaatagccccaatgcacgggcggttttaatctctcttgcaaccttacgctgagctttcgcacttatacgagtctgaaaagcagatcaataagttagaaaccatggcaaagcatttatataaatacataattacgtgtgcatttgtgaaacagactcatacagcaaaacatgaaggtataccctaaaaagaactaaacaagataccacaaaagacactacgctgagagttgccgaggagagatggtgctacgtggcaccttaattatgatattgtgttactttagaactaagcactgaaaagaccacgtccaacaagaatcaacaaagatatctcattaacagcatcatcagcaatgcatgaactatacaaacaagacaatatttatgtctagtgatcaaaagttacatttagaatattggaaacctttgagtccctgtgcatgcattgaataaaagttgctatctgaactctggcaatcctttcttatagagaccattctactctgaaaatatcaatttgaaagctatctaaaatagcatgatgaattattaccatacatcaggagtgtcattacccaaatttctattcacagaaaggggaaaagttccttattacctgactcctcttgattataatgccagcttctgtaagaaagttggccagaaatctaacattctgcaaggaacaaccaagtaatcaaaaactgcagctattaatatacaggcaagatcattgtttgttattgtatcattcaaatgtaaaactatgtttgttttttctgcattctgaattgtacattttcaaccatgcacactcgttttacacgttgaaacttgaaatacatgcctacatacatcccaatgatttcgactttgatagttaccgtgttccagtatttgcatccaaatgtcatcttagaataatgtgaggcaataattcaaataagtaggttaacaagcaacatatcaacccactacagtaaactattttagttattgttaaaattcaaacacaacagcggtaaataaaataccagaatctcaaatgttataacttctaggatagaaagtagatcacatgctatcatcatctaagttatgacttcctcaaatgacataccgttcttgaaattagtcacagcataccaccattatgtgttactgaaattcatgctggttaactggctaaacactctatagtttacaagaatacaaggtgacaaagtaatgcaaaacctataattccattaaaagctaaaaaataaactgcagactatttacacagtttgtcaggcagatgtacaaaccctaaaatcggctttctttaaaacctcctctgtagttgtttgaaactgtggcctaggagggttctttgcggctgcaggtcttgtaaggtcaagatcctgcatgcagtagagtgtgataaacatgctgttagaagactcattccactacagtatgtccatggaatgagcaaacagatataaaaaggtaaactaaaattaatactaagagtcacattttctaagttttcaattgtttaggcattagtgtatcataataggaatttctctgttttgacaagcatgtatccagcaaaagatgtaaatttgtgtgtacatatacaacacatcacaacctgttctagctcacaaatttaccgctgagttccagaatacttattcaggataaatgtaatcctaaatagtgcacaaggcatgtgctctttgtatacttcaacaatgatgtgaaaaacagaaatccctcttaccttgacattataagttgagcctcgcctgaaagtcacatctggcctgtaatcatagtcatcgtcctcatactcctccgtcacatgaaaggtgcgggacgcctcatccaacttctcatccaaaccatcttctaaggaatcgaagcccgtgcacaattcagccaagatgctgctagagttacccctgttacggaacccacccctccaaccccagtcagatcctccacggcgattctcaagcccatcatccaagccactcagcatcctcttctcaaattcttccacgctctctcccacccctgcgccggataagccaaccaaaacaagcataagaacactagtactattgggacatcttttttaggcatcaactcctcaaacaatcactagtactgtcatcgcaattgggattttgcacgcgaaagctctacatcaacagcctcatcttttcgcttatgcatatgcatatccgaatcgcttattgtcaacaaaaacataatttatgagtacaacttttatatatgtgttctagctattcaaaagcaaatgctataaaaaaactacaacgaaaaaaaacacaaaatcaactctaaaattaaatttaaaaattaaaaattggcttataagcagcatatgtggctgcaaatctgcgttaaacctacatctccagccactcgattcaacccgatggataactacaacgaaaaatggcgaaggtgtgggcaagcacgaacaactccatccaggtcaggattcgacacaacttatattagggaatatcgcatggagggatccgttcgagaggaattctcgatcaggaggaggaggcggcagggggggggggggttctcaccgtcaccgccaccggacaggaaggagcggcggaaggtcgcggcggcggcggcggaggcgggggacgggggaggggggctcgaagggaggaggcgtcggagggatcgcctcagcgccgagctcgccatctcgccgcgaggtggtgcgccgcgccgccacccgagacaccagcgagaggaggaggaggaggaggtggggactggggagcgggtgatttaggggtttgggatcttttgcgtttgggaccctggagaatctccttattttgtgcggttttgagttgctggttttttttttttgaagtattgagttgctggttctgcttgtacttgttcgcgctcctccctctccggtcacattacgaggttcatcgcttagtctaataaattaaaatttataatttaaaattttgaaaagttgatttttaagatatttttaacggtagcgttggcttttaagtcgctataaacaaatatatgaaacttttacctataaattagtttttattccctaataaaccgttttggtttattagaaaatatgagcaaccaataagactcttttttcctttattttcctagcagactcatcattttgctcacctgctctgtgttgaataatgaattttttactgatatcaattttgtttacaaaatatcttcaaattataaatcatgtaaatttaatccatttgttaaagaaaatattccctccaatctttaatatctgttgttaggataaacaacttttgtataaatagatagttcatgtgtttatcaaagcgtcatatatcaatgaccagaggtacaacatttgattttgggagaactaaaatcagttctccgaagatcgcataaattttataaacggaatatcatgtttccatttcctctatgcaattgtaacaatatgacacaaacgtacaataataatttcattgtgataaactaaataaccaattcgtatacgaatggttacatgcaaattactactacctccattccaaaatacttgtcgttttgagtttttttcataacgttcgatcattcgccttatttataaaattataaaattattatttattttgtttgtgacttgttttattataaaaagtactttaagtataatttattttttttatatttacactaattttttaaataaaacgaatgatccagtgttacatgaaaaaatgtcaaaacggggtagtagcaaattacgcccaaacaaattggcgagagccgagaagaacaaaagtgggttcctttgatccttcaaacccaaaaccgaagaagcgcggggtgcaaaacgcaaaacaagctcgctcctgcgttctccatcgaagcatcatggcggcggcggcggcggcggcgacggcagcgaggatactcgagctggaccccgcgcacccgcgcgccggccgcgtcatcgacgacatcgtgcgtacggagaagcggatcttcccgaagcacgagtccctggcgcggaccttccacgacgagctcaagcgccggaacaccaccctgatctactcagccgcggccgccaccatccccaccactggagacgccgccgccgcctccgacgaggaggaggaggtcgtcgggtacgccatgtacacgtgcgccacctccctctgcgcctccatcaccaagctcgccggtgcggcacacaacaacaaacactcctctcccccctaaaccctctcaatctcttgggggctgattccgtggctgtggttgctgatgcagtgaaggagagccggaggaggcagggccacggcgaggcgctgctgatggccgccgtcgagggctgccggaggaggcgggtccagcgggtgtccctccacgtcgacccggcgagggcggcggcggtggcgctctaccgcaaggccgggttccaggtcgacgccaccgtcgtcggctactacgctccacgcagggatgcgtaccggatgtacatggatctctaggaaaccaaaccaatcagcatttgagcaagaacaaaaaaaaaaaggcttgtgaattgttcaggaaatgcaaatggagcaatatgttcttcgccaattgtgatagggaaatgctacgggacggtatcctgttcgaacgggatgctatctctaaagatcgcctgatacctggtaagtatcggccgataccccgtttggacgagatggtacctttgaggtattatctcgtttgaagtttgaaggataccgttatgtagcattctccattttgatattgagctcaactttgattggattgattgtattgatgcttctaacagtgaggatgatctgaagggagaaaaaaatggtatgaattggtgatctttgatgactgatgattctgcagtttcagctattgtcgctgactgtgaatattgcttaaaagtcagccagttcagttgaaatggtgttgtatgagcttctcctaaaaggagaagttaactcaataagaggctcaggttaatggcaactcttggataaaagcctcttttaacacaccatgagtaacagcagctggttaaatctgactcactgattagaaaccaaattttgcagcagtaaagctggttaattgtcaggcaatgcagtaatccgtgctttgccaattgtgatattgagctcaatttgatcggattggttatatatttatattgatacttctcaattctcacagtgaggatgatatgaatgaaaactttgctagtaagaattggtaatcttggactgatgattctgcagtttcagctattgttgactgtaaatactgatgtagaagtgttagccagttcaactgaaatggtgctatatgagtttctcatgcaaggtgaagctaactcaacgagaggctcaggataatggcaaatcttggataaacctgagtaacagcagctggctaatttgactggcgctaaccagaaaccaaattttggagcagaatcacttgatgcaaatgttggcagagccatcatgtttgtaaacagcaagagcaagctacaacagagctcagaataacagtaacaaacagcactgcctccatttggggcatgcacaagttctctattgacagagccatgtcagatatatacaagctggctttgatatgcttgaagataggacgcatgtaaccactaaataagttctacaacacgaccaggaggtttgtgtctccacaacggttcaggcatttccaagagcttgagtctaagcatggaaatggagaacttgggggcatagcttaatcagaacagagcattggctgaaggccgtcgacgaagcagcgttgcgagtcattttatgtgggaatcataaatactgaagatgacatccggaacaatcagaggcagcttgtttatgtacatgaacagccttctgaggttctctcttgacactgtctccaagtcaaccacatcttggtcctcaacatagatccataagtcaccagggtcagtcttcttcaagttgtcacggcagaatggacaagactgtgatcttgaattcctgcaataacacaatccttttgttcaagcattgttttttgaacagatatgtatggtagctgtatggcaactccagagtacaaggacgtgatccaagttttgctaacccaaaagatatgcatcggttgtaagaagccaagaataaagataaatcatatagatatgtaatatgagaaaacctaatgcacaataccacaaatgattttgttccgcaaacatattgaaacaaagacaaataaattccagatatacacttatacagtatcaatgttcgctaacaagctaggttgctctgcatgattccatgaccctcaacatgattgattagctaaatagttagctacagaaacaacagatcacccatgttttcataatcaggagtcaaataactacacatgattagaaacaggatgcataagaactaagaagcaggaacaaagacaaggtcgatataatcaatagactcaacaaaatgccattctcaaaagatctttggattatgagtagtaggagacagttcagaatatgctttgatttgctaagcacagaatgtataggcttcctacattttacaatagctgaatattcaaaattgtgctgtttactcgcttcataagtatgtatgtgcccgttatatcctgtttagttaagctactgcctactggacattgattcatagcgtcagaaggacttgaacttaagcctctgagcatattggtagggggcatgtcaacctgacattgttagctaatcaacagcaccacgtttgaagggtcctaagcttccatgggaccacgactctcaggggacgtccatggaagaataatacaaaacacatcatctagccaatgttagttaatcaatcacattcatgacagagaaggctgcagttgcacatcaccagaatgcagtcacacaaactacatgcacagaccaagaaattctgcgtaccagtcctggtagcatctgaggcacatattatgggtgcagttgggcaacaccactttgctgttcatctccatgcaaatcccgcactcctcttctctctcggcatcaatttcggataagatgtttctttcatcctcatctctccttctgtacctctccatgcacacggccttctgctttttgtcctccgtatcagtaatccccctttgcagttgcagcagagaaggaaatatcacagctgttccagccaaccatataacaattccaatcaataaaacaatgcaatgaggagaatatctgcataattagaccctcggctaaagttacaagaacatgttacattaccgtagaattctttgatgctggctttcctctcatgggtagacattgtcgtcgtcccgtcgacataaacctacacaatgagctacaatttcagtaagaaaaactccgaaacgcaagcaccgaaccgacaaacatacattgtaacatgccattagaccttgtagacgaggatcctcagcaagccgagagccccggcgaggctgcagtcagtccactgcaccaggaagaggaatatatgcgccgcggggctatacgagagccgcatctgcaggcacgcgccatcgtactcccggggaaattcggaggccctgctcatcagaacaccaagaaataaacaagcaattagcatcactgggtggtggatcacatcacatgtggctggataggcaccctgccccccctctctctgaatcacaccactaaaattctcctccacttttccgcagggaatttagaacgctggattgctggaacacatgggagggagtagtgttctttttaatatgctaaatgagcacgcgacaagatcccttcctgatctgccaccgctcgtgcgctcgctagctcgcggataatgtatcgaacaactgaggagacgcggcagaaatcccaccacctcaccagccaacccgcgcggcgcgccgcgccgcggcgtggttcgattacccaccgatcgatctctcacgccgcaccggcgcggcctcgccgccgccgccgccgcggcagctggaatcgagaggggaagggcgacgggatcgcggtggggaaagccggaggaggaggagggaggagcttacagggtgttggcgtgctggatgtcagcttcgagcaccttgaacgagtccttgtacgccttccgcatcctccaccaccgccaccaccgccaccgtctccaccgccgccgccgacgccgacgccgacgccctccttctcatccaaccccggggcaacccccccgccgcggccggaaccacccaccct

SEQ ID NO: 3274 - DNA, 1169 bp, Oryza sativa
gtagttttgaaatcgactgggatactgcagcccgttcatatagagttatgcagtacggtctcagttccaacatcgtgcttggaacgctcttggtctcacccatcaattggaaatctgcatcacatgttcttgacaaaatatggtatcagctacccacgtgattaagcccttgaaaacatgtgtttgacattttgactaagctgaacctttgcatgtcaggcatcacatcagtagaaactgattcagttagaggtcatgcttatgggatgtgttgccgcgcaaatcatgattcacctgcaaatgcacaagactaaaacttaaaaaggttttaaaaaggcagctatattattcacccatatagttattaacagagacttaacaaaaggggaataaaccccaggtgatctcatgtctaatactcccagtaacaactaataataataagcactagcacctccagctccaggtcctatgtgctagtgcagattgcacatccaattacacaaattattgctgcaatggggattactggagtgttctaactttctttggcgccttcatcaggtgcagcagcggcaacagcatcctccttttcttttacttcctccgagcttacctccctcggcttctcttcggttgctggcgccttctctggctcagcggcagcggcggtttcagttgtttctggtgaagtgcttggggcaccatcttcaacagggacggtcttcttgacggtaccgaccttcacgtacttgcccataaacttgtactcccagtcctgcaatgcgtcgagttcaaatgggccaagaccagagatgtcaccggtcaaatcctggggctcgaaggacatcttagcgagtgctctgctggcatctttgccagcgaatagcgcataaggtccaccaggtccatagaacatcctgcatatggccgtcaaaatgtgaatggtaattagaaacacagttaaaaaatatttaagtatccactttcaaaacagaatattaggggcaatgcaacaattcctaacacaaataaacatgcatatcctgagactatgaatatattatgtagacatcatgtagcacaatccctcacctaaaaagccacaactgtccatgtgttttgaatgggaaacagtgtagcaaagaaatgattgtcattggaaaagt

SEQ ID NO: 3275 - DNA, 31019 bp, Oryza sativa
attttgttacgtcaaatgtaacatgtgaatgccatttttattttaccttttaacctttacagcctcatcatatatagagttgtttgccaatttcttcctctttaccattccttttcttcatcccttctctcctatgagaatgaggaatcgttggttgtagcataagacaaaccaataaaataaaaaaagaggaagatatattactgcatggtaaaatagacaagttagtcaccatcatgcattaggtgactaggtgttactccttggaagcagtattatttataacataaggcaggcctcatcactctcatttgaattgtttagcactagacaagcaaaggctatatatttagtaatcaatagtaaaaggaaaaatgaggaagggaagttggtccaaagaagattactatttgatgaaaaatcacattgagaagtatggcatgagccatagttggcagaggctgtctgaaattttgggttcgattttttcacctctcaccatgcatataaatcattttccaatactatcattcatctaaactgatataatatcatatttgatagaaaagaaaatcggtctattggaaaaagtaatatcattacttcttcagcggctttctgatccatgttgctcatcagaagtcattgtcgttatttctacattcttctggttaggatcaaataacatttattttcgaagattgaaggcatttgcagttactcgagttcagagatttgtccaggtttcttttatgatctcattagtttatcttagtctcaggaaatatgtatggaggtctagtatttccccttaaaataatttggattcttttgtcaactttggacaagctaatgtttttatttggatttaactgatatgatcaaagtgctgtatgccctcttcctggctcattttttacaaataaaaaatattccatccgttttatattataagtcgtttttatttttttaaatcaaatttctttaagtttaaccaagtttattctagaaaactatagcaacaattatagcaccaaattagttttattatatctaacatgaaacatatttggataaattctttgttttgcgttgaaaaaatattactatatttttatttataaatttggtctaatctaaagaagtttgatttataaaaaaaaatcaaaacgacttataatacgaaatgaaggtaatactgtctcttgttgcaatgaggaggttatctttcgatcttctctaaatgaactaagcgatcacagctctaaattttagatgggacggagacgaagatgctcgataaaaataaccgaacaaacacatatagtagcatattaatattaagcacaaaagaacatcaaaaataaaaaaatagagtataattcccgagtcaccaaaccctagctacgagagccaagataggcttatatacacgagcaaaacagttctgtttttgctcatccggttgagcttgtacttcagagcctttgctgctgatcctggtctccgaatcttagcaggccttactggacacactctgcacaagagaaaactctgtttaggaaggtgattgcaaggtaaagattagacgaaaaacattcactgctggggcgtggatggatcccagtgatacaaaatgtgtgtttcctaatgttcaaatgttcagagacggtttttttttttggatagagaggttagttatgtcatcacctgcagcctcctccatcatcagccatgatcatgtggagcagctcaagagcttcttggcttctgttctcatcacacagccccctgagaagaatattgtaggagaagacattggtatgcaaccgagctcgatcattctgcagagcactatgtctattgcgtcgttcgtcctcttgtcggcacagaggcccttgagaagaggattaatggtgatggcttccactctaaatcccttcttgacgacattgcccaaggccgcgaaaccgaggtccaagcggcccgcacggcagcagcagccgatgaggatgccataggtgtgcacggtgggaggagttaccttgccggcgccggctcgggccatgcggttgaagcgggacacagcggccgcggggatgtagcgcgcgacgtcggcgagagcgagcgccgttcaagctgtacatcgaggcgccgctgccttgccggagcaattcgtcgaacacgtggcgtgcgtcctcggcgccaccgccacagactgcaccctccgagcgaggggtcgcgcccacggagcgagggccgccggcggagcgcgctcggctcgagtgggtacgcggcgtgccatggcgcagcctgaaggacatgagtcagcggcagcaaccggcggcagcgctgagtttactcacaccaggaaggagtcggagggaggcaaggaaggaagggaggagctaaccagcgcgcgaaggaatggcgtatgccggtcttgtgttcgcgatggcctccgccgccggcggcgacggcggcggcggcggcgggatgcggtgctgtgtgttttggcttcgcgttttgcgcagagcaatttggatggcaatttcacttgcaaaattatgtttaacggaaaaggttattcttcaaaactttaacctccaatacttcgtaatgcgtaagattacttctcaatccaaatcactgcaactatgtcctgttctaatttgatttgatttgatatttttaagattacactttgatagtggtttcgatatatcgctgaaaaaaaagaaatattttttcttgcagtgaaagcagaggtgcagtgaagtaaccactcctgtcaatggtgattcagcgattcttgcaaaatagtcagtttaaatgttactttgctctgaaaatttagacaaacattcttcctgttacagattgaaaacaggttatcttcatgtttcaatccagctgacacattttttacttgcacaacttcctggttcatagaagtgtatctggcaacgttcaaaacttcaaattatcgaagtactggagtaccttccgttaatttctgggcactgtactttagccatatttgtaatttttcacacaaaagcatccgggaaattaaagattttcttctggttaacttcctaaaagtttgttaaatcgtgcacttgcatacctgcacttattttcattgaagaaacattactgcaactgttatgtacatatagctgtatatctgttttcaaattataccaaactttcaactcagcaagtactttgcatattcaacacaatttctttagacccttcactccaagaaaaacataagcaagagatgatacacatccatctcccttccttactagcaagagagaaaaaaaatgatggtaaaaacccaactagaaattgtaaaaactcatcaaacaaccaggtcaaaagtggtcaaaactcctggtttgtgagccatggtacattggtacataacccacatcaaattcatgtactagagtacctgacttcctttttcttggagtgtgggatgacgattttcggagcatcaacgtgcatttccagagagttgaactccagagccaagataggcttagataacaagaccataacggtatgtttttgcgcatccggttcagctaatacttccgagcctttgctgctgatcttgccatcaggacactcctgtggttcagtaattcttggtctccaaatcttagcaggccttaccgggcgcactctgcacaagagaagactgtttaggaaggtgattgccaggtaaaaatattagaactacagactctagaacaacaacaatgtatttgcttggacataatgcaacaattgtgaaaaaattcactgctggggcatggatggatcacgttcacaggtatataaaacgtgtgtttgatgatgtctagagaggttaggtatgtcatcacctgcattccacttggcaagagtacttgagaagatcaggatggtcctctatctgtccactgaaattcacagtgcatgtcatgttcggttttgagctattcgataaaaggtctctattttcagaaaaaaaaattgtcgctgtaaagaacaccacatatggctacttcagagagtggaggctttggcagttttcttttggaaaacacaaataccctccacttggttttgacctaacctgaagcttggaagagacattctgattgctggacccatccacttgtgtttatgcgaccctgttgacacttttgcatgattagaaagtgaaagaaagcattgaatcaacaaagtgaagctttagtaacttccatttttgagacataaggttaggcagttgctatcctatggccgtgtacacccttgttggtgtagaggccggattttaatccattatccaaaaaaagggagttgctatcctaaagacattttggaattccacatgatatccatttcacaattagaaccctggaaatgaagaatgaagtcatttgacgaatagtagtatgaagaaggtttactaatatagaatttggtagctctaaataagatgcagacttttaaacccaggcagttttagcgaaaagaactaaaggagagtaaggtttttttttttaactccaacagataattcagtcattcagtaaaaaagatcatgcttgttgatgcattaagcagataagtttcaactcaccagtaagcggtacactaatgttgcacaaatgtcttgtacaagagcccttggtctctgagatctcgatctcacggtcattcccttggttggagacagttgagcgcattccaagcaagctcaggaagctgtttgatttaaccaatggcttgtttctaagcgcatcagcttcagtctagcacattcgaacaatgtccaagcaatataaaaagttgtagacggcaaacatttgacaaacctaatcatgcaagtactctaaacatttgacaaaccttatttcccaagtacctgtgagaatgtagcaacatggcttgggagacctacttcctacaggaatgacaatggcactgatcagggtaataatatcaatgcaaatggacatagcatcacaaacaaaccagagaggggatcccggtgtcaccttgcgaccatgccggcaggcttcggcactgttcaccagcactctagcagcccacctgtgaacgaattcagagacttcagaccaaaccagcagagcacacaagaacttttgatcaaataattagatagcatcacaacccatcacacacactcatgtcaagcatcaaccaccaagcaactcatcttaggcatcccccttgggtatggacatctgaaacaaagttcagaaaagtagcaagtttgcaaattttatccatttttcagctgtctgaaaaacccacacttcccacatgcacatattccttcccaataaaaattgtcatcttttttttttcctgcaacttggccgtaccatacggagcaagtacaggggaatcgaatcgaatcatgcaaacacccaataattaaaagggtgcagcaaaaggagagcccatatgcaaagccctgtgctcaagtacaatcaacactaatcaagacgcgtttttttattggcttttttgagggactcgatcactcgaacctgccgcaatgcaaagctcggggattattttccccctaatctaatgcaacttggccaagaactccacccaatcaggcaagggcaaaagcactagcggtggactcgattaaactaggccaaaaagacgcagcaatctcggcgactcacgcgcaggaggtcggcgggttccacacgatgccggcgatcaccacgagctgcaaggagagacagcgagaaatccgatcaagaaattaacggagcgagagagggacagatcgccggagaaggagaaggcgagacgagacctcgtcgaacttgccggcggggctgtcgtcgtagcgggcgaggaacatgccgccgagggtgtagccgaaggcctccacgaggcggagctccctgggcacgaacgcccgcgccgtcgccgccttcaccaaatgcagctggtacaatgccctgccatagttgccattgcccccaaccatcaaatcaagaatcaatcaaacggaggatgagatcgcgatagagagagccttgcttgcctgcccctgaacacccatggcggcccgcgcccgtaccctgcagcagcagcagcctcctctctgccactgccagccgccatggatggccactgactcaacacacttcctcggctgcctctgcaagaatgcagctactgctactactagtctactaccaccaccaagaaaggcacagtgggggagtggattgcaataataaaatagtagatgcaaggaaggagatggatggatcgggaaggaggagaaggtgatgaatgatgatgcactgcctgatgctgggatgcaagattgcaaaggtaaggagttgtttaaacaagtttttttattcttcttctttttttttttttttttggtttgatggtttgtgcaaggagatcccaaaaccttatccggtgtacagggagcacacgcggcaatagtttagaggatgggggatccgtgagggccccatccatggctttgtgataatccatggtgttttaacttcgattgactctcgtatagcacttaggctgtgtttaattcgtgtgcaaaaatttttttaaggatatggacacacatttgaagtattaaatgtaaactaatactaaaacaaattacagattacgcctgtaaattgcgagatgaatttattaagcctaactaatctatcattagcaaatgtttactgtagcatcgcattgtcaaatcatagcgtaattagtcttaaaagattcgtcttgtgatttacatgcaaattgtgtaattgattttttttttcatatttaatgctccatgtatgtgtccaaacatttgatgtgacggaaaagttggaagtttgaagaaaaaattttgaatctaaacacggccttactccatcaattccaaaatagatgtcgttgtgacgttttgatttttcttttcttgcaatatttgaccattcatcttatttagaaaaattagtgcaaatataaaaatataagtcataagacacaaacaaaacaaataataattccctaatcttttgaataagacgaatgatcaaatattacgaaaaaaacttaaaacgacaagtatattgggatggaggtagcactagttgttgacttttaagacaaacaaatttgaattgtataactttttaagatgattttggagtttttttctttagagtctattttacaacattatcttttaaattgctaataactcgatataaaagataccaataaattaactatgatagcttctttcatcgttacctggcttatcagcatagctaaaatgatcggctcctttgaaaacacagcaatacaggaaatacactaatatgacatgaattcatgtactacctcggtggacaaatataagtactccaagcgattgaattttttggctttatacatctggttggatgtagagtccgggtttactcgttttctaaaaaaaggattgaaatttgtctacaaatataatattctaaagtacctatcattcaaatttatttttatcttattcctatcaccagtcaaaggataattttccaatgcttttcctctactccttttcttttcataaacttgttaactagtaaaaatttcaaaacgtcttctaatatgaaatggaaggagcatttgcgccttgccagtaggggtggaaaaaaaagcttgggctcgtgagctcagctcgggcttggctcgagctcgcttagctcggctcggcatgaatgccaaacgagccaagcccaagcctccttttcaactcgtttctgaaatgagccgagcctgatttggctcgtgagcctaggccatcatgtatctatatggatgattttattttctagtggagttattatttgttaatatataatttattatctatattttgatgaattgaatatataaagttattttaattttacatgttgatgatttgttattgcttttcttaatgattacaaattatatagcttcaacggaaggctcacaagccagcttgagctggctcgagccaggaaacgagctgagccgagctcatgttttagctcgtttccctaaccgagccgagccaaaccaagcctagcttgttgcgagccatggcaagccgagccaagccattggctcatttccacccctacttgccagaacgtttctgaagaaaaaaatgtatcgcaacgtatagcaaaatactagagtcagattgtctgatttcccggggacaaaatcacaggtaaacagcagcacacactcaaaaagatagtgagagagaaccacaaatactgtaaagcaagcactattattagcgtggaagttactgttttagggccactctacaatcatactgcctgtagtatactattatcctgttccatttatcctctgttggacggttttgcttctcttgaattgcctctttgcagatcaactcataataatccaaatccaaaacaatctttgcagatcaactcataataatccaaatccaaaacaaccagcatgtttttgcaaacgagaggcaggtctcaattggcgggagcacgagcacttcctgacaagaaataaatttgtaaatgttttatgacttcggcagaatattcattctccctcggtgcagcaggccaagaagatgttccctgcaaattcatgaaaagtccaaggaaaaatagaagtaggattagcattttaacaaacaaatttcaggggatggttccatgctagaacaatagtaccaaataagtatccctttcctcacaaaaaaaagtattcctttcaatctcctaatgctgagggaaagctttagaaattcttcaacacaatactttttccttacccaaaaaaaagagaaaaatatgtatgacgataagaatcttttttctttccagacccaacaaaacatggccgaaggagcttgcacaaccattgataatttcatcagaagttcagaacctttgcaacaacccttgttctataggatttacagttattatctgtcgctcaaagcaccaggtgctaaaaaccattggcccagattatagaagctagcaaatcatgctgtcatgctttctgccatgtttaagcaaggtagctatcatgatactgcagtcccagaatcaatctcaaaaccagttgagcacaggttgaggttgccaattgtcaaacatctggagcacttcatgaacactagtatctagtagtattattctttttttacaaagttcttctagaataactctgtacatgacgatatccagttaattcctaaagcagcaaatatctggtactcttcatctttgtagccaccgagccagttgtgagaccaaattggggattaaaaattggtgcgagcagcttagacagttcaccttacagtgtaatgttttttattttttccctttttttttgttttttcccctccaacctaatgttcacaatgcaaccttgtcttccacaatttccattaatgagatggctacaaggtagagccacctctacctttttacgtcaaaaatagtcagtttagtacaaaaagcatttcttcatcaaacatttcaagtttaccatatgcacatagtattaatatgttggagatatgatgatccagtagaatatcattttatacaacaagatcttgttccacaatgtttttttttggataattaaatactgcatttgttgaataacaatacttctatcatttcttcagtgcggagaaaggcaaactagtatagacccaacagtattcataattgaactcatgaaaccctcttgattgaaaccttgctatttatgcatacagagaaaagaaccctccactagcaggattgtagcagacaagaattccaattcagaatttcgtagctgcaaaaatcttcagcggttccaatattctataaatacttgtacttttcaggggaaaacctatgatattcttggtgtttgcctccagaaaaaaagatctataaaacagggaaacagaccatgctttgagagagaagtgcttatcatcagtcatggagaggtaagcaccagctctgcttagtgcacctctgtgaaacagtctgctaactatgctatttatcatacaggggaatctttgtcactgcaagtttagcagataataaattagttctaacaaagctacaaaaagtagcaaaattagagaactataatatcatctgggaatttttcttcgaagggaatcagatatagtgtgacaaaaaaaagggcagtttgtacctagcaatccacatgtaacagataaaggtgatccccaaacatagagtggtccagaatttcttgtttgtattactaattcagtgagaaggccaacaatagccagttacaactgcataactgtaggccatttcaaacaggatggatttcacttcagagcaaaacttttcagggagaaattccgtatgtttgattgaatttcctgcttgaaatcagcaaaatcagcaaatcaacagtcgaagcttcaacggggaggttattttgatcaattttggacatgtaaaccccagcactgcctagtgcctacttcccctttttgaagtaactttgtaactctgcaatttagcatgcaggagtcgacacagtactacagtcattgtcctccattgaaagaaatagatcatccaattcttctagcaacccctgttctataagatcttttttgccacttttgataatctgtacatagaattcttttgcagtagcagttcttcctgtacgaaataaaccttgcagcattatgttatatgtgataaaattaggactaacaccattgctcaccatctcttggaaaagtgctaaagcattctccatcctagtaattttacagtagccattaatcaaagtgctatacgtaacacaattaggtttcaatccttgctgcctcattttgctaaatacaagcatggcctcatctacttttccttgcttggcggatgcatatattagtgtgttgaagacataatgatcgggttgcatatcactttgtaccatcaaatcaaagagaccatgcatctcaacaagagctccttcgatagcatacccatgaagtaagctactgtaggtagtaatatcaggctttaggcccctcttgaccatagaatcaaaaatctttctagcttctgtgcatcttccgttcttgcagagatagtccataaacgagctataagtaacaacatttggttcaacaccattgctgcacatcttttctagaaatttaatagcctctgtcaactgccctgaagagcaaaatccatgcacaagactagtatacgtgaagcaattgggtgtaactccattcttaaccatcctatcgtgtacctccatggccttgtccattgcttgacccttgcatagggcagcaataatggagctgtaaatcacaacatttggcaaaatcctccggtcaagcatttcacggtatgtagcgtaggctttgtccggatcccctcctttcaagaggccatcgatgacggtgctgtatgacacaacattaggtaagcagcctcctccatcatcagccatcatgtggagcagctcgagagcttcttggcttctgttctcatgacagagtcccttgagaataatggtgtgggagaagacatttggcacgcagctgagctcggtcattccacggagcactatgtccattgcgtcgtccgtcctcttgtctgcacagaggcccttgagcagaggattaaagatgatgggttccactctgaatcccttcttaacgacatggcccaaggccgcgaaaccgaggtctaagcggcccgcactgcagcagcagccgatgaggatgccataggtgtgcacggtgggagttaccatgctggcaccagctcgtgccatgcggttgaagcgggacacagcggccgcggggttgtcgcgcgcgacgtcggcgagagcgccgttcaagctgcggatcggagcgccgatgcctcgccggagcaattcgtcgaacacgtcgagtgcgtcctcggcgccaccgctcccaacgcgtgctcggtcttggatcgtaccctccgagcgcgggacgccgccggcgcgggcgcgggcgcgggcagcgacgcggcgtgccatgtccggcctgacggacgggcaaggaaaggtggaaacctgcggcagcgctgaataaatcaccccgtggtttactaggaaactaggaaccagaggcaaaggaaggtggaactaaccagcgcgcgaaggaatggcgaacggatcagctgctggcggcggcggaggggcggcctcgacggcgacggccgacgagcgcggctgcacgggtgcgtccgttcgagcagttggcttcgcgaaaggcgcgggaagaagacgacgagaagagatcaatcagatcagcgtcttatttgttctttttttttttcttttttcggtttcacatacatcttgcttcaacgagtattacttgatttggggttactcttttttttttctatatgggaagcatgtttttatattccttaagttactttttttttctagctacgagtggcatgtttttacttgttttttttatactgcaaatatttccaactttctttgttgctaatgtggcataataatatttcacttgcaaaattttctcaattttttcatagactaaaaaaatgcccgtgcattacaatgggtaaagtctattttaatcttgttattattatatggtttagttaaaatgaaattcactatggagttcgcttggatatatatttttttataaaatcatgagctgcagttagaagtccgatcgtttaagttagcatgcgagttttttttaaacagatttcttatatgattctttctgtattgccaaaagtgaacaatgttaaaaaccgactcaaatacggatatgtatttctaaaagcaaacgaatttaaaaaccgtctcgtacccggatgacgtacgaaaataccagtaaaaatattttcaatttttataatagtagagaaaaatgatgccaacgagaatgtcactcttcggtctctctgcttcctatccctactcatcaatccaaattactgcatctccgtcgtgttttagtttctttttaaaatattccactttgatcacttgtttctcacaaaacatgtcctcaactattctaaactgaatcacaatttagaatttttcactacagcatgaaaactcaaatgcttatttatttggaaggcatatccaaaaagtctcagtttgttcatcagcaccaggccaaggcagagacaaatacttcagagttcagagttcaaaacgcttcaaaacaaacactccaaaatgttttcagaacaaggatgcaggcatgcacaacgatccatcgatcgatcgccgcaacagaaaaaaaaaaaagaactctttcttggcgtcgccgcggcagcggccttcactgcagctgctcgcggaacaccgtgagcacgtcggcgaacgtgacgatcccggcgaggcggcagtcgtcgtcctcgtcgagcacccacaggtagctggcgcggtgggcgagcgcctgcatcatcacggccaccagcgagctcgccgggctgcacaccaccggctcctccgtcgagcggcgcccgtagctccccgacgacggccgcctcagccgcgcggcgcggccgtgggcctcgtcgtcggaggacgacgaggtggaggaggaggagaacgcgaaggaggacaccgcctcgttctccaccagctcgagcatggcgtcgaggcccttgctcttcagcccggccttgaccgcgcgaaggatgtgctccggcggcgcgccgaagtagtcgacgtacgccatgaggtcggccaccgacagcgtcgcgatggccgcggccgccgtctcgtcgcaggacgcgaggagcgcgggggagatctcgccgacgaggtggccgccgtcgtcgacgacggcgaccgcggtctccgtggcgatggcgcggcggaggaggggcacggcggacagggctgcctcgtggggccgcaccgtgaggaggtcgtcggcgcgcacgaggccgagggaggagacggagcggccggcgacatgggagaagagggagatggagttgaggaagtagcggacgaggtcctcctgcgtcaaccagcagtagtcgccgccgccgccgccaccgccgccgccgccgagctgcttcctccggccgccggagcggagagggacggcgagcacctgcgcgccgctcaagacggcatcaagcgcctccaacacactgcaaagaacaacaccacattgattaattaaaaaatcacagtaattatactagtcaaagatttagttcatcaagatcctactattatccccaaataaaatttctaagatccaagtattattgcgccatctttgaaccacacaacgacgaaagaacagggaaaagatctcctggacttggtacgaggcgagctggaggcagctgaatcctatcaggaatggagcaaaacgacatggatgcaggtctcaatctctggtgcgccacgcagatcgccaccacaagattgtcccgatgagtcggacgatttgacccggatcgggcgcctttttctaaaccaagattacagccacttgttccaaacgccttcgtgttcgcatattccaatcggggatcaaaatttcaagtgctagtcactttgatcaaggaatatccgggatcaactgaatgtctcgtctttttctcacaaatcgcctcaatagtcaaagatcacagttttcttaactcgaaaaagtaaaatgtcatcatttaataatcgttttattccccaaactattatagaattttaatttttaccactaactcgtactagaaaaataccataaagatctacatcgtttattcattttattagagcaaataggaaagcatttgcgtatcctttaagcatctcaaccattttttaatcgaagattttagcggggattttggcctaaatcgcgttctttgcaacctaaacaacaacaaaatcatcaaagacgcgtcgtgtcccaaaaatctaaaaacaaatcggaacagggcgaaaagtgaagcgggggattttttttctttttacctggcgcgggggtcgacgcggcggacctcgccggcgccgtccttggggaggagcgcggaggcgggcttggagagcgcggcggtggggtgggcgagcgcgcccggcgcggcgcagaggaagcagagcacgtcggcgagcccgagcctccccgcgacggcgcgcccggggccgacgacggcgacgcacgcggccgcccctcccgctgcctgctgcggtcccctcctgagcgccgcggccaggtccccggcggcggcggagagcgggagcgacctcaccgccggcttgccgatgcacaggtccgacacctcattagccagtaggcgcactgccatgcactcgcggggcgaacccttgtcggtttcgagatcgaaaccctcacaaacgatgtcgaggaggaagaagagagacgagacgagacgaggttttttttgcaacggaaatcgcggaggaggaagaagacgagacgagacgggattttttttttgctttttttcgcttccgccgatttggcttggctttaaccgtggagcgggatgggaggcatatatataggctttgggggtggccgctacgcggttgggttcacgcgtggctcgatgacaggtggggcccggttttgtggggaccactcggcagtgggaggtggggggttacacgggtggtttggtttaatggttacccgttgtttttactctgtgctggtttgcgcgcggctcgggcctggtttctagaatcggctcaagccaagccgatctgagctggaaccgtaactccgtgtctccgtgagacggttatgttgtttgcagtttgctttgttttggcattgttcttacagtggtaaataagcgccctccacttcgagatatgatttttttggctctttatatatatatatatatatatatacaaatgtaaaaccaagaaaaataaaatatttttaccttatcaaattccaatggaattattattcattttatatactcatagtacatttagcccctagtttcataaactccggtacaataattacttaaagataaatttattttggaataaatgggatgggttaaaaatgttattatgagatacaggatgacagatcatcgaactaagatttttttagtggacaaactaagattattaaaagcactaaagcagtaaataaatccataatccattgtttacaagagccattatatttgcaaccaagtcacagactcacggtgaaaggaaaaaaaaaaggcaagaagccatgaagtgtgcagcacgaattgccagcaagaatgtcaactgtcaccagcttaacaacgggatgttgtgaaaaacgttgggaagttaattgtgcttactaaaagaactttgacctaatggtgtatgattatcttcttcactatcatgcaatgggtgcaatgctagctgcttcagaggggaagaatatatttcacaatagatgtatggaacatatagatccaatgctagctgtaacttgacaatatgataaatccaattgtgcctccagagttggtacacaggtcagaggagattcaattggaacctgaaaaatagtgcaaatgcatgaactagtaccgaatttgtttttaaaaaaaaaaacagaacaggagtaaccgccatgtgggatcattttgtaattatggtagatctcagatttgttttactaaacttttaattttgtcttgtttggttggctcgctcagccgccaccgctgatgtgctgaacaacactttggtcgaaacaggcagcagcaaagaggtttctgctcggtttaggctacgctttttgaccattccgtttgaccacttgcttcggtttccagcttggcggtagtagcatgctgggttttcttttatagtttttaaatggttattttgcaaacgtgtttccaaaaccaaattcttgtcacatcaatattgcttgcgcaatattttgactaagtattattttcatattttggacatttagaattcagtttgaccaaagtaggacaacaaccattatatatttttgtccgttcataccacatgatcattttcctctatctttacaaacctagtggatatttcggatattaggatagaactgtaaccttttacatgtggaagctttatcagaaatcttttacatgtggaagctttatcagaaatccactaaaacgatgtgctacgaacggaggatgattatggattatccacatgataaattggtatagttttcgtagagtaaagttaactattgtaatataagtccaagcaatcttcattcaagtgttcatccagcctcctcataggctcctagttactactccagtctccatcacgtcttcatgaacttgcattctctattgcccaaatttgacgagatggtttcccaaatttgacaagatggttggtgcagcaccaagtggttagatccatgcgtgacaaggactttctttgaatttttgcaccatttttctaatctaataaactatttcattcgaattttctttctttcattttccagtgtaaccatcatgtttttttagcatcatcttcttcttgttggcttcttccatgaaaagggaacacattaattcataaagatcaaggcagtataactactagctcgttcgttcgtacatgtggttgtaccataaatacgttccatcaagagattgggaggcttggataatcaaccccttttaaagacaaaaatgtgacacatgagctgatcacaacatgaaagcgacaaaaggaaaaaaggttacataaacctactacctccgttccaaaataggtgcagctttctagtttaaattttaactacagtgcggcacctatgttgggacggagagagtatttgattctatcacaaaattattatctttccccaactaaagtctttttccctgtttataattatcgactagttagcaatatctagtgttaaaattgatcgtgaatcacttaattgcaatacataaatggttaatggtattctccaaagcttcccaaatctaatcatttgcacaatggttttgtaggtgttatatgtcttccattaattaatggagaaaatgaaaatactatgcccatctcgtctacataacattcatgacattttcagttctagaaaaaaaaagacgacgctattgttgttgagcctcgcacagttgatcttgttacggctacgtgaacatgcttagcacgtcgattgtctactaactcatctaggaatatacatgtagcaccatactgttatagtggaattgatcaattgaagtacaatctctttggttaatatattgctcttaactgcgctggcaaatcagcattctaacatgtgaaaaacgctctccatttcggtgaggtcatttttaattactcttccggtttagtactatactccagtccagccagagcccgccgccgcagccatctccagaaccttccctgtttgcgcgttaaagcgaaaataaaaagataaacgttacaggtagtagtagtgaaaaggtgggtttcctctcaaccagaaggagccgaaaggcagaaagaaccctggctcgagccgtgaagccgatctgggccgagccggtttggttggcagaagaacgtgtaggcgacgtggcacccggccccaccacgtggacgcatgctgtacgcgtgggcccatgcggaccttccgtgccacggactccgggatcttctgcggccacagccgcgatcaggttgcggccacttcagctgcttctccagctcagctgcagcctgcatgccagattgccaatctgccgctgctgcactgcaatttgtctgatgaaaccttcgctatctgccaccgtgccactgtctgaaccagctggcaaaagagcacaactagtactagtagttcgtacacataacctgatttttcaatgacgagtcatgacaggcagacatggcctgtgtgtgtgtgtcttggggtgtccgtgcacgtagaacacagcttctcgccgtgcgaaaggccacttttagagcaagtgtggaggctgtaaggcccctgtttagatgagactaaaacttttaagtccctatcacatcggatgtttaaaaattaattataaatattaaacgtagactattaataaaacctatccataatcttggactaatttgcgagacgaatctaatgagcctaattaatccatgattagcctatgtgatgctacagtaaacattctctaattatagattaattaggcttaaaaaatttgtctcgtgaattagcttttatttatgtaattagttttgtaagtagtttatatttaatactctaaattagtgtctaaagacagggactaaagttaagtccctggatgtaaacaccacctaagttagctaaatgctgaggtgcaagagagaagagagagaaggagcaaactataaactaacttacagctggcttaaacataagaaccaaaaaaatcatgtaagagagacaagtggactatatattaattgtaaatagctaattataatatatatgagataagaaaagactgcaaatattacagtcaacaagtctgttatattattagccttgctcttatgagaccgcaacagtagtctgaatctacgtactatcgtgttattattatcttccgatctgaactgaaagaaacccgtcatctacccaacaaaaaatgaactaatctggtggtacgagtgggcgcgcgcgcgcgtgcggtcaaagtgtcaaacacggcaagcaccagttgctgctccctctcgtggactcgcggtctctcgcgcgcgcgccgaagaggaaactccttccacgcgagcgagccgcagtttcccttccccccgtggtgattatccacatccgccaccacgaggcggcgcgagcgacagcggcagcggatgcccttttttccgccgtggcgtcgcgggtgtgatccgctgatgtggcgccgcgcgtcgcggccagagtgcgcggtggcggcgtggcgctcgcatgctgtcacggtcgttggttgctttggctgattcattttcaggtgagcgcgccgcccgtgccaccgtatggtggtggtggtggtacgcgcgcgcgtgatatgtttggctttcgtccgcttcttcggcggcaagccgatggatgcatgggcgcctctcctgttcagcttagctctgcttaccacgtttttatttgacgaatccgcacgaaaaaaaatagttttatcctatagagtagaagtaaaacatatttaaggaaagcaaaaaggaaaaaaaaaaagactatacaagagtctcgaaggacaatatcgcactaggggaacatttccatgagtctcttttccgtagtatttctgttgaaacaatatgtctgtgtaagttatgatataattggaatatgtctgtataagttacaagagcctcagtagcatcttacgtcccaggttcgactccctataggactccaggatggatttacggggtgagtgtgtaattctcaaatgttcgactccctatgagagtccaggatggatttacgggggtgagtgtgtaattctctaaaaaagaaaagttaggatacaattattttttaaagtttggaattttttttatgtttatagagggtaaaaacatatcagttttgaaaacctcataatttacggtaatcgtgattttgcacgataatggtaactcccaccgaaaggtaagaacacctgtgagatatgcctatgggagtgcaggatggatttacggggtgagtgtgtaattctcaaaaaagaaaagttaggatacaattattttttgaagtttggtatttttttatgtttatggagggtaaaatcatgattttacccgataatggtagtaactcccataagaacacccgtgagatatggctagctgtcctggtgaagtgggtggaggatattgggagaagcaggagagtttgttggatcgggagaacgggggcgatccctaattccctatagttcctactgctgttatcggatttttcccaatatgctgctgtaagcctgtaacgagctggcttaggcgattagctacctgattttgtccttttgttcgagtaagtttacgtagacgtggttaatccatgaaaccacacctacgaacggacaggtggaccacatgcacgtagcgctgtcagtggttcacgcccgtttggaccggtataatttacagaggaggatcggattaattatttacagaagttactctggttccaattaaattttacaaaaatcaccggaggagagatcgatgagaaaattgctacgcatttgatccaattgtccggctcatatacgattaagtttgatcaatgactaccgtgcatataaacatctacttaattaattgatctccgtttgagcaaaggccataatattttatttcattataaaaaaaattaattgatttttttacgctttagttatacattagttttacaactaaactatgtataaaggttagtgctttgttgttgagtatcacccaatttagttgcacgatccgactaaaggcatacaaccatggatcaataaagattcttttgaaacataagatctgtgaagaaatttgtaggatttaaatgatcgtatatataggatttaaataatcaatagtaacaccaatgggagaacggacttgtctaacatggataggtaactactcagccaaaacagccaggaacaaccaccctgcaaacaccatggcagcaaattaaaactcgtgtggtccgatcctttggccgattcaagcaccggaagaataattgcttcaggatcaggagacaaagccacggcactgctgcactgatgcacagtgccatactgccattgccatgcatgtcagctgctactcactttgttggcacgcggccggcgagaaaaagatcccgtcccgatacagagaagaagaggaccgatacagagaagaagaggacgggttggctcccgtacgaacgaacgtagtactacgtggtggtctcccggcctccgaaatggttggcacgcagcagtgctgccttgggcggtgacatgacagccgctgcaagccacgatccctcacatggaacgcgacaggtggtgaaaccatgtagtaccagctgatgcatatctgaaggactcagctacagcctagtgcaggatatgcatgctggctgtgaggctgtgtttatttcatgccaaaatttgaagttgggttaaaattagaacgatgtgacggagaagttgaaagtttgtgtgtaggaaagttttggtgtgatgaaaaagttaaaagtttaaaaaaaaactttggatctaaacacggccgagtgaagtgagtgaagagagtggtgtggttgttggtgccgtttggattttttttttgtgagtgtgaggatgcatgcaaatgcaatgcagcaatggaaatggaatctgtagctctcctactaactgccaagagagagaggggtgtggtgtgtggtcctagatagctttggtgtaggacagtacaaggagtacaatgcatgttgctaccatgttgccctctgccactgtttgtttcggttttgcaatgattgaatggttgagcaatgggggcagttatatagggcgtgattgatccagatgctcgcttatcatatctctctaatggtaggagtagtactttattatctttgtcatggaggaaacgaaccaaccatgacgcggtcaagggcatcgtatgttttctattcgacgagacgatgccggccggcaaatctccgtttcttgggatgccatcgcccatcgctgggttacactgttttttccccctctactgtgaacccatacctctcctgcgtacgatcgcgccgtgctgtcgcgtatggcaaaccatcctgagacggccgcacgcgtgcagactgagatcatgtcacttaagtcacccgactttagagccactaaggcaatgtatgagaaatgtccatgggtttttcggctatctttacaaggtggtgggctagatgatctgggttctgagccttactccttctaattatttgatattaggcccttccctaatattcgagttttttactaaggcaatgtataacgctccactctgccctgtggtctcacggcttcacgtcggagccaagctgagctggcagtcgagctcgtggttccgtaggccggagcggttcttgcagagggaacggttgaagcgccggcctaggatcgggagccgcgaagccacgactcgaggactttgcgatggatgagcccggagcccagtgcatcacatcgtccggttggtccccccatgcacctaccctaagtccccatctcgtcgtggtcgttgtcgccgctcattgccgccgttgtggtcgcgtcgcctctcaccagatccgccaccaccgctgctccccgttgccaccagatccagcgagctcgtggtcggatctggtgagctcatggtcggatccgccgccgccggtggcccctcaccgttgcgagaagggggtgggaggggagaggccagccgatgcgacgctcgcgaagaagggagggggagaggccggcgagctcgcggctagatcctccatcgccgtggggatctgccattgctcgtgaaagaggaaggggagaggaaccgccgccaccgttgtggctgtgttgccgcttgctggcaaatccgccgccgttgtggcccgcgccgctagatccggcgagcacgaggctggatccgagacgcccaactctctctcatcgccggagagctcgagcgccgctgatcccgtcgctctctgcctcgcctagagtaaaggagagggggatggggagagggactaggagggaaggggtctcatcggcggggttgactgggagaaggagagcgccggtggtctcggtggagaaaaagaacgcgaggatggcgagagggctcgggagagagagagaaagaggggggagacagaggaaataaaaaggaggcggaagagactgacagtgggtccgcatgatgtttaggggtgtatatgtacttcttttggtttataaggtccaaaatataaagttttaatagatttgataataagatacaccataagggctgacatatatatagatgtgggctaaaatgtaaaatacgttttggagtggattccactgtggtttgtgtcatcatctttatgtggttctgtcctatgtgacgtcttgagatcaagatgtctgtgatctctaatgtacatgccctaataggtaggagtaacccataaagaaaactcatatctcagttactcaaaatcgtatgagataggtcagaggatctcggtgccacacttttaccaggtcacaaatctcagggaaaggctcggttggttttgccgggctgggcgccgtgctcgtggtattgtttggtggatcgagacgatgagatgagatgagatggtgaaatcgctggctgggctaaccagctgctggtgccaagggagaaggttaatggggtgggatcgcgagcatcattgcacgcggcaaagacggggagcaccggagcaggtgtgtggaccttggtggtcgtaggcacactgcatgtttccatcgttttctttgaaaggacgggcgatcgatgctgttgcgtgcatgcacttggtaacatgggatgtcagtgatggtgctgctagagtgctagtagtacgaatgtacgacggctttgttatgtttgcaatgaaaaaacattaactgtttcgtcttttaaatctttttaagaaaacattactagaacgaggaatctggaatgagcacggatcaggagttcaggactaaccttcgaattttccagaactccctctatcccattttaagtgtccaactttaatcatctgtcttcctcttatttaattttttttaattagtattttttattgttatgagatgataaaatatgaatagtactttatatgtgacttatgatttttaaaattttcaaataagacgaacaattaaaattgtgcacaggaaatcatggttacacttaaagggcactatacttaattgccgtacgcctcttgcatgtgtaggtctcgacgagtaataatttagtgtcacactcaggcgcgcctaaagcgtgttcttatacgattgtccttccgctaactgcatccaatattttctatcttgctcctcaatcagccacgtcactgcaaacgcaatcgatccattggtctgagtttggccatatagctcaatgctcctcccatcaaactggccactatttgtcctcttcatgacttcgacaggtctgatgtaattcttatcgattgaacttcagataaagataaatagaaaaagtggagtaatagaatgtttacacacatcaattcatatgaatttttccaaaaggtttaagtggataaaaaaattcctatgttttctctatataactcataggaaaaaaattcctttaatttttctatacttcaattctacaaaccaaatgatactcaaaagaattaatccttagaaatccaaattctttgtttttaaaacaaacaagcacttagggcagttctaactcacaatgtccataagtagtgtctatggtgccatgtcaataagacatcataataaaaactacactccacaatccatgatttcttaaagtgggtcattaataaatacatcatctctcttctctaccaatcatatctattcttcatctattatgaagacactattatctcccaatgcaaaacttgatagtgtctagcgcataggttctcatgttgaagctgggtcttgcatgagacctagtttttccctctcttcactctctctctctctctcttaattaatatagtgccacataagctaaaaatactacatggcaatgtagttaatgccatagaaaccatcttagatggagggttgacactgtccttaggattttagattgtttggaagggtattaatttttcttcaacataaccatgtctggtagcactaactaaatcatgtatagccccaataccgatagtagaggttcgagcccccgcttatggtaaatccaccaccagtactaataaagaaacagttgctcatgcattgcaggcagaggaacagctgcggtaacgcacattaactccatgtaaaatgcagtgccgttagtaactaatctcaaaagcaacaggtttgacactttgacggcagtttagcttcaatacatcttcttggaaattaataccccgagcatgtttggataatggagaataggggatgggattagaattgaaaaatgaatgaaggattaagattaaatggaaaaggaagaataaatggttaggatttaaagatgtatttcgattggtgagaaattattttccatatccattagcccaacgctgcccgagtgtgatatgaagcaaagccatggcactttctgcaaaatcacaccaagccattctctcgagcacacgatccgagccgcttgtgtcttatccaacggtcagaaaacacccatgaaggattcggatattcttctccgaaccccgaggcgcagtacggaataccccgacgtgattcggagttttcgggcctgtttggttgctgccctcgtgttcgtgcctgacctgagatgcttgcctgagacatgcctgtaccttgtttggttggcgtcctagccgctttgattagcctggctcaggcgacgaaattccaacgcctgactcaggcaagtgagaagctagcaagattaaggtgatgtgaaagctatgggtcccactattaattacattctttttctttttcttgcttttttcattcttcccaccgattgatcatgtttgttgagttaatatcatctgttaagagcaattattacagtttgacgttgcattattcttctcaggcacatggtttaaaccaaacaactcatctcacaggctgcctggtcaggcaaatgtcttcaaactttcaggctagcttcaggcatgagttttcatcaggcatgtgtgtcaggtcaccaaccaaacaggcccttcttctctgacccttccccaggaggttctgctcgtaaatagaacccaaaatgagggttccttttgcactagcaaatcttcagtaagaaccttctcttctctgatgaactagcaatcttcagtaagaactagcaagcatagctgatcatatctgagaggcactcgatcgcttgcttcgttttattatgataaatatgctctgatgaaatattttcggtaagttcaggaggatatgttagcttaacttggcactgttaagtttttcgaagtcctgtacttgaacaaatgtgtcctgtcaaaatttggacgagcatctcaaattttcaagcatagaagaatttattttcagaatgaaatgaagtatcacagaggcgtcagttcttaacaacattgtgctagtacaaaatttgcagatcaatgccaagcgtttctgaagtagtagaaacaatagatttttcaggtcaccttgaaagtagtactactagttgaaactaaaagcagagacattataacagcatgcagaattaacacttcgctgcattactgaattcactttaactgaagtttaacaacataactccccgcaaaaaaaaaagaaaagaaaagaaaagaagaagttcaacagcagataatcacagtagagtaatctcagaaaatatggaaccaacagaccatacatatcaatggaagcgccatagttgtcagtctatcaaaggctcacagcaaagctgaagctcaggagctcaacatactctgtcatggtcttagctgttgtatccattcttccattcctccagaagtgtcacattcagcgtgtgtaagttgcgcgattgttactggacagcgaagtctattagtcaccgtcaagctggattcacaatttcgttttggggtaaaaataatgcgagcctagtaagatgtcgaatttcgagtgaaattcatgaaagttgctgaaactttacaagaaccaagcgctttgagagacctctaagatttgggcgacaaaattcgagcgaaaattgtgaaaccatggcgtcaaaccaaccacacgagcaaccataacagtggaacctcagttcacatctcaaaagcaacgagaaagcttgtgcctgtgtttgcaccaaagcattcattccttccttcaaatacaactttattgtaaactgttccaaggaaacaggggcccaaaggccaaaggccaaagcccaacagtactcacagtgcacaaaagccacgaccaacaaaacaacgcaaaaccgcccgtgctctctcagaaaaagccagcagccaacaaacatgactccgttagctcttgtttagtaccacctcggctattcagccagctccacaccagcttaaatactcactcctcacctgctgactcgccgagccaggtagcgttggcttgtcacccgagcgggggcaataaggtggtgttggatgcctggtcgtttgcgcttggggtctgcgcctgtggtttgcactatgcggcccgcccgttccaagttgcgtagcgtgtgtggggcgcctgggcgaaggctcgagcgtccctgcacctagagtggcgggtattgcgtgaggctggtttcacagagcagcgagtaccgcccgcttccaacggtggaaggataacgggccgctgcagccctggcccgcttccggcccaagtgccttccatggcagaccaccacctttttttttagaaaaaagtacaccaaaggtcaaaggtccctcaacttgtcatcgagttacaaaattattcctcgaccacgaaaccagatataccacatcctttaactttgtaaaactgttcactttttttttagaaaaaagtacaccaaaggtcaaaggtccctcaacttgtcatcgagttacaaaattattcctcgaccacgaaaccagatataccacatcctttaactttgtaaaactgttcactttaggtcctttgcggcctgtttagttagagggagttggtgatggggaatgagatatatgggagtttaagtctgtagtttggttggaaaacttgggaattctagagggtttaggatggggaattaaaaggtcgaattcccaccaatctcttacttgggggaggcctgttaattcgtacaccaaaggtcaaaggtccctcaacttgtcatcgagttacaaaattattcctcgaccacgaaaccagatataccacatcctttaactttgtaaaactgttcactttaggtcctttgcggcctgtttagttagagggagttggtgatggggaatgagatatatgggagtttaagtctgtagtttggttggaaaacttgggaattcgagagggtttgggatggggaattaaaaggtcgaattcccaccaatctcttacttgggggaggcctgttaattcgtacaccaaaggtcaaaggtccctcaacttgtcatcgagttacaaaattattcctcaaccacgaaaccagatataccacatcctttaactttgtaaaactgttcactttaggtcctttgcggcctgtttagttagagggagttggtgatggggaatgagatatatgggagtttaagtctgtaatttggttggaaaacttgggaattcgagagggtttgggatggggaattaaaaggtcgaattcccaccaatctcttacttgggggaggcctgttaattcgtgagacttggagggaattcgatgtgaaaccaaacaagggatgaggactacaaatataactcccatgaccaattccaccatcaactccctccttaaaactcccattcctcttcccttctcttgccaaacagaccattggtggttttgtggccggttttctctaacgtggcagctgagtcaagatggaaccgagtcaagatggaacccacgtgtcaggtgaccacgtcatcttctctccctccctctctctatctcatttttctcctcagtctgggcaagccggctggcgacggcgacgacgtgggagcaggagggccgccccccacgccaccgccgccgccgacggtgcgggcgccatatttgcggccatggatgacgacggtggactcttgctctccccgccggctcctcttccaccgtgctctgcaacgacggcgcctcgggcgccggcgacgaagccgctgcccgttcgatctgaacctgctggcctcatccccgtcggccgccgccgaagccaacgagatggattggcgctgcgatatgctgctccacctctagcctgcacatcaccaaacgacagtagcaatcgccggcgaactctagcctcgacgacgacgacgacgatcaaccagcaaacagcaagaatcggcgaactggtactgggttgctgcgctccaatccaaccataaccattgctgctgctactgctactgcgaagaagctctacgaaccccattgctgctgctgcttattgaaattccatctaattaattaactatgtgggaagagaaagtttaaaaggaaatcgcaaacaagaaaaactgatagtgtggactcccatcagttgctaaccacacatcaagattacagtttgaagagttgtgtcttctgttcagcttcagtacttccaagcaactgcgacagtgagccaaatgcataaacaccttgatctgatcatcaacagatggaaaagacaccagatctatttgctattatcatcacacacagtacatctgaatgttacttttgaacgatgtacagatgcatccatggacacaattcgaatgctaggcctcttgtactccaaaggccttccggatttcagctatggctctgttcgctcgcaacatcagatcgaacatcctcggcaaatttgaagtcagatcggcggcggaggtggcggc

SEQ ID NO: 3276 - DNA, 8552 bp, Oryza sativa
cgagtgtgcgtgccgggcgcgcaggcggaggcgcgcgcgcgctccggccggcgccacgtgtgcgccgtggcgcgccgcggtggcgtgccgcgtcggggcgcgtgcgtgtcacggcgcgccacccgggtgttctcgttgtcttctctctcgcggtaattacctgccgtaagcctgtgttttgcattctgtagtacattgggaactaatcctctcaacacttctgtagtacattcttaaaacatcatttgttagattaatttagtattagcttaacaaaacttctttaaaattattattatcatatttttaaattgattttttatgaaaaatcattgtttaactatttagaaagcatgtgcgttaaaaaaattgagataactggaatttggaaagcgtttagcaaccgacaaaaaagaaaagccgtaaactaactgtgtgagaaagcgtcgtcctttatcctacctatggagtagatgtaatttcgtcgagttaaaatgaaaatgaaatatcaagtcttcgcagagccgaataaactttcttagaacttgcattggattgagttaaggtgatatctaaatcaaaagaaattctgtaggatttttacgggaaataactcccctgaaaaaaggggtaaaattcctgttgttgaaaagaagcttagcgtgtgagaaaatcttttgttgaaatggatcgaatacctctcatgttgcatttagaatgcgggaattttacgataatgttacaggaatttaaatattcgtatgaaacaggaacaataaacaagcatatgtgttcaaaatgagcatcaaatgtgaaagaaatacttcatcctaagctgcctctatgctgcttcaaattgatttccttatgttctaggaagacttcaaaatcttgtatattgctttaagcaaaaaacgagccgttaaagttaaacgcaggtgcaatgcattaaatcgtataagagcttgctttgtcacaggtggagcattgtataatctgcctttgtgttcatctgggcacacaagatattttgctagattgggtctacggttatgccgtcgctttctgcctttttcacgaggtacaccagctctaaccctcctaaatcacaccccgcctgcaaatcatcactacagctacccagtatattgttctcaacatgtgcttgtatttttcatactcttaggtggcatatctcgatcgaaaacctattgttaagctaagtgctcgtagcaattttttctattccatatcagttttcagtcaataaagctgtacaaagtacaaactttcggtgttaattagtcaatacctgatgtgtctgttagtacaacattaggcatttacatatcctttttaccatcgatcaaaataaaactgtccacattttatcccgggaccaaaccaaaatgtttttttgactatgtggtgcctccatcgaatttattgtttgtcctatggccgctgtaaaattttgaattctaaaacatagttttgaagttgtttttgagattttctaatcgtagtttattttgtagtttatttttgaacgtcgactcctaaattgctaaggccatatataaaaaaaagtgacccaaaaattattttctattgctgataatccatgctgcttataataagcattagactaactgatggcaacaaaagagttatagcatcaacacaccaatcaataacaaacaataacaaaatagagagaaatgaaaagaaaaactacaacatacatgtcaatatcgcttcaattattttaaattgctaaataggatggcacatgcatgatgccatgccatcaaaaaccgctcttggtcgcgaagctaaagcgaaagttgtagaaagctggaacaaaaaacaaaagcttgcttgaaccatcctatatcctaaccctcgaaagcgaagacgcaaagcttcacttttcaaaaggaaatgagtgaggctgacaatttaggtctaggaataaaatatgaagagtttcaagagttgtaatatggagagtttcaagagttgatggatgtacagaaaccgatttcatgacaattgcaagaggatgatgacgaggtacaaacccgaacagagccactgaaagttggaggttgagatggctaattgagagaacttcaactatagcttaaaaaaccatcatctggaacgagaaaggagatcatcgcagttgcggtgtagctcatcggagaagaaagtagcagatgacacaacttccttttcattgagcttgaggacaaaccctacactacagcattgatggtgagcccaaaagcccctagatgagaggcagttgctaaataagattgtggcaataccctccatgaccggacgcaaccgggacaaaacaagttagacgcaaacggctttcttgagctataaaagaaaagagaaaaaccaactacaggaagaactcaactatagaggacacaatccccttaccaacggccgatgactagggggaagaaagagaggggacggaagatgggatgcatgtaagtaactacaccggtacgaaagaagagagttttatagtatcacttaaaacttgaataccaagttatacgacgagatatcaatacgacaataccatttttaccatcagattttagttatttaacttacacaaacaagacaatcacactaaaattttactactatcgagctaatacatggacgctaatttatttatccaccggcagggaaggtgcaaataagcatcactgggtaggattatcagaggaacctaacaatttcggcactaatgggccccaccaagttgatgcaccaattggacttcatgaggtaggctgtggattcttcctgcaataaattaattaaggaaatgataatgataactgcggattagctaagagagcctaataaaaaaaacagtagtacgacaaagcagagaggagttcgggatatttctagactaacccagctgtagctgctccgagacagattgccttatccactactcctggtcccatctcaaaacaagattggagagcatctcatcagtacactgttcttctgtcaatgagatcgcattcaacctctgtcacttttgccccttctgaatctccccagcttgatgcagtttgtttatttttcaatactctaacctttaacacctttttctacaacaattgatttttcattttgatatgaaacaaaaatgaggaaaataaggtgttgttgttctaatataattgaggaatttcactttgggctatctttattaagtaaaattttacaatgaactaggactaaattcatattttcacacaacactgcatataattatatttttttttgtactttggactagggttcacaaagttgcaagcaccgaagactccatcaggtgatctactattttaataaattgttaatttaactttgggatggctcaattagacaattactctgctttaaagaaccgagcctaattaggggcgctataatccagtttcattattatggaattaacattgagtatttcattatttttagtttgagtacttcatcaagttaagtgccctcaactgttaagtagtgaaatatgatttgtgagcgttcatatgtagtaatgaaaccccatttatttaataggatctactataacttgctacattagttgttcttgtgctaacatgtgtatagttgtaatccctggtccaaatgcaataagaatgataactatatatgtggtgtcatgtgaaagataggttaggtcttaacccattgtaaaactttggttattaaagatcgtccaaagtaagattctctccacattattttagtttactactactccactagcttagatgctcatagcttgtaaccaaaaactctccataatttctttttttaaaaaaaaaactctccacaatggtttatttggcgatttggagagcatatgatttttttttgcaagcttcgagactgtattatcctgtttattgccccgtgatagactggtaatagaccttgtttatttaatatttcaaaataaattaaacatatgcaggagtaatcgtctgtcggaaagattttgatggtgaagccgaaaggtgtttcagaaaagaaagaaagaacgaaaggatgatgttacttcatattgagtatctcactctcaacagtcacctcctatgttatgtaactaatgcacctacctaggcctagcagaaggcaaaaatagaaaaaacttttgccccattatttacttgctgggttttattagccgtagcaaattttaaattttggaacttaagtataaagttatttttaatgttttctatggtactttgtttttagctttggattttttttaatcaaatgctttcgcccatctttactaacaaaacataacgattgttcttttagcattggattttaaataaacaagcagatataaaagttttatgcgttcgttcatttctccacgggttatcagccacagagcgatcgatcagagtgaattaataggaaattctattgcatcaaaattttatttacctgaatgccgtttttcttttatctttttaccactctctcttttacgctttaaactttcatttcaacccctttgctctctcactcttttcagaataaggaatcgttggttaaatagtagtagcagcagtataagacaaggcaataaaaacagacaagaggtagaaatacagtaaaatggacaaactagccatcatcacaggttcagtacaaggagcagtatttataaggactatatatcactatgcccccagtgaattcttgagcccctcttggagacaagcaaatttgataaaaaaacactagcctttgtctgaaaatattttagtactagtgaaaaggaacaatgaagaagggaaaatggtccaaggaagaggacgatttgatcaaaaaccacatggagaagtatggcattggccgtagctggcaggcactgtctgatgctttaggtttgtttttttttttcaccccttgatgcatacacactgttctgaacattggtattaacattaacaaattgatgtgctcccatcataaactaaaacgaaaagaaaaacttgcttatgtgaaaattgtgtttttttaatcaaatcgtcctcttcattggagcattttattgtagtcaagtaacctcttgcaaatgatctgctgttgctgtctagatcagttaatcttctgtttagggtaatagaaaatagtaggtaggtaaccctgttctactgcatgttatttactgtaaaaatggaaggcatgtgcagttacttgactacaataatttgtgcaacttttatgatctcaacagtttatattagttgcagaaaacactacaaaaattctgtttttattactagtagccccattatttatttatttgatcaatcctctaactgtacagtttcttattaattttttagacaagaaatatttctgttaggagtttaactgctatctattctcttctgattctctcagaaaaccatcactatatcgtttgctcatatctgacttgatcatggcaatgtatgaaacaagtgttttttttttccgatggttcgcagggctgcagaggtgtggccggagctgccgttcccggtggctgaactaccttcggccggggctgaagcacggcgacttctcgccggcggaggagaggatcatctgcaagatgtacagcaagaagggaagcaggtcagtgagccagcctcatgtatccacttctgttgttcataatctgagaattgttgattgtttcaacattgtctgcaagaactgcactgttttactcactgatttgatttgatttgatttgattggtctcatgttatatttagctgagatttcggatcaaatgatctgtaactttgtttatcacttctgttcatcgggatatgagaaattgagaattcttgattgttcaacattgtctgcaagaactgcactcttttactcactgatttgatttgatttggttgctctcatgttatatttagctgagatttctgatcaaatgatctgtaaattttgtttatcaatgatctgctagtgatgaataatgcttcaaaatctgcctgcttcgctttgttgcatcacggacacaagttgcgaattgttttttggttgccattgttgatggacgcagctggtcggccatcgccgcgcagctgccggggaggacggacctcgccgtcaagaactactggaacagcacgctcaagaagaggttcccggcggcggcggcggcgaggagcaccgccgccgcgcgccgcaggcaccgccccgccgccagcgccaccacatcgtccgacgacgacgacgacgtcgacgtcgacgacgcgaccccgcccggcctcgcgctggtcgtctacagcgaggggagcaccgccgccgcggcggcggccggcgagctcgctccgtactccatctcatccccggccgccactgccgacgcggcggaagaagaagagccgatcgcggccgttccgatcagcacctgcatcctggcactgccgccgccaccaccaccgccaccgccgccgccgagcgatgccaccggcggcgaggtgagcatcccctgcttccccttctcgccgctgccattcatcgagccggacttgccggagctgacctggacgaccgacctcgacgacattaccgccaccttcgatgccgccgcctgccgctacccgaagcggccgcatccaatcacaccggattcgcctcgccttccgaagcttcccgccattgccggcttcgacgacgtgcagagcttcttgtcttggttcgatgactgatagtgtagcaagaaatggctcagttcttggtcggaattaacagtagctggtttaggaggagatgcatggttatcatttgtgtaatctgttcgaaatttttttaaaaagtttttaaggttgtttgtgtggctactggctacgtgattatctaagaactatcggttgatctaatcattatctgtgaacttgctggttgcgaaggtgaaccaaatgatttagttttttagcataaatttgtcgcaaatttgttttataatttaaccaaaagcttttttgaaaaattgaaaataaaatcatctgtagcatatgcctacggtataatacgtcgccgtttctgcttgctcgtgccaccgcagcgcctcccgccgccgccgccgaccgatgcctcgccggtcgccgctgcctctactctactcctcctcctcctcccctttcaccgcttcattggcggtgctcgcggcgtgaccccgagctcggagctgacgtctcagcgctgctgctccgcggacggctcggcgcgcgccaactgttcgacgaattgccccaccgagtccggtggcgccgcggctaccttcgcgccgccttcgctgcctccgtctccaacctcaacgcgcgagacggccacaggggaggtaggtttcgatgatctcatcacctgcggcgatcgatcgatctcagctcgtcagcttccgatctcgcgtgtgacgcctggacctctcgtcgctttggttttggttgcattttaagagctttgtttaatttttttttcttgcagtgaaagcagaggctatgaaatcatcggcgcaatgaagtaatcactcctgtcaatggtgattgattcagcaatgctgctatcttgcgagaagtcaatccgtttctcgatgaaatattgctttggtctgaaaggttagacaaacattatcctcttgttacagattccaaacaggtttcttttcatggtttaatcctgctgacacatgtggttactggctacatgatacaatagctgccaatgaatgccaaggttggatggttacaaactgcatctgaacttgaaattgaaacactgactgttggtgcaaacctagagtttctattatgtttaatcggtataggacatgttttatgatccaatcttttatttttactggttcataaaagtgtacctggtgccaaacttcaaaaaaaaaagaaggtaaaagtgtacctgccttatctgccagtgtcgtatccagtacagagagagaggaaacacattgtattgagcaagcagctctgtcagtgtcaataaccatactactgaaatctattttcacagagtacaagtgtgctgatgatatataatggtagataccataggttattggtgagaaaatcttttaactttggaatttctgtttgtgcatacttcattaactgtactatccctattgtcctgttgctgtaaaactcgttgatcattttattaaaaaaaatatttttaaaaagctagccctgaatacctcattggattaaaaaaggtgttcatgtttgttctctttctctggtgctgaagctgaaagcatgttctccacatttttggccaacctataaattaaccaagttatcgaatgcaatatatcttagagaggacaactagatggtgcaaatatggtactccctccattttttaatagatgacgccgttgactttttctcacatgtttgaccattcgtcttatt

SEQ ID NO: 3277 - DNA, 19774 bp, Oryza sativa
ccacgcttacttagctgccacttaaatcaaaaccggggtcaaaaccaccgaaggatctcgggtgactggttttgtatagttaagggaccctgcatatctggttttgtgtttcgagaacgttttttatcccgatgacaagttgagggaccttcggtatactttttccaaaacagaattgtttagtaccacctcgcccagccacgatagaggggagccggaggcgctgtatataacgcgacccgataccaaatcacaaagcatacctttctcagccttttggctaagatcaagtgtagtatctgttattatcagtttaatatctgatatgtgggccatatttccatggatattaaattaatattttgtgggggagggtccaccacggtagctcgctactgggcgagccctggctttgcactgctgccttggcccggcgcacctgtaaaattttttaagcttttgctcatgttaatttggtttaatcattgaccgaattaaactgactaggagtgaaatcattgatgaatttttgacttgacttgacttttcagtgaatgattttaagatttatttgtccaaactgagttattttggttccagtttatattgaaaaacaaacaaacgagaggtgtgtatttggtttaatcgttgaagaaattaaactgactaggaatgaaatcattgacgaattttttactgactttttagtgagtgattttaatatttatttgtccaaactgtgagtgattttggttccagtttatattgaaaaacaaacgaacgagaggtgtgtatttggtttaatcattgacaaaattaaactgactaggaatgaaatcattgacgaattttttacttgacttttcagtgagtgattttaagatttatttgtccaaaccgtgagtgatttttggttccagtttatattgaaaaacaaacaaacgagaggtgtgtttggtaagcctcgtctcgaaatggcgacttgctccgctgcttgcgctcgcccagccgtcgtcgtcttcgcgtcgccggccgccgcgcggcggcgcgccgcctcctccgtctacctccctggtcggcctctgcgcggcggcggcgtcgtgcgatgcagcgctgggcctgtaagcggtgggatgatctcgaagaagggtaagatatgttcctcctcgtctcgcgtggggatttttttcgcttggaaaaatctgacggtggccgtggccgtggcagtggcggagctgtgggcggcggcgaggagcgcgtcgccggtggcggtgatcgccgcggtggccggagcggcggtggtctacaaggtggggtccagtctcctcgcgccgcctcctccgccggcgaggccccgggaggagcccagcgaggaggccccgccgcctccggagccggtgcaggtgggggagatcacggcggaggagttgctgcagtacgacgggtccgaccccgagaagccgttgctcatggcgatcaaggggcagatctatgacgtctcccagagcaggtcgctttcgttaagccctagcttctgtaaaccctcgttttaaagcttttctgctactatgtttctagtttcaaaaaccaaagctgaattgtggatttgtgatagattattcaacttagttcactgacgagtggaatcagctacagaaatgaagtgcaattcatttaatttggtgactacatctatgctattctattcgttgtgtttgtgaagattacatggttttaagaataatagactaacaggcaagtagagtcgaatcaggatcaatctgaatgctaatcggcaagggcttgttcggttaatccccacgatggagggattggaggggattaattccacctctcaataggtgtggaataaatcccctccgattccccttgaatccccttgtgggagggattaaccgaacaaggcttaaatgtttgatgttcgtatccttcagtcctggaaatgaatataagatcaattttagatttctcaaaataaactgcatattcatatgacaaaattattgttcatatgctgttatcaatgtgcacatgttatctgattgtgtgcttagatcatcagtgatcagctcgccatgggactaaagtctgttgttgttcttatagatcaccactattcgctgttaagtatgcctgctatctgatattgtgtgctacagcatgcagtaacatatgcctcaataaaagtctagaagcctaatactaacttctcagttgggatttatgcatgtggaagtactgtatatttgtaagaacaacatttcctatgataaaaatagagtattatttataacctacatttggttcctcatgaggtctgctgaaagtttggaacttacgcatgaaaaaatgctggatatcaaaggaggagctttaatatcaatatagtattaagaagagagggtgagaagcctgggattgaactcaggcccggtggtagcgctggtagctcttctaccactacaccttgtgccattctctggaacttatgcatatgcctacgtttctccaaatcaccaacttataatgttccctacaatagtgtttttcttgcttacgattacaaaatccatatccagttatccgcactcccagggcattttgttatcttcctcagttcaaactttcagtaatattgtctttgcctcatattgtgtttactgcacataaccttcgtaactaaatgattttctctgtgcagattgttctatggacctggtggaccatatgcattgtttgctggtaaagatgccagtagggcgttggcgaagatgtcctttgagccacaagatctgactgatgatatatctggcctaagtttacttgaactcagtgcccttcaggactgggagtacaagttcagcagcaagtacgtgaaggttggaaccataaaaaaggtgctcgtagaacagggtggcgatagcactgccgatgcaatagaggaggcagctgtcgatggtgaagacagcatcctgactgctaagatgtctaatcaattactatatgaggaagaaatggaagtcggtagtgatgatccatgaaggcttcaggagttgaaaactgaattgccttctagcagctaacttcacgcatcaagaattcaagacaaataatcgcagaatgatgtttcatgaattcatgtgtctataggtgtagattacaagaagatactgcattactgctgtcgatttccctttgtcaatactcaaggatatgttgccgtaatgccatgttattagttggctgtcctgttcgtcaataatttcatatttctacctgcccacagaaccccttttcttggttacatgctaattcttcattctttcttgtattgctctccatgcattcttgtagcattgtccgccatgccattattggaacagcttaatacttcataaataccttgaatctgggggcatgtcaggtcaggtgtaattgatttgaacagcagaggaaaatcaaagcaaccagtgccaaactaggcaaggaacttaggcgcaatgagtaaattattcatccagcacaggtatttcattctctggtttctgatggtggattggtggtttctatcacaatttattttaagattgtaaagggcagaagatacataatctctattgcaatttattttagtaatgcttaattgctaagcatattatcttgtacctagctggcatcgaacaatccattccatgaacatgacatagatgttttcttgcgtaacacaccttggcatgagatctagaagcacaactaatatattcaaatgagcttcaagaacacaaataaaagattgctcaacaaagaaacaaccgacaataaaacaaatattttctcagggataggtggacagcgcatgagaccaacctgaagctgcctttttgtttatctcatcactgcttgtatcatgccctacttcagggagtcaactactttcgtcagcaaaatgcaccaggattgttcagctgcataggaacaagaagttgaatttatacctttttcctaactcccaaagtgtcaactttttcatgttctaaccacctttttcatgatcagtgtgacaggtgtaaggacagaggaagctacttccaacagcaaaattctgaacttctgttttctttgagcctttgaggaagtactattggagcacacaacactcgcacaaattaagtatgtcttctttttttttagaaacatggtagattaaattaaatgataggagatattacaaccctgtttttacaagaaataaaagcaaacgctccgttaaaatagaacaaagagatattgcaagatatgcggacagacgagcgcgtagccactgatgaaatccgatgtcaaacatgttatctgctgatgcccagacatatatgttttctaacacgcttaaaatacttttgttgttctaggcaccagcatggccttcttctaacagttaatagccatcaaccgtgcaaggttgttacttgttaccactacaacacaattacgtagcagtaacagatgtaagatttttcctccttttttttttctgaattgaaagatggatgtaagatgttttgccatgtgaagtcttcaggtaacctaagaataaaagatttagcaaaattgcagtcaaagccaagcctcaccaggtcacccactcaccacacggaagagtcttgttgacgagtagggatcttctgtggcatgatcatctcctttgtttgcttgaaacggtcgcatcgtaagcagccagcaagtagcagagaatgagtcattgtgcacataagatcccagctttgacagattaagcgtccaactaaaacgtgcaggaaaacagccgtatacacaccagcacgatgtcaaacgccatagaaaattagtattgtttaggaaggttcaactctggtcttctaatctgcagtgtgtaaactgagctgccacctttgatgctcctcatttctttttgagaatgtttcccggtcaactacggttcatgcatgcaattgatgcaatctcagtcctgtctaactgaaatattctttgttcttaaaaaggagtgtattcataatcaccgctcagttcttacaattattggtaccattagatcccaactagattacctctaattaattaagttcagaagtaatatagtttctttaaagcaaaggcaagaataaattttaaaaaataatgcagactgaatactccttttttaaaaaaacttactgagagtgtgtttagttcgcgctaaaattggaagtttagttaaaattgtaacgatgtgacggaaaagttaaaagtttgtgtgtagaaaagttttgatacgatgaaaaggttgaaagtttttttaaaaaaatttggaactaaactcggcctgaatactgcatgttgaacaactttctccccgacactgaacaaacagggcaatgctgcaatgttaatttcgaaagggaaactacattttggcaggatggttcttccatggccggcaatgacgggagctttggcttgatgtcgccatttccacgcacactatgttccaaaatgtgagtccaatagcaacggcgcgagaaaggaacattgcaaagatgcaaccgtgttctttgctctcatcagagagagaaacgctccatttgtttatcaaaaaccattttgctaaagcaaaaccacttgggtattagtaaattttagagaatgattcatagcttgtcgtgcctcaaaatcttcgaatatgcgtcgcattattatcgattagtactcatcttcaacatgattaaagaaatccaaaatagacccaagcaattacaaaataaaatgaaaccaagatacttaaaccgagttctaaaatggggttggaatcaatccctctaccacgatttccgaactgttaaaagatgtatttcgtgatattttttacatatttttgaaataaataaataaatctctatagtttataatactagttaatgctcaactaatcataaattaatgacttatcctttttttcaagcctaaggatgagttctattcttctctttcccaattcacctttctcttttttcgcatacacgtttttcatactactaaacattgtattttttcaaaaaaaattataacaaaagttgtttcaaaaatatattaatataatttaaaattatttatacttaattaattatacattgataaaccaccacgttttctaaaatcagcatgagacccttgaccgacatgtgggcccacaaggtcaggagagtgtggccaccacgtcgacacgctggggccgtcggccacaggaggtggacgtgcggaggccatgggagctgcgtgtgcccacctcgcatgctcaaaatttgatggctgcaattcgcgaatgggttttctttcagagatgagaaaaagcgaagagagagataagggtagaggatagaatgtggcagctgcagccaatcagaggccagaggccaccacactccccctaccctctcatcccttccccccaccccccaccaaacccaacatggccatgggattcataaacattttggaaatcttgggatagtcaccttttgtttttggggcttgtagtttttggaaatttgggggaggtccaactcttgctccttttttttttcttttacaacaccgtgtttagttccaaagtttttcttcaaacttccaacttttccatcacatcaaaactttcctacacacataaacttctaacttttctgtcacatcgttccaatttcaaccaaacttccaattttgatgtgaactaaacacatcccaagtttgaatgtgaaggtgaggtcaccacgtaatgagtatttactcgcatttcgctctttggggacccataagataaaaacttaaagcaaaatacgataagttcaatctttcctagttcccacatgctgctaaattttctcggaaatttttattgtataaacttatgacaaacggtgacatgctggaacgtgatatcatctgaatccaatcaagacaataaacttctaaccaaatttgatcaatctcctggtgaaagaaatctcttcatagatctcctgatgaaagaatttaacactgaaagaaaaacaagagattcacaagagcttgagacaaagttacaaattcccccctaacacaggggcctctgaacaaaactaattttgcaatagaaaaattcagagccggcagtagaccgagccaatgcatcccactgttgcgtgggccccacacgccatggcctaaccacccctcctcttcatccccccataacctctcgctccaaagctccaaccttttcctcctcttgaccaagccaagaacaccaatccccgcatcaccaatccacacaagcttcgcagctcgcgcgccgcgggaggggagggagaaaagctcgcccccgagatttttctcctctcctctctgctcgtgtttcttggattggtccatatatccacggttcttgggggcgcggcgcgccgccattgatctggttttggttttgtgaggaggagaagttgcggtggtgctggtgctggtgctttcttgatctgatgatggcgagcacgacgtcagcgacggccgccgggggcgcgttcgccgccgcgaagacgcgggcggggtcgtcggcggcgggcggcggcgcgtgcgcgagggtcgccgccggcgggcggaggcggtccggcgtggtggtgcggtgcgacgccggcgtggaggcgcaggcccaggcgcaggcggtggccaaggccgccagcgtcgccgcgctcgagcagttcaagatctccgccgaccgtgagtatcctcctcgcgtccctagcccctccttttcttcccgcttcgagctcgccggcgttgatgcgacagctgtgaaaatctttgcgtttttcttcgtgttttggtgctttgattactgctagttcatatttgagcatgtcaattagtcaataggtaggttgtgtatggagaagaaaaggaaaagatttgggatgtcgcattgctcttttctagatttgctttgatttgtatgaactatttctgcaggttttctgctaagcgaattttgtttactacctatacgtttaaccggctaagtaatttgagagagaaaagaagaggcaatttgtgagctatcttggcattagagcgaattagcattggagatgacgaacttacacgctaacccaaaggaattattattttttgctgttctccagtgaattgcagggagaaagcacatgccaacttgtttttttgtgggttagttgtagacctgtagtagtaatacacgaaatggctttttttattatggcaaagagcttttcatagtaagtaaccgaataatagtagttcaacaaactggttactattactgcaagatgccaaattttcaaatacataaagatgaaaagaacacgtcgtagttgtattttgttttattattagctattggccaagtatgttgcatggaaaaaggttccactctatcttgttttggtcaattgtttgggaatttgaggttgtaaccctatgtaattagtaattactgcaaaaagtaggtattccagatttgcaaccattacactcataatgtaaacacaggatacacccaaaagaaaaaaaagtatccatgtgcaactattgattgaaaacgttttgtgatgcgccatcgatttttagtttcatccttttagtacaattttttacatgtttacttcttgcagtatttgacaattttttctttcactatcagggtacatgaaggaaagaagtagcatagcggtaataggcctcagtgtacacactgcaccagtggagatgcgtgagaaacttgctgttgcagaggaactatggccccgtgctatctcagaactcaccagtctgaatcatattgaagaggctgctgttcttagtacctgcaatagaatggaaatctatgtggtagctttatcgtggaaccgtgggattagagaagtggtagactggatgtcaaaggtaaggattgtttcatcaaatgctcatttgttctgtccatagtcttcttttctcgtcttttccctttttctgtgactgaagaacgcggtttgtcttagatggttctaattcctctgctgctttttttttcaacagaaaagtggaatccctgcttctgagctcagggagcatctattcatgttgcgtgacagtgatgccacacgccatctgtttgaggtatctgctgggcttgactctttggttcttggagaagggcaaatccttgctcaagttaaacaagttgtcagaagtgggcaaaacagtggaggcttgggaaagaacatcgataggatgttcaaggatgcaatcactgctggaaagcgtgtccgctgcgagactaacatatcatcaggtgctgtctctgtcagttcagctgcagttgaattggccttgatgaagcttccaaagtcggaatgcctatctgctaggatgctgttgattggtgctggcaagatgggaaagttggtggttaaacatttgattgccaagggatgcaagaaagttgttgtggtgaaccgttcagtggaaagggtggatgccatccgcgaagagatgaaagacattgagattgtgtacaggcctcttacagagatgtatgaagccgctgccgaagctgatgtcgtgttcacaagcacggcatccgaaaccccattgttcacaaaggagcacgcagaggcgcttcccgctatttctgatgctatgggtggtgttcgactctttgtcgacatatccgtccccagaaatgtcagcgcctgtgtgtctgaagttggccatgcgcgagtatacaacgtcgatgacttgaaagaggttgtggaagccaacaaggaggaccggcttaggaaagcaatggaggcccaaacaatcatcacccaagaattgaaacggttcgaggcatggagggactcgctggagactgttccgactatcaagaagctgaggtcctacgccgacaggatcagggcttcggagcttgagaagtgcctccagaagatcggcgaagacgccctcaccaagaagatgagaagatccatcgaggagctcagcaccggcatcgtgaacaagcttctccacggcccattgcagcacctgagatgtgacggcagcgacagccgcaccctcgatgagacgctggagaacatgcacgccctcaacaggatgttcagcctcgacaccgagaaggcgatcattgagcagaagatcaaggcgaaggtggagaagtcccagaactgagattgaagaagagatttttttttttcagcccgtgtatctactatgtatactactaccatatctgtccagacattctaattccaattttttttctctctctcttgagcctttgcttactgagccctcgctgagttggtcaaattgtctcgtgaattagcgccatggctgctgctagagataactaggaaaatgccttgtttgtaaattactgcatctgctgtggcaagagctccattttgaagatattatatacacgctgttggtgaaataaaatcagaagttcatcaacctttgaagctgttgttttgtgagcttatatcatttttgtacagttatgtcagatcgtgtatgtaaaattgttgattattaacacttcccctagtgttcagctgtttgtccatgttgattgcctgcactctgcagcgaatcttaagggaatttgtgctcctcaggcttcgttttgtgctgaactggcttttcagaattacacaacaaaccacatactagagctaacaattaattctcgtaatttttcgtagttagtgcacagtgaacacagtggagcccgatttgtataaaaaccatcagaatctgtatcttggaaactcaaaattcaaacacgactagtacgtagtacacccttggtccaaaaaaaaccaaaattctaatacgctatgtatagattcgtagttaaaaattactccctctatcccataatataaggcgtgtacatatttcaagattcaattttaaaaacatttgaccaacaattattataatataaattaaattttatttgctaaaattaatataattgacatttaaatttactttaagatggttataattttgttgcaataaactttatagtatatgagaaattataaaaaaaaattttgaagaccgtaccaagtattattattattttaagctggccggaacagcgacgcgcgccgtgggctggaatctacacccagtctcaccgaaccgggcctggccggcgggccgtaaacctctaattctttcctcgggatgagtagccggcccggcccggcccacccagctcaggcgagaaacctcttccccgcgtcgccgtcgccgtcggtctcgctctgttcacgacggcgaagtgaggagctctcgcggcggatcaatgtgaaccctttgacgcgccgccggctggctgggacacaccatcgctttcgcccatcgcgtcgcgtacgagcaatggccggcgaggattttttttttcttttttaccccaaacctggatcgaattaacgagcctttttttctgtaatatttctgttcttctgtagatgctactattattttttttctgataatgtttttagaagtatattttagaaagctgcatgttctatgattaaagttgcagaaaacaagacccttggagtattttctttaaaaaaaaacttgcaggaaatcacacatattatgatttctggcataaaacccaccttatttaaatctcaagtaaatttagcatatgtgaaaagaatattattcaaaacagcgtagtaacaaaccaacaacatgtattaaaaaatcggaagctaatttttttacagacactttatacgttgaaattttaaaaaaaacacattcaacatgtataatgagtggtgatcaaagtatgatgagtcatcactgatgaagacttcataagtgatgagatggcggattgcatgagtcaggctcttgtgcctaacaaattatggatgccatcactgaaaacttgttgtcttctgcactcctcagagacttcttgagtcttgacatcttgaacagaacagtgcatctcttgtactagcacattgtacacaattgtacatcatgcatagtgatcagctaggctgtctaacttctgctgctaaatcctagctaatccctaactctacaatttctagcccaactctctccaattacagagatatttaatggccatgtgtcctccatcagtggattggtctacgaactgttcttaactgaagttcatgcattgatcattgcttgacacctagattaattcaatactatgcgtaattgcaccttgctccgggtaaagcacaccttgtttcactttgcaccagatttatcatgtactttcactttacactagaggctattgcctattgatatgagattcaattaatatccagatgcagcatcaaacctataaaaactattatgaaatttcagaaaattatgcatgagttattataaaatatgaatacaacttttatgaaaactcatgagttgtattcatattttataagatttatcttcaattatatgaagcaacttgatgcaaaataaaacttatttagatacactctatgtgtaaagtgaaagtatgtaattaactgggtgcaaagtaaaacaagctacactacaccgggtgctaagtgcaatttactcttaaattattataggagaaaaactctgtagcttgtttttttctccacaagccggatcatttgaaatataatgatcttagttccagaaaaaaaaattataggaggtcaatcttgtcacaatggtgggcagcataagtccaagtcggtgccaaggaggtccttgcatttacttcttacagtgcacttggacttgggagagctttcttggtgacttggtgaaagatccatttgccttgtcactataaaagcagaaaagcaacacacattttcgttagaactttttgcccccagatctcctcctctcttccttgctcagctgttcttgttcctcttgctaggtgaaacactttcttgaattgctgagaccatgttgagatcaagaaaatccagggtaatggtgatgctagttactgctgctcttctactgacggatatggccggcgttagctatggccggaggctcatcccggacctcgatgccatggcggtcgtcggcggctcgccgccggcgaaaggcgggtacatgtcaaggttgcaggttcctccttcagattcaggacatcacgttggcgatgagtacagaagcatgcatgctgtttccaagagattggtgcctcagggaccaaatccactgcacaactgatcagcagcttcagctgagccagcttcttctctgctgccttttcaaggagatatgctacagtttaattgcagtcaattagccacactgagtgaattttcacttcattgagtggtgtaaattagatcttgtagagtagtaagagtaaaaggtacatatgtgtgtatgtaagtattttagtgtgaagagtgaagaatgtaacatttggttctttttacttatagtaaactctgaaaagggtaaagtctttctggtttgtggtgcgcaggacgaaaatgttattgaaaatatatgcaaatgtatttactagaataatataggatacaagtcaaagttttcagtgcagttgtgttctttgtcaattttctgaaaagaatatgttcagacttgagagataagaacaatgtactgataattgatgatttaggcagtacaatccaagttatcagaacttcaaaattgtggatcccaaagtcttcatggcagctcagactttagaacttcaaagcaggactactcgtatatcatccaaatgcatgtcattgtttagtcaggttggtggtaaatgatagattaaagaaatcaaatggaagaaggcttcttttttctgccgctccacgtattttagtaaggaaaatattgcaatgaaaatgacataagcaaggaaaaatatatttttgtcagtaggacaactagcgcatatcatcaaggttcaagtgagagatcacagcacatcaaggtgctgaaaatagctagcaatgtattgtcattcgtgacacatcaaacaagttaggctgttactgtgagtgtggtgctatttgacttggaagcacgtgaagcgattttcaggcagttttctgaaaacaatattcagaattcaagaaaagtctgaaacctttctgcctggtccatatatagcacaatgccaccttccaagtctgaaacttttacaaagattttatttttcttacaatggagagtttaggtgctgtgaatttgaaacatttaccaagatcgcatcctcagtaatgcactctttgtttttcaccttccaaattaaagaaaagttttgtcgataaaaccatgcaggcaaagtacggatctccaagatccgaatgttcagtcaaacattcagattccaaattgcaattcggctgccatccaaactcaccattctacagtctatactctaataactctatacaccaactctaacaaaatcaatcatacgatgagtcacgcagccgatccacatgaagacgcattttgcattagacaaatccaatatgtattcaactgttcattattagataaatccaaagctcagaaccaggacaaccagctcccgaatagaaaaaaactgtggacactagcgcacatgagccatgaaacagaaccttcaacttaaaaatcaatccatgattggccttggagagttggacctcactccatccagttccatcttcttgacctcctttccagcttcttcttactctgctcccaaatcttctcacatacatgaagctgctgctgccgccgtcgatacgacggggcatgctggtcaccttcttcttggcatgcttctttcttgcagagcttgctggtttcagccatggaaggagagttatggaggacaaagaagacgatcactcagaggcgtcttcagaggagcagctctacgagttgccaagaacaagaggacggccttttgtcagtgctcccagcccggcgtatgaagcttccgacaggccagtgcctcaaggctcgaatcctctgcataatcgatgaggtttcttcttgctgaatttcctctgctggccaagcacatgcagatgcgttaattgtagctctagcagtgtatgcagatgagaagaatgctgaacattgaacaacgagtttggcttttcacccttgtttgtgagtgaaaaaagtacatgcaatagcacgagtaagcaaacttggagttgcatatagtatagacctgttaattgatgtgtttttccacaattgcattatcctagttgcatataggacaggaagcaaatagttaaaaagttgcaagcttggagttggtttgcttccttttattttgtaaccttgtacagtaaaccagtctgtagtactcactagttctatttgatgatcaaatcaaccccactgttcttgacaaaactggaccaaaaaaaagggtgaaaaaaaaagatgggggtctgccatggaaggcacatgggccggaagcgggccagggctgcagcggcccgttatccttccaccgttggaagcgggcggtactcgctgctctgtgaaaccagcctcacgcaatacccgccactctaggtgcagggacgctctagctttcgccagggcgccccatacacgctacgcaacttggaacgggcgggccgcatagagcgaaccacaggcccaggccaaagcgcaaacgaccaggcatccgcaccaccttattgcccccgctcgggtgacaagccatcgctacttggctcggcgagaaagcgggtggggagtgagtatttaagctggtgtggagcttactgaattggcgaggtggtactaaactcgagttgtttgtcagcttcctctgactctgagaggtttgttttttggttagctcgtggccttcgtggatttgtgaggatggttgggctttgggcttctgtttcacaataatcaacaggccttgtccttggagcacttcgcacaaaactcggtccttgtgagatgggaactggactctccgttgtgttcttgcagaaagtttttgtggattgagcttgtagtgattttctgccgttgatttttctttaattgtagcatcaaggcagaaaggttttacaattccaagaactgcatttgcagagatcaaaatatattactagcaattttagccatacaatagttgctcaacttcaaaaatgtcatcctgtcagttggcagggatctgtaatttggatggacaagctagcagatcattttcactcaaatttgagaagccaggacatgaaaatttcactttacatgtacaaacggatagattgccttggttctagatctgaaaattaccaggtacatcaaatggaaatccaagggcaaatcgcccaattcaatctctttcgtttacaactaccacaaaaacattggagcaaagaattccgcatatgacactgaaaaggtagctgcattcctcttcctcccaaagatcttcttcccccatcagaaactagtgccagcatttcgatgcatccaggatctgcgtcagcaatgcagcgtttcttgtgcaaagccagcaaagcaaccctgtaaaatgatcacctcaaaccggatcaaattttccttgccacaaacttgaagctggcatgatttacgtatctgaaatctgaaggaatcccacaaatctatagaacaagatgctttatacgaccaaatcaggaatcaggtacagaacagatgaaccaaaaaaaaaactcaagagaattacaatcacaaatccataagctattcgagtcacacactttatgaacacaaacacaccgcacaatgcagggacgatggtttcttgaatgccccccaccgaaagaacgccaattgaaccacacgcatccacagatcacacgaacacgcagaaactaatcaagaagcggatcagagaagggagcagcagatgagatcacatcttggcgaaggaggcggaggaggcggatcggtcgtagtagtactcggggagggcctgggggcgggagagcatgagggggcggtccttggcctcctcggggtcgtagtcgtcgccctcgtcgtcggcggtgtggacgtggatgcaggagcagctctccatggacgcgaagaaggccgacgccacgctggccccgacccagatcgcgtacccctccagcttctcgtacgacaggatgccgccgccgccgccgccgacgccatccatggctagccgccgcgctcgccggaaaacgtgaaaaagtgggagacagtgggggaggaagggttcgtggtggctatttttctctcgtttttgcctttggttttcctggaacagttcgttttggctgttgtcctaaagttggcgaaggaggttgggaagttgggaaagggaaagcgaatgtcggattttgagaccttcgaggcatgtggttttttttttcttcttcaaaagaataggagtggttaatatgatgtctaaataatataaataaataaataaaacttattatgttgcatgtacctccacaagcatgtcggatcaaattctgttgatattttgagaaaacaataaaaatggatcataatctctcgagtggtctccctgttctcatatgtatatacataattattttttaaaaaaaatgacaagctttaatttcaaatttgatatccttaagttaaaaaaacaaattaaactctaaccagtatacatgtccatgtagtcatatttgtttttatgttgtagtttgtagatttcaaatttaaagcatattaatatatcttgttaatttttaatattttttataacattttagatgatatgagaaaaaaaacaaggcaaaagtatttccccgaaaataaagaatctagtaaggggtacatcataaacaaatagcaaagcaaaaatttacaggcatgttactttgtggttgtaaagttagatttcaacattcaaattttggttgcaagcagataaaaatcgtccaaatttagaataagttcaccggccatccctcaactttacaccacgattttttaaggtccttcaaccacaaaaccagaaatctccacccctaaaccatacaaaaccgctcactcaaagtctctaggcaatatatatgggtggtttcgctgacgtggcatcctaatctccatgtgtcaacgacggttgccgccaccaccaactgggcgcctgcgacgctagcgcatgcccgcgcctccccgtcgcccacccgcgccgccatgcttccccactgtgtccgtcggcgcggtgcagcgccgccctcctcctctcctgcctcgcctcgccgaccggcctacagacatatatatagagagaggaggaatggagatagagagaggaggaatggaggaactgaggagtcacctaggtgtagaaaatactttctggaggaggaaccgaggatgagaagaggggagagagaaggatgacgtggcatccttacatgtgagtctcacgctgactcagccgccacgtaagacaaaaccgggtcaaaactaccgaaggacctaatgtgatcggttttgattagttaagggacacctggttgggggacgattttgtaattcaataacaaattgagggaccttcagtgtactttttcccctcggggaatcacgtgggccctgcggccgtgaaggcccaaaccgtccgggagacgagacgcgacgcgagacgacgaaggcagataagtcgataagatcgtaagatcgcggcgaggcgcgcacacacaccagctctctctctctctctctctctctctctctctctctctctctctctctctctcttcgccgcagcgcagccaccctcacttgtcgcggccgcacggacatggcctccacctcttcctgcctcgcctcgccggccacggcggcggcggcgccccggctgcgggtgcgggtgacgccgagggcggggcgggtggtggcgtgctcggccgggggtggcggcgggccggaggcggcggggctgtttgccggtgagcgcaaggcggtgggcgggcttgcgtgcggcgtcctcgcggcctgggccgtcgcgtcctcgtccagccccgtgattgccgccagccaggttggtctccatggcattctattggggggtgtagtgatcttcctctggtggaataaatcccgcacgatcgtgacaacgggtgaacaaatacataggctagagttgcgcttggcaggaattgtgtgcttagaaagagaaatcacttgatttggagctgtttaattccctgtcaaatgcaatgagagttaccaaatcaagattgaccccagtatttcgctcaaattcgatagaagaaccaagtaataagggaaatgcatttagtttagctgacctaactgatcaaatcgagtaaccatccaatgttgctcttgattccttcttcaaatcccatcaaagaaaaatctgcttaaatttctccatgcaaaagataggcgggaccgctggagtgttgttagaatgtaggattttttttttgagtaaatttcacaaaactacagatactatgaccaaattatcacaaaactacagatttaactcgatgtatcacaaaactacacatttaacaccaaatttatcacaaaactacacatttaagatgaagtgtcacaaaactacatatttagtaactaaattatcacaaaactataggtttag

SEQ ID NO: 3278 - DNA, 527 bp, Oryza sativa
tgcgttcccttgaatagtgattgttcccttcggtcccggcatcttgagcacttgatatgcgtagtgggatgcggccatgaacttcgcaagtgcagttctcccgatgatggcgttgtaagctgtatcgaattcagcgacatcgaaggtgatctgctctgttcggaagttgttggcttggccaaaggtcacaggcagcgtaatcttgcccaaaggtctggatgatgattggggagtaattccatggaagggttgatcagttggtgtcagctcactttgtggaattcccattgcatccaaagtggtggcaaaaagaaggttgatcgagctgcccccgtcgatgagaactcgtgctaccttgatgttccgaatagtgggttcgaccacgatcggataccgtcccgggataaccgaggttttgggatggtctgcttccgagaactccatcttctgctcagaccacttcatcctgggtgcagccccctgccatgtcgaacaaacctcgcgttccactttcttgtattctcgct

SEQ ID NO: 3279 - DNA, 736 bp, Oryza sativa
atcttcgaacacttttctaggatgatgagtaggccagaaccgagaacatgcgatattaactggcaagccttgcatgccccaacgacggacctctcgcatctggacgatcctttcacggaacaggagattcatcgggcaatcaaggagatgccagctgacaggcaccagggccagatggctacacggggaacttctttaaagtttgctgggacattatcaagggggacattatggcggtcttcgaatcgcttaataatctgagatgtgcgaacatgaacctcctgaactcagctaacatcgtcctgattccaaaaaaggaaggcgcggatgaggtgacggactacaggcccattagcctaatccacagtatagcaaagatcctctccaaaaccttggctttgcgactacgattacacatgcgaaccctcgtcacagtcaatcaaagcgccttcatcaaaggcaggagcatccacgacaacttcctctatgttagaaatttggcaagaagataccatagaacaaggcggccaatgcttctcttcaagcttgacataaccaaagccttcgattcggtgcgttgggattaccttttagccatgatgcaacatcatgggttcccgcagaaatggagagactgggtgacggccatactcactacctccacctcgcaagtactactcaacgggataccaggagaaaagatagcacatggcagaggactcagacaaggggaccc

SEQ ID NO: 3280 - DNA, 775 bp, Oryza sativa
gacgtgacatagttcccaacccatcctagccatagacaagagtaccgacccaatcctgcctacggccggaacccccgggacaggcaggcaagactgagcccctagcagcagggcaccaaccctctgccatgacatctcgactaccgggccgcagctcgtgtagccttcatttgccctggagaatgtccatcgacccccgacttcatccatctccaatccgtgtacttttgtttatgactagactgagccacaaactaagccttacccactagacatgtggaagtacggtagtgctttgcaacagaggcccgagcttaatccttatagtggccggggtgctacttcccacaactggcatgcacccaaaccccaccgaaaacaggttttaggggttttgaaagaggaagagaggtgtatgtccaattccaccataaaccaacaattccatagtgtccaaatgatatgagaattcccaaagtctaaaattataaaaccacctaatgttgcctaattaatcagcgaagcatctacctaaattcatactagtggaaccataaatagagtgtccactagatggggttttgtttattctagggtgaacaaggtaataataacaatagcaataataatgtcttaacaaaggtaaataggcatggctaaataaaacagtgataacgcgggaatttaaataaagcggtaatgcattaatttaaatcaaaataattttataaactgggattcaatatgctcaaggatgatgtgacttgccttgctc

SEQ ID NO: 3281 - DNA, 868 bp, Oryza sativa
ctcatcagactatactcaacggtgcactgcaaagtcttctttattgccaatgattgtaactgaatcatctttgccaggagacaccggaggaggaatgacggaatgttcgctccaaaactcctataaatacagctccccgagctgcagctcagagcacacagaacttcacagcagcagcacagtgcaatattgcaaatggagagctcagcagctgagaactggtgggtgctgccactgaccttcctcccgcccatctcagggcaaaatgagagcgctgccacactgtcagccatggccacgagcttcgtctacctcgcgatctttgcatgccttgcatgggcaggcactgctctgctctactgggctcacccgggtggccctgcatggggcaagtaccggagggcgagggggcagagcccgaggtgttcgatcccagggccgaaagggctcccggtcgtcggaagcctcggcctcatgtccgggctggcgcactgctcgctggccgccgaggcggcgcgccggccgggtgccaagaggctcatggcgctgtcgctcggcccggtacgcgcggtcgtcacgtcgcacccggacgtggccaaggagatcctcgacaacccggcgttcgccgaccggccgttcaaccacgccgcgtacggcctcatgttccaccgctccatcggcttcgcggagcacggcccgtactggcgcgcgctccggcgcgtcgccgcgggcccctgttcggcccgaggcaggtggacgcgttcgccccgtaccgcgcgcgcgtcgcggggggcgtggtcgccgcgctgcgcggcgcgggcggggaggccgcggtgcaggtgcgcggcgtcctccggcgcgcgtcgct

SEQ ID NO: 3282 - DNA, 1796 bp, Oryza sativa
atgtaggaataagtcttggctggttggtcttggtcttgtggtgcctttttcctgtttttcagctttctaggacagcatctctactttcagtttggatgctctaggacagttaggacagcagtttgttgagatgctctaggacagtttgttgggatgctctgctctaggacagtttgttgggatgctgacagcaccctcttagactagcatggctgcatggctgctacaagcagctataaatatgtatccaatcctctttgggaggatatggcttttgtgtttagtgaatgaagaaaaccagaaaattgccccatctcgagtgccatcctcttctcaatgagagtaaccattgaaattctaacatgcacaacccgagctaaaacattgagcattaattcccaaaatatacctgcccatattcactgactatgtcaaaaccaacaatgccaaggtcaagatccccagattgtagtttgcggacaatatctttgggcttctgaaaccaaacctccaagtttgggacctgcataaaggaaagaaaaaaatcaaaacatgtgatttaaatagcactgcgactttttaccttagctatctcctacaccgttatattccaatactaattttctaaacaggcagccacatttccacaaatagctgcagatcatgcagggacaaagtcataggaaggtaaagctgctaatgctacccatattaaatgaaataaattaactaaaatctctccaaactttaaaaccatatgcaagtgtggaaaaggtacaataactatgctaggtttcattaaaaatgactactgtttctaaaaggacatctccttgtattgtgaacacacaatgtgatcgatggggtattaaattgacaaggatgcttgaatcattttaagggacaaattttctgttgcttcatccatcagtgcaccagaagttcagacaaaattcgaattgttgaagggaagaaataaactaaaaatataatattgtataagatggcagtatttcactcatactgtcgaagggataaagtaactttagggtgtgtatagttccacgctaaaattggaggtttgattgaaattggaacgatgtgacggaaaagttggaaatttgtgtgtgtagaaaagttcaatgtgacgtttttggggttcaaactttggaactaaaccgggccttagtttggaattgctattgcgtatttattcaaccatcaaaagggcattcatactaacaatagtgcatatacaggaaatggtaaactgcaatgctttgaaaatggactagcccatacgtatacttatcaatgaatcagagagcctaagtggcctactaattcgatagtaggccaatttccagtacagaaatgacgaactgatagaagacaatgaatggagatggaaacctcacctgcgggatatctgcggtgtactgccgcgggttgaggtgcctgactgacaattggcaactctgcaccccgaggcatgaacagcataataacaacccaaagtcaacaaaatcaccacgtaaatacagaattcgatagatgcaagcaggaccggagacgatgtgcgagaccttaaggaggcttagggtttgctcggacatgcggcccttgctggggagcccgatacggacgaccgtgcggtccgcgtacagcggcgccaccgccgccggcttcgcggagacggcggaggccgccgaagcccccgcccgcggagcgagaaagcgcgtcctcgccatccccatccccacagccgccggcgcgcggaggccggacggcggcga

SEQ ID NO: 3283 - DNA, 631 bp, Oryza sativa
atttatatatatcccaaagaaaaatgttgcaaccaccatgtctgatttctgtgtatattattgtttattaaatccaaaattgaagcgttggctgtgtcacatgtgaaaatatgcagagaaagtgcattaacgactgccttggagtgatacagactttgagggacctagggatgcagccataccttcattaagctgcattattttgaggcagacctgggtattgaagtccccaattaaattgtacacttgtactaaggccctgtttagatggggaaaagaaaatttttgggtgtcacatcagatgtttgaccggatgtcggaaggggttttcggacacgaatgagaaaactaatttcataactcgcctagaaaccgtgagacgaatcttttgagcctgattaagccgtcattagcacatatgggttactgtagcacttatggctaatcatggactaattaggctcaaaagattcgtctcgcgatatccatgcaaactgtgcaattaagttttggttttatctatatttaatgctccatgcatgtatccaaagatttgatgtgacgtttttgggggaaaaaaattttgagaactaaaccaagcctgaatagattcatacggttttgttgaaaa

SEQ ID NO: 3284 - DNA, 1496 bp, Oryza sativa
  unsure (1)..(1496): unsure at all n locations
aagttgagaaagaattcaagcttcttgctcctgtgtcaaagaaaagaaaagtgggtagccaaagaaagaataggatcccatctgctcttgagagggcaaagggaaaggctcaaagccaaattaagtgtccagaatgtggtgtctttggcccaaggaaggaaagtgctagatgtgaactaactggcaccaaaaagaggtgtgctgtattttcatctcaattattattcattttcttgctgttatatgctaactgtttttcttttggcaggaagaggaacaagaaancaccancaaaggtgggaaggaagaaatcaaagggtgttagtgatgaacaagtaactacaccaagaacaagagcagttacagctagagaaggagctgcagaaacacaagtgcagccatcacaaacaagcagccctggaccagtcactaggaggtaagcaccattatgctcttttcatttttctctagctttcattacttattatacactgaactaaacttcttttattatttacaccatcacaaacaccaggaggttggcattggagcttgaccaaagctctcaagtagctccagctatagtggagccacccaagaagcttacacccagaaaaaagctcgcaagcaagaagaaaagtgcaacaccacctaaacttttggattgaaatttgtcaacctgctagtgaaattggttatttgtggtctactatggcatgatattttggaaaaactaattgcaagtaatgtgcgatgatatgtgcactttggtatggcatattttgctatgtggtgtgaatatcttaagtgtatggcctaacgaacttaagtgtatggcctggcctgatgttgctatttctattattgtgcttttgtaatgatgtatggccttgcgtaatggcatgtaacttgttatgtatggccttcacagtaactctgaacttgatagtggttatgaacttggtagtactatttctaacgatgaagaagttattatgggataaaaattgatttttgttgcgcatgtgtgttaatgatgcagtatgttatgtgttgagttgttctcaagttattatgttttatcatttattcatgtgtgcgtagttgatttaattgtattatgttggctattaaccacttgagaatggaggggtaaaattgtcatttcactaggccggtccatgctggcatgctgatgtggtgctccaacccaacgaaagtggcaaaaaattagggcgtaatctctctctagtggtaaatatgttaggccaaatctaatagtggcatatggagagttgacactcgtaagagtggcaaatagttaaatttcccgtccacaccaccctagtagatgaaggctgtgttagttgagcgcaaaatttagattttggttgaaattagaaatgatgtgactgaaagttattatgtgtatgacatattgatgtgatagaaaatgacggaagtttgaatccatctaaacacagccgaaaagagga

SEQ ID NO: 3285 - DNA, 942 bp, Oryza sativa
ttttacattttggcagcaaaccaaatatgatcaaatgcaattttaccttaccaaatatttggtagtgccaaaacttgcttatattttggcactaacaaaatatttgtacggtaacattccaaataggccctaaaaaataataaaattgtattttaccagtcttggagattttaatcttgtatagttttcaatataaaaaaatttgataactattgatatttataaaaaatataaagcacagtataaaatcgccctcccccagggcggcaagggggccgcctgcaaaattccaggccccccgccgcccatttgcaggcggccccccgcacagtacaaaatcgccctagcggagggcggcaagggggccgcctgcaaatttcgttgacggccgtcgcccgagagcgaacggccgtctgccacgtcactttcgccgccctctgggagggcgatttttaaaaatcgccatcccagagggcggtaggcgaccacttctgtcaattttcaaaatgaaaaattatttttgtaaaacttttaataaaaaaaaataaaaataaaaaaaattctctggcgacgaggcatttacgtgcacgggcccgatgccccgatgaaggcggtggcagggcgagattccccggcgtctcgctcgcatttacctcccctgcgtgcaaccgcaaccgcacgggcatctctcatcaatgcacgggcatggcatgcacgaaccatattccagtcccggcttgggcctgccccaaccaacaccccgccttgtctcttttgtctcgccgtttgggcctcattcaacgccaacaccacgccaccaacacacaacactctcctctcgcccattcaatgcaactcggactcgccctctcctctcgtcctgtatgtactcctcattcatatacgtgctagtactactactagtactacactacagtcatg

SEQ ID NO: 3286 - DNA, 727 bp, Oryza sativa
cacagagcctcttaaagagctccataagatgcttgttcttgaattgcttgtagaaatttgcacccatgtgacgcatgcaccaccgactccgaacatcaggccacttagctggaagtcccttctcatcccaaccgttctgcaagtagtcaatagccccggaacatacccgcatgacgatcatgtataaggcaaacgttgggcctcatatgcaccactgcaatgtgcactctctctaggaaccagtaccagctttcagtgttctcactctctacaaatgcaaaaccataggtagaacctggttgttcccatcacacccaattgctgtcaatatctgacctcggtatttacctgtcataaaagttccatctatgcatagaacaggtcgacaatgcacaaaagcattgatgcaagcacccaatgagaaaaaggctctttgcagcacactctttgttcgatcatcaaccgatgtaaatgtatgtaggtcatagtaagtattattattcctctgggcaatggtggctaacaaacgaggcaaattatcataagaagcttcaaatgtgccatacctcatctcaataatcttttgtttggctctccaggcctttgcatagcttatggtgtacttgaatttgttctcgatgtgcctaataattgattttggttcaaagccaatgttaccaacaacactgctgtacatctcacttcccacaaaagctgaagtgatgtt

SEQ ID NO: 3287 - DNA, 864 bp, Oryza sativa
ccacgtggagcagctctgcgacgtctgcgtggtgcaaaccagcggcggctcccctttccccagcagacgagcttccgagccaagaaacaactcgggctcgtgcacggggacttgtgtgggacagtgacaccggccacaccaggagaacgacgttatttcctgctgctcgtcgacgacctctcccgctacatgtgggtgatggtcctcggcagcaagggagaggctgcggacgccatcaggcatgcgcaggctgcagcagaggcggagtgcggccgcaagctgcgcgtgctgcgcaccgacaacggcggcgaattcacggcggctgaattcgcgtcgtactgcgctgatgagggcattcagcgccactacaccgcgccgtacagcccacagcagaacggcgtcgtcgagcggcgcaaccagacggttgtggggatggctcgggccctcctcaagcagagggggatgccggccatcttctggggggaggcggtggtgacggccgcctacatcctcaaccgctcgcctaccaaggccctcgatggcaggacaccgtacgaggcttggcatgggcgcaagccggcggtctcccacctgcgggtcttcggctgcctcgcgttcgccaaggagcttggccacatcggcaagctcgacgacaggagcaccccaggggtgttcatcggctacgcggagggctcgaaggcctaccgcatcctcgacccggagacacagcgtgtgcgcattacgcgcgatgttgtgttcgacgaaaggcgagggtgggtatgggacaaggcggtggatgatggttcgactccgacgtacgacgacttcaccatcgagtacggtcacttcgagggagctggggga

SEQ ID NO: 3288 - DNA, 2178 bp, Oryza sativa
agctgccccggcaagtcactggccatgacgaccgtgaccgcctggatggcaacgctgctgcacgagttcgagtggacgccggcgtccggcgccgtcgacttgtcggaggtgctccgcctgtcgtgcgagatggcagtgccgctcgaggtccgggtaagcgcacggcgaaatgtgtgaggctctgcacgtctgcagctaaaggcgtgatgcaccatgacttgatcgtgtagtttgtagccgtgaccctcgtgcttgccgatagtaaataagcagctgggagaaaatgtgcaccagctctgctctgaatttggttcagtttttaaacagtttttattgtgtgtgcgccatcagtgactgagtgagtataaggcttccaattgtgtaaaaatatgcaaaaatctatcaaagataatatgtgtgcagtattatgtaaactgtttgtcatgtctacactatacctgcacgtgcaaagggtcgccatctcatattggattactttttcatggaacttaaattctgaaagcaatatcatcatgtatatggtaggtggtctgtctctgctctatcaatttgaccatgaaaattgccgggcaaagcaaatgtacagatgtgtctgtaaatactggcaatattcaagacaagtaaaaagaaaggaggaaaggaacttgacaagaaaaattagaattggtaatttggaattcccttatcatcccagatccagcaccaagagcaaatttggtgtcaaactcttccatagtaaccccgggtcaaccccaaaaggataaagatagcaggagccttgcatcataggaggcggacagatttgctacggggtggaattacaccatccatctttattgcagaaagcccaatttattcagcgtcacgcaagaaaaggtacaattcatacgcacacctatccaacaaggcaataaggtctcacaattatatcaacaggtacataaagggtatttcaacccatatgcttgtcaaaggtataactagacgagcacaatgtacgatggcacagaccaaaatttcctctcaaataagcaccgcagacacttcaaacgagagctcatttctgattatggttgtagtatacttcagcgagcataagtaaaccgatgctaaaagggtcattgacagagaagtatggcagacttcacaccaagtcacaaccccagctccgaaagtagtttgcgccatctaggagtttcctcatcaaatatgtaggtcagctttgtcaccaagactccactgccaccaatctgcagttacaagttaatgagtacacattaaaacaattggatttatcaatggaactaagccatacacgttcaaaaaatatatagcaagggccatatatgttctgacaataagttctattatgagctcccatatcagatttatcttttgcgctgacagcagtgagaatagcacagaaacatcttttgataattactcatataagcacataaatataccttttactacaacattagaaaatttctaaagataagagacaattgcccacatgaaacagaaaaggaaaagggagaataaggggagataggcacacatttccgtttaaaagtattgaggtaaaatatcttacagatctcagctgttgaatggacttgtaaagagacttctgtggaactactacattaatcgcataatattccacagcaaccttcccatcacgtgagcggtagactggacttatggttgggccctgtttaaatcaaaatgagtgaatcaactcataagctttagtgattttccacatcagtatttcaaactacagtggttccagtcagataatcatgagcaaagcttttgctataagtttgaaatgcaaaactagttttatttcaaaggacctaaaagctttaaattgcccagattatgatgaagattaatcaggtctagatattagagcagctacaatacaattatatttccagttcaagattatagagtgctaatttatgaatgtggaaaataatattatttttaaagagatattttagcatctgccacataagtgcacatattcatggtcagtatataaaaaggtaaaatactactttggatacttttagtgatacctgtaatccacataacgatgtttggctgagaactctttccgccacttcttccgcactgttcccc

SEQ ID NO: 3289 - DNA, 670 bp, Oryza sativa
tgcgactgaagctcgcaataccataagccgtttttgctcacggatatcagaccagtcaacaagtacaatgggcatcgtattgcccgaacagataaagctagcatgccaacggtatacagcgagtcgctctttgtggaggtgacgattacctaacaatcggtcgattcgtttgatgttatgttttggtctcgctttggttggcaggttacggccaagttcggtaagagtgagagttttacagtcaagtaaggcgtggcaagccaacgttaagctggtgagtcgttttaagtgtaattcggggcagaattggtaaagagagtcgtgtaaaatatcgagttcgcacattttgctgtctgattattgatttttggcgaaaccatttgatcatatgacaagatgtgtatctaccttaacttaatgattttgataaaaatcattaggggattcatcagagctgcgcatttttctactgcgcgccgtgaaataatatgatatggttggatttaatttttattaaattaatcatgaataataatgctctttgaatattttttaaaattttcggagcttaatttctaattttgataatataaacaccttttcaacatttatttaaaaaaaaattcccaaatttctctatgggccatttccagtccatttactatctcag

SEQ ID NO: 3290 - DNA, 568 bp, Oryza sativa
tagtgtgataagtgcaaaaccaactggtcagtcaattgctagatgtggtgtaataaattcagattcaattgatatttgctctcccgttcaaatgaccaatgaagaagatactggtgacacttgtaaccatgcaccaaatgtagaagactcagctgctcttgtggactggagtaagttggcaatcattttggatggcttagatggtgatgctcatgcattgttggatgaggatgaactatttgatgctatgggtttcaaaaaaacagatgagagagcagcagcaacagcaatacaagaagaagctgcactccctgttattccaattgagattcaacaagatatgatagatgcagccattgtagttagtgatgaggtacctgctgacccagaacttgtttgggatagggatgatccaccaatggaagtagggacaaagtatccatcaatgaatgagttcagaatggcagtgaaacagcatgcaattgttagtgagtttgagcttgagactgaaaaatctgatccagatagatttcgaggaaagtgttctgcaaatggttgcccatggaaa

SEQ ID NO: 3291 - DNA, 1176 bp, Oryza sativa
tctcgtttagtaccacctcgataactcgaggcgatggaggcgggatggtggatctaagtggagtgtgactgtgtgagggagaggtgctggacatggatgccggcacggtgcggtgcgcggcgaaccacgcgccgctgacgccgatcagcttcatccagcgcgccgcggccgtctacggcgaccgcgccgcggtggtgtgcggggagaggcggtacacgtggagggaggcgcggggccggtgcgtccgcttggccgccgcgctcgccgcccgcggcgatgtggtgagtggaacaccaatgctgctagctcttttagcttatcgtgtgcgcgagcatttgctacttagatgtttcttcttttgaaccaacaaggtaggaagtggcggatgcagcttagatcgatggcccgaaagtttttggtagaaaacttgttaagtatgctaaacatatagtttacgagtaatatttccgctaatctttgccatgagcccatgaatagttgaagctagataacctcacgtcctcgcggatcttctcctatcagtactcttgatattaatgttctctctatgcatcagcatgtaaacagcttgattttttgttttgagaataaacagcttgattcagttagcgataaagcttctgcattgccgcgtatacttcttcagttagtgggataattttaccttgctgctaatatcctcgtgcattgccgctatttatatttttgcaacgccagttataaatctgagtctacagtctactgacaccgagtaatagtagcgaagtcatgaaaactctcgatcatgcgaatggccttctctgcagtttagatctttcacttttatactttcagtatgaactgcgaagtaatgtggcttccatgcaaattattggttattcggagatccataggaattctggagaaaatggtaaggattttaggtcccactcacagtccactccacctcttcatgttccttggtcaggccactcaacgatcgaaataatttcgacctgatttaatcatgggtcagtctgaaaactaggcccaggcgtatgacccacattgtcgtgtgtcccatgttcaggttgctgtcctgagcccaaacgtgccggctatgtacgagctgcacttcgccgtgccgatggccggcgcggtcctgtgcacgttcaa

SEQ ID NO: 3292 - DNA, 519 bp, Oryza sativa
ccttcttgctttcgacagagcagggtatggggaaaattatccaaatcccaagaggaatgtaaggagtgaggcattggatattgaggagctcactgaccagctcaagcttggacagaagttctgtgttgggaatgtcgatgggaggatacccaatttggggtgccttcagtatataccaaacaggtaaagaccgaaactgcaatactgtaccatcaatggtatatgtgacccttcactctccagaaatgtaaagatacaactactgtgtgcaggcttgcaggagcagcgttagttctgcccattatcaactactggtggccttcttcccccgctgagctatccaggcaagccttcatgggtctcatcatgccagagcagaggacactctggattgcacacaacataaacttccttgctctacctctggatgacccagaagtggctcccttcttctgcggcagccatgcatcatcctgcaatatttagcaagcatgatatggaggtccttcagcacatgat

SEQ ID NO: 3293 - DNA, 639 bp, Oryza sativa
agttgggcattgttgtacctcaaggtatgtatttgctagatacttcgattcagccttatgtgtaataagagccctctgcgctacaaagaaaacacaatatcaacatatatgaagaactctaatgttgcttgtgaaccacttcagggttaccattccgtgcaatcctataggatagctcatgtattatggaatcaaggtcgtaaagttctggcattggcactgcagagccgtatcagtgaggtgaacactgatttctttatgaagcatatttttacattgctttagcaaatagttctgtttcagtaacatttggtatcatattcctttcaggtttttgcagtggatatacacccaggtatatgattgttctgtaatgatgtatatttgcattttcctggtctgctagtgtgtttaacattcaagtgttgtatggtgatatgcgatatttagcctgttttatcatctttggcaggacaattttatgtcactcttctagttgataattgttggttctttttatattgcttttaaaatttgatttttgaacagtgaagttatgaacatttgtggcttatcttttatgccttatcatgttcccttttttcccactttatcttccttacattctttattactaaa

SEQ ID NO: 3294 - DNA, 1148 bp, Oryza sativa
tgatcagccgtcgttgacttttcattacaaatctctcacattaggtgcggaaaagtctgaaaagaatggtgaaggttatccttggtggaagaaatgaaaagaagttctttaccaagatgaatggaggtaaattattagcatgcaaattcatttttttaatgatactagctccttgcttaaataatacaaaaatacataatctccactgaattttaactaattttgtcaccaaaaataagtttactgttctttgtttctgcctgctgaagaaaacaattgtttggggagggggggggggaagcacaattgttgaccccttggttatacttctgtgaacaaagaactttgattgtgttaagcgcttggcgcttgcaatttcttgttgtctgtttggaacaattttgtttgaccatatatccatgctctatttacttatatttgaaatttagcacattattgactgttattaccagacatggctatacacttcaacttggacttttggacacatcatatgtgcaccaattatcgattagcatgcattattttcttattcctcttatggccttctagtacctttgtttgaaggaaacttgttctgtgggctcaactgctttaggattgttcaatttagtttgaacaataactgtctagaaccaaaacagcataagctctcctgtggattgggatatttgacacgaatatccagtgaaaatcacagtgctgattcataaattatcctgttcagagagtagttctaatttctaaacatactgggcacataatatatttctggcttagtgttatgatcataatgatctgtacttttgagtaaaggtcctgaattctctttaagatagggaaattaaagcaaactaggtgataccccgcgctttggtgcgggattcacgaatgagtatatgttaaatattgtcgaaatgatgaaagttgaaatgttaaaaaaataatatgaggaagatgatttgatacatacttgttgatctctataatataatattatagatgatatgtcatgcttgcatgggatttaaaataggctagaatagtaattgctagtgagtgaaaatgtggcatgcttgcatgggattttaaatgggttagaatagtaatggctagtggatgatgat

SEQ ID NO: 3295 - DNA, 727 bp, Oryza sativa
acaatcgggacgtgaaggagaaacaaaataattcttgattaatatttgtatccaagatgctaggaatatctaagattaatggggtagaaagagaaaataatactactggaaatgtaaaagtatgcaggtcacgctaaacttatatttggcattaataatttgggtatcttgagttttttatggctaacctcttaagattatacagcattgatatcatggaactttggccttccaattatcatgggcataccacaacctgttgattcccttcaaggagcaacctctatctgaaaccaaatgcttccattcagttcaagaaaccagcagagatgtataaaagcatagaggctaactgtacctaccttgaaccagaagtgattagatcatgcactggagaaaacagagttgcctcccaacagctcagtatctttcaataaactttaataaatttgacagtgtcatataccatccaagtgctgaactgggtcatgttgctttggtagacgaaagctcttgagtaatttgataagttcatacgtccttgcatgatgacccaaccggaggcataactccaaaggggtaaatccatcctgaagtaagcatataaaccaaatcatactctcatttgacagaagcctttatttaagagaaatgcaggaataagtagtgctcatgcatgtctcttaaataccatctgaaattatggcactggaaatgcatcacaaac

SEQ ID NO: 3296 - DNA, 1256 bp, Oryza sativa
gcaaatgtgaaactttggattgacgtccaaatcgaagttcataagaagttttgatctcaagaaaaccagatttgaaatatagcatgcagtgttaatcgcctcagcccaaaattttctaggagttttatattcatccaacatcattctagccatctcaacaaaaacacgatttttcctttcaacaacactgttttgttgaggaacacgaggagaagaaaattcatgttcaagacctctttcattgcaaaattgttcaaaagaagcatttttaaactcaccaccattatcacttcgaattcttttcaaagaaccaggaaattcaagattcaatcgaagaaacaaatcacgaaagtgttgaaaagcttcgtccttagttgccataaagaaaacccaagaatattgagaaaaatcgtcaacaataaccaacacataccactttcctccaacagattgcactctagctggaccaacagtgtccatatgtaatagctgtcctggtgcatccgtcatcacagaaacaataggagcatgtgaagaagcaaccatcttagcatgacgacatggtgtacaaaccaaatcaagatctttcttaagtttaggcaaaccacgaacaagatccaaaccacttaacctagtgagatgatcaaaaccaacttttttttagtctacgatgcccaaacatcacatttttatcaaacttagctaccaaacatgttatgaaacaggattatcaaaatcagctttaaacactctttcatagcgagaaatattcaacacagaatcaccacaagaatcaaaaactttacttccaattttcttaaagtgaacctcaaaatcttcatcaacaatttgtgaaactgaaagcaaattatactttaggtccttaaccaaagctacattcttcaattcaaaattttcatttaccttaaccaaacctgtagcaagaacggcacttgtagaagcatcaccaaagataatccattcagtcttggatgcctttcttagggaggagaaccaatttttatcaccggtcatgtgccgcgaacaactggaatccacgatccacacgttctccttccttgccaccaaagcctacacacaagcagaagtcgaagcctcagtactggggttagataataataaaaatttaggaatccagtattgagatacacgaccagaagatccagtaggcatatatccatgtgcaaaaacagtttgagaattttcagaaaaattcctccaaggccggtctgacc

SEQ ID NO: 3297 - DNA, 664 bp, Oryza sativa
cagcaacatattcagattcagccgttgattgagcaacactagattgtttcctagaagaccatgtaatcaatgatgtaccaagaaaatgaaatgttccactagtacttttcctatcaattctacaaccaccaaaatcagcatcggaatatccacttaagcatatagaagatgaagtagaataccaaattccaaactcaagtgtatgattcaaatacctcattattcacttgaccgcttgacgatgtaaaacacgaggagaagcttgaaaacgcgcacacaaacacacaacaaattgtatatctggcctagaagcagttagatacaataaagatccaatcatacttctatactccttttgatcaacagcttcaccatcttcatcaggatccaacacagctgtagaaccaattggtgttgaaattggcttgcaattctccatcttgaaccgtctgaaaagatccttcgtatacttcgtttgatgcacaaaagtaccttgaggtgtttgctcaatttgcaatcccaaaaagtacaataactcacccatcatgctcatctcaaattccctgcgcatagtctcagcaaactccacaaccaaagcgtgagatgaacaaccaaagatgatatcatccacataaatctgaacaaatagttgattatcaccatg

SEQ ID NO: 3298 - DNA, 6343 bp, Oryza sativa
ccgctgctgcggccgccgccttcctcccgccgtagcctcccgcgacgccgccggccacccgagctcgccccgcctccgcctcctccaccggcgcggatctcgccccccagctgctgttgcggccgccgccttcctcccgccgcagcgccgcgccccgccacagcctcccgcgacgccactggtcacccgagctcgcctccgccaccaccgcccgcctccctagcggccaaccgagtgggcagactccgcctaagatgacgccgatgcctaagagcggccggccgagcaagacagagaaagcaaagggattggggaggggagagggatgacatgtgggtctaggtgtttttttaattttatttgctgactggattgccacgttggcgccacgtgtgcaaattcaagtcgaaaacagctaaaaacagtgctgagggtttgtatagttgaaggtgaaagatgtccggttttatggttcaggaggtaatttggtcgaccacgatagttcaaaggtgtaattcgtactttttcctatatataaatatgtaaacattgtccacggttgggacacattcaatacagaacacatattaagcacactagttggattttgttccaacaattatttaaattttttttaataaaacgaacggtcaaacatattttaaaaaacgatctcaaatatttagggtcggagggagtaatataaaatggaaggaataataaacacgataaatcgaccaggtcgaaggagggaggcggtgtgaggtgcaccacagaagaggcggagggctttcggctcgacggcggccgggttccaaacttccaatcctagacagataggcaacgcaaacgtgccagccgccgtggaaggcaagacgatcggcggcggcattttgcatgcagcagccgcccgtgccggccggccggtggcacgcatcccaatgtcgtgaccgatcgaggaccagtagtggcgcgacctccacccctccctccagcagcctcgtctcgtcgcgggtcctactgcatcgagccatcgagggccaccgtcttctccgccgccggcggatggatggccctctcgctcctcgcgctacctctggcgccgccccactgcctgtgcttcaccgtccttcgcgtcgcgcggcgccccacgttctgccgcgcggagcgaattaatggaggcgaccacgacgaggagctcgacggggtgccaaatctgagccgaccaccgccggatcggatggacggccaaatctgcgtccttctgccgcgcgcagcagccgcgatggccggcgacgacgatgaggacctcgacttcgaggcgcgccacgccgcggccgggttgtcgatccgtgtcttcaggggcggcgaataccgcggccacggcccgttcccgtggcgcggaggctgatgccgccgcagccgccggcaacaggtgggcgcacgtcgacagcgacctgatccacttcagcaacgcgcgtacgccgccgccgtacgtcgtgctccatggtggcagcttccatagtcgttagtatagtaattaattgtctggtggaatcatacgcatattgattgccagtacgttggaatgtcctaatatcggagaaaatggatatttggatcttcaaaactaggtttcgctattacatcatcatcaaattttcaaatggaatgtgctgacatgtgcttttgatctaaaacaggtcaaggaccttcaccatgcttcgaggaaatgagcaaaaaatggggatagctgttgttctatggtcaatttacaaatataggaataatgcatgttttaagcatgtcatccctgatgtggagattatgggtaccccatacccacacggcatggttatctgactggttataggggacaactaatatctatgaaatatgtaacggatcatgacttggggcgtctacgtcttcaccgaccggcttgcctccgccgccgccgactggtgtctctgcctgcatggctagtctattatgccgccgtcgtggggcgtctacgtcttcaccgaccggcttgccttcgtcgccgccgactggtgtctccgcctacacggctggcctattataccgccgttgttgggtgtctacgtcttcaccaccggcttgccttcgccgccgccgactggtgtttccgcctgcacggctggcctattatgccgccgttatcgggcttctacgtcttcaccgaccggccgcctcgtatgacgccaattggagctatcctcttcacggttgcccacgtcgtcgtcatcattctacttctttcgtcgccgactggttatgccgccgtcgactggtgtttttaccttcacaactacgcgtcttcgctaccggtttgcttctgttaccgccgattcgagttcacttcatcactgctatgcaactttgtcatcatggtggagcaacttcaacttcattgtcttctgcaccggcaatctctattgctgctacttcgcaagttttgctacttcaccgaccacgacgtctacatgagcctcaacatattgacgtgtcacgaaatttgacgtcgtcctaatctactactacaagtggttctacaattttcaagacttcaactcggacatcttcaacatgtatcctcactcaagcaatgagtactcgacgacaagctacagtttttgactctatattcagttgcttcccaactaaccaaagagtcgggggctatataaatacaagactcaaaatccgacaagttttatgtcaagataaagcaatcaattaatcaaggagtcaactctgggagtcattatcttcgtcttcacttccgagcaagctttctacttcatcaactccaattatttcaccggcaattttggcttctctgtcgtcgccacgatctacttcaaatttctctagtatcaagtttgagatttaatctacatattcgggaggatggagttatcaaccaatttcaacgagttggacaacaatttctacttttcttcaagtgaagcatctacaacagctacaactccaagttctattgccatctttataaatcaaggggtgttgcatcaatctttgttatgtacacgctcgcatcaaggaaactactcgagtttcaatatcttctcaacaatttgatggattattgtcactgacatcatcaccaacacctctgcttcatcggccctgacgtctccgctgttgctaatggatgattatgtcttcgccgacttattatttcaccttcacagttgacctactacgcaaacgctgatgagcatctttgtcattatcatcggctgctacaccgctattgactggatcaccgacatcgtcatcttcatcaacatcctgtcaagcctcttcaacatagcccactctactaatattgatgggcaacttcgtcatcatatttgatcatctctattgttgccaatcgtcattaccatcggttgcatttgttgtcgtcgactatttcctgcattttcatgattggaggatttcgtcatcgtcgttgatgcgcgtctacatcttcatcgttggcttgttttcatcgccaccgactggtattctcgccttcacggatggcttattatgttgccactagtgggcatcttcatcttcttcaccagctgcctcgtatgtcaccgactgattatttcgctgccatggttacacaactttattgttgggtgccttcatcttcattgttggctgacctgactgctgccgactggtttcttcacctctacggctgtgcaacttcatcacttttgattggtatcactatcttcactaccaccaatatttttgccacctctgttgggtaatattatctttatattggtcgtcttgtctctatgccaactacgtcagctaccatcaatggacaattgtgactacgatagaaggacaagctatatgctcaggggcttactacctcaaacacaagtatcataccttcaatttggacttgttccggatacatgcaacatgaattcatgatcatgggtctattttctgtgctcaaggactagactatttattattccccgtaaaggttatcaactgaatacttgcaccagtcgggattcaattgttatatctattttggagtatcccataagggataatcactcagatcagaagctattcatatgagctacacttggtctatatcacccggaagatttattactcgggagcatgttatatgcgtcatcctttaaagggtgtcgaaggcatattttttggcctaggcctaatatgtctgcagcccacattttcaggtgtggtctgtcacgttcttttagggacttaggcactttttgcttaggccaaagtgcacgtgatcaagtgcccaataccttaaaatccttttataccgcagttacttaactttttaggagttggtacaatgcatcttaaaagctgtcaaacagtaaagctttatatagctgccccgctgacttttttatatagtcaaggcgctgtttgggtttatcaagcaattgattggatacaatatcgttgctttttgcgatgtaagtgtgcatttttattgaccaatattatggcttaggctgattatatattgtggtcattttccaggcagctggtaaatcctttatgagtttatttacttggattttacaccacatatgctgtatatttctaggtgtggtgaaaccatgtgtcttttagggacttaagcacatctgttaaagcagtgtgcgcatgacttatgcccaatactttggaaatttctttattcacagcattcaagcttttttataactgttttgctatgtgaattttcaatgatgtagtcaactttaggttgctctcatcaaattttacaaagcagtcggtatatcatctggatcatgttatttagggattcacaccgcatatgctatatattgatatcaagtcacttggttgactataattatcaaaaaccactcggttggttggattatttattccttgactatatgcttggtttgttcaactaatcacatggtcggaggctacacctattaggtgcatatactcgatgcacctaaatttacattcaattatttttcagccctccacagtctttggatttggtaaaagtactcgagagaccatggcatagatgattgaagcactcggctctggagtaatctagttcgagagaagattatcttttcgactgtgaaggtctcaggggctactgtggagattatgggtaccccatacccacacggcatggttatccgactggttataggggataactaatatctatgaaatatttaacgaatcatgacttgggtattacgtttccctgtatattatggaacggcctaaagtcctggtttgataatattataaaatagatttaggaaaccgataccatattggttaaggtttctatcttgtaaccctgccccccaacctatataaggcgggcagggagccccctctaggggcatgagcacatatgactcaactagatcgatagatcaatacaacacccggcggattcaaatccccaaacaggagtagggtattacctctcatcgagagagcctgaacctgtctaaattatttgtctccgcatccatccacttttaggtctcgtgcgccacccccttttactattaccgaatttatgtttcgacacctgatgacccaactgacatcatcaactgaatgtcgaattgggcgatcctgcgtcgcgttttgggcttttggctggagaagatgtgcacgaagactttaaggttgaaaaaaagatatgcatctacaggtgggataaaagaagaggcttggatcctgaagtggagtcttttgtatgcagatcatgttgcatctcagtttcattgtttcttcaggaaaactatggaaatctggatgtttttgtatttataatatatatgctcgaataggttgttgttttttctgtctttctggaggcctggtccacgagtgcagaacactttatgcagctctatctcatttctcttaatggaaatggagggtatatccctttgataaaaaaaaatttaaaacgtgattcgacaaaatgtcaatctcgagcacatgctatttgccgctttgccattttcgttttccagtgatttccaaaatgtttttttgcccttacgcgtggtgataagatgaaaatgcccctatctatggtaagatgaaatgtttttttgctctttttatttgacgaaacgaacgcagccggccacggcaacagccggcgcagagcttcttctcagcggcctcgtcactgtcgcggctctccttcacgagccacgccaccttggccttgggcagccgcatcagcctccatcgg

SEQ ID NO: 3299 - DNA, 12777 bp, Oryza sativa
gacgacgccgctcaggtttttgatcaaaccaatccattgacacaaacgattgatgggcgaaaagtgggttgtttggatcttggagataagtgagttgttccggtcctggaggattgacggggagaactgcaagttttcggagccgagatatccattcgagtcactatgggcgtatttgttcaattgacacgtccgaaggaatcatcgttggacttactggatctttagctattcatgtgagaattgatcagctaatactcatccgtccaaaaaaaacccaatcatagctacaaacatggatatatagtgttcagattcgtagctaagtttgtctttttttttaggacagagtagtaatatttcccaagtatagtacagtacactaaataaaacgggagagcagtgtacaaaacatactacctccaatccaaaataagtgcacatttgagtattcgcgtccaacgtttgaccgtccgtcttatttgaaaaatttatgaaaaaatttaaaaatattaatcacacataaagtgctatgcatgttttaccaactaatagcagtaaaaatactattacatcaactgattcatatacactaacgaacaagaagtgcaaggagaaaagatgaataatgatccaaaacagaacagaagcatatggcatggcaaagaagcgaccccaactaattccttcctttgcaaccctcgtcatgactcatgattccaccataacagctatccgtattagtctctacttataaacagtgcacgctccaaattcatccgagaataaacgtcaccttagcatctaattgcagacagaacgatatatcaggttgaaatacataagagtgcatatgttacacattatccaaatgcatgccacattaatacaaagccacataggtttgtaccgtctcatagataaaaggtgcttagacttagtaccacaaaatacataaccatcaaggataacattcagacaggtgaatcacatgattcgaagggctaacagggatatggtaaagctaatattcagacaggtgattcacatgattgcgaagtgctaacagggtgaagaacacagcaccagacgcagaaacagcggacagcgccatgatcctgtaatatctcgcttcatctgcatgtcgtttagccaattcagcaagaaacctgatgtcctcttcaagagtagaggcacggcccttgccagtaggagttgtagtcttgggagatgctgtgccctatgcatggttccacatgaaggaagaaacataatcagattgctaggcattgccaagtgcaaacaaacggatgctgattgaagaaaaatgcccagccaacagatgaagtagctagcataactagtcgctcatttagtcagttgcacataccctcaactggtgcatcttgcacttgcctagcagttacatattccctctatccctaaatatttgacgctgttgacttttttaaacatatttgaccgtacatcatattcaaaaacttttgtgaaatatgtaaaactatatatatacataaaagtatatttaacaatgaatcaaatgataggaaaagaattgataattacttaaattttttaataaaacaaacggtcaaacatatttaaaaaagtcaacggcgttaaatatttagggacggagagagtacaaccagtatgtagatagagagtgacactaattctatttaccataacaaaccggatactcactacttacacgatcctatccatgcactcttaatataatatataaatattttgcttaccaagccagcaatttaagagacaatattatatgcatgcatgcatagacaaggtaagttaacatcaggcaggccatgaagcaattgagtagagaaaagagaaacttcgattgaaactttttccccaaattgtgctctctaatctgggtcgggtggggagagcgcgagatgaatcgaaacagatcctgaggccaggaagcgagcgagcggggctaattgcgcgcagctgacggtggattaaacctatgcgggatcgatcgatcgatctaacgaaaatagggaagctgagaaggggggcgaaggaagagagacaacctcgaggcggtggagggagcgcgatggcggcggcggcggcgcccggcgcagagcagccgggaccggcatgaccttcctcgcaagagtgcgcatcgccatagccgccatgccgccgacgtacggacgaacgggagcaaggtcgggggcggcggcgacagcgagctagggtttttctctctctctctctctctctctctcggtcgcttcgctgggaaggacgaaggcgtcttggttgagagccttgtgtgtttcttcgccttttccttttctctctcttttgttaccgctgccctacccgttactgggaccgactccagatgcgccaataggttcggcccagcccaccagcctgtaatcctgtatttatgctgttatagaaaaactatacatataaattttaatttcatattttaaaactttatacatacaaacttttattatttttttacgatcactctacatgaaagcatataaatctgaaccaacgtacatataaaatgttttgttgtaggtgtaaaatgtttgatgcataaacttgacaaaaggaagacatggttgttgaaataggaaatcttccatgtttctatagttaaattcactgtgtcgctttaggacaagcacattttcggcgtctactttaggctccgccatctttgtagtcttggtagcctagttttccctaattaattgtgcgttgtaaggtttagtcttattttctctttaaaatgtgacaccttcttctttatataaaatgtcggcaacagcctaaacgttcggaaaaaaaagtttgctagatagtccgaattttttatttatagtaattattgatccttaaataaaataaatagtaaatctcagattaaatttgtaaaaataggaaggacgttgttcccaatagcgtccagacttggacacacttctgaggagcgtccaaaggtggacgctgttccggacggcgtccaatctggttcacctcatcctcttgggttcggttgttcttcgacgttctccacaaccatttgcaggcgaaggtgcaccatcgccggctttcctctcctccctgcacggctagggcagaggagccaccaccgctgtccacctcgacgtctgggtggcccgcaccgacttccacctccacctgggaaggtactgagtccacctcggctccagcctccggggaggcggcccatcgctgtcctcctccacccttgagaccgtagccgcttgcctccatgcccaagaaaccaccatcgtcgttcccctccatgctgtcttccatcccttctcaagtacgccacaaggttgctgccaccgccttcagaggagatgcgagcctgttactcaactccgcagtgctcgtcggtggtagactggaagcccaaacgcctccattgcctctcaccgccctttgtgatgtgttctcttcaggtaattctttatttggagcttccattcctcagcagttcatggcctaccaaattaaagcaaaatgattagttcatttacttcagtacttggcaatacttgcatcaagttcagaaaaaaatctctggcttcacgaacaacaatattactgatgctaatgtccatcatgacatacccccaatgttgcattggtgatcgatcttcttgataaatttgaatgcaggttagaaaaaccggctactaattaataatgtcaattatgtgttatggatgccttggccagtcaatgtatcaaaactatccgaaaacaagacattggttcttattttgctttattttgtgtgctcaacgtctgtacttacaggctatactttcaaatattagtgaattccatgcataccactaccagttaattgtcatattctgtttatatgtattcttctgtacagcctgctagacgctaataggagtaaaaagatagagtaattgagtaaatgactgcatcacattgacaaaattgataacgtgtacagtctgtctgttagagaaagggatgaaggcaaagctattatatatgcacttcaatggctaaagacaggggtacagtacgtaaatattccattaaggacgcaaatcatcatttgttgatcctctcctttcggcgtggtgggtgaatggagaggagacttccgcacccagagaccccaaatgtgcgatccattctggccggacgcgttgcgcttgcgaaccaggatatggacgctgttgccaacaacgtcccgatctggacgcacttagttacagcgttcaatcctggacgctacagtcaagagcgtccttcctatataggtaaatcccaccccataattactaaatttttaatttaggtataattaattattacaaataaaaaaatcggctagatagtcttttggggcatgtgagtgctgcagccatttagagttgggacaacaaacatatcaaagtgaagaacactactactccctccgtacgtcccaaaagattcgtctcgtaattttacacgtaatatatgtaattattttttttatatttaatactccatgcatatttttaaatattcgatatgacagcatataaaattttgacggggcacgatctgtcgccatatattctgacggagggagtatggttcaggtctctttgaatttttgttaagactgatggctgatgctatctcggcttcccgtcgcttgtctgcaataatgttcttttgagctgatgggcgatatgggctgctgattgttgctttcatacggtatagtagtattaagggcctgtctatattccaccctaaaattttacatcatgtcatatcgaacgtttgaacgcatgcatgaagtattaaattatagactaaaaataactaattgtataggttgtgactaatttgcgagacaaatcttttaagcctaattgctccataatttaataatgtggtgtgacagtaaacatttgctaataacggattaattatgcttaataaaatcgtctcgcggtttactgtcggattctgtaatttatttttttattagcgtccaaatacccatacaacactttatataatatccgatgtgacacaccaaaactttacacccctgtatacaccccctaacattcaatccttctgcatatttgaaaaaaaaaagaaaataattgtttgaattgatatgatgtttttcaagttctataatctatacagggtcaaacattaatattaaattaatgtgatgtgagaactagttaatgctgtggatgatacgcctctgcttgctcgagcttgctgccttgctgcaccgctgtttgtgcgagcagtagagctacgggactctttcgatccctgccaaaaattttacgccatctcatatcaaacgtttgaaaaactaaataaagtataaaatataggttaaaaataactaattgtatatattacgattaatttatgagacaaatcttttaagtctaattgctccataatttattaatgtggtgctacagtaaacatttactaataacggattaattagacttaataaattcgtctcacagttcactgatgaattctgtaattagtttttttattagtgaccgaacaccccatacaacaccctatataatatatatccgatgtgacataccaaaattttacacctctaaatctaaactggttttccctggattgttagttgtttgaacctaatatatactatgcttcgagattacatcctttagttctaccggcgccctgcctctgcatgcataacagtattgtctcttaaagtatctatggctagcaagtctaagaggatatgtgcaactgactaggtcctatttagattctaatttttttcttcaaactttaaacttttccgtcacatcgaacttttctacacatacaaactttcaacttttccgttacattgttccaatttcttcaaacttctaattttagcgtggaactaaacacaacataaatgaactgactagttatgatgttcctccgctgcttggttttatatgaagcaacagctgtttatactgtttgcacttggcaatgcctagtaaatgtaatgtggtaacataataaattcataatgccatattgtcatagataaattaaaaaccggtttgattctaaaaaaccgccatcggttcactgttcccataaaaaccttccggttcaccggttttttaccggtttgattgcaggaacagtcttttttgctaaactgagccaccaagatgctagttcaggtttttttggtttaaccgtcagtccagtccggttttttttattatggtccaaagtgatacaatatggtaagaataggggatctaaagtgaaaataagggctaaaggtagttcagaaataaaattcggttagacatgggacctagggttcatgcaggagctagtctgctagtgctaacacccaagcacgtgagtcatgtgatagaaattcgccgcttatatataagttacctagaagttagaacgtgattacatttttagttattattataccgtctatagttatatttgaaagcttttcaaacaagaatctgttgaatgttttatagatacacccaattaattgagcagttgaaactaaagcaaaacatcatgcagtgctaagcagaatgggtgtttggagcaaaagatcgatcggtggatgtggctagcaggctagggcttttctttttgtgcaggctgtgactgtggcgctgtcttcccgcgccttttgttttggcaaatggcaatcctctttcccgtgactcctgcctggctcgtgctgaccaaaccaaaccaatcaaggccgtgtttagtttgtgtgccaaaaattttttttatacgtacacatatttaaagtattaaatgtaaactaataacaaaataaattacagattctgtccgtaaattgcgagacaaatctattaagcctaattaattcatcattagcaaatacttactatagcaccatattgtcaaatcatagcgtaattaggttcaaaagattcgtgtcgtaatttacatgcaacctgtgcaattaattttttttccacgtttaatgctctgtgcatatgtccaaattttttatgtgatggaattttcggaagtttgaagggaacacacagtcgtagggtgtgtttaattcacaccaaaattggaagtttggttgaaattgaaataatgggatgaaaaagttaaaagtttacgtgtgtagaagattttaatgtgataaaaaaattaaaagtttgaagaaaaattttagaactacactcccgccgtagtactactccatcaagtttacacgagtagtagactgcactcgtattatcatatcacttcatcaagttgtgtgaaaaggctatcctctcactcatcagtagcatcatcttatcaatcagatcacatcgtggcagccaatgcgtgcaaaaaggatggagcatacgtatagacagtgtagtttcagacttttacttttgtaggagtagtactactagagccaaattttttcccaaaaacatcacatcgaatttttgacacatatatgaataattaaatatagataaaaagaaaaactaattgcaaaggaaaactaattgcacagtttgcatgtaaatcgcgagacgagtcttttaaggctaattaggccataattagccataagtgctacagtaacccgcatgtgctaatgacgaattaattaggctcaaaagattcgtcttgcagtttccaggcgagttaggaaattagtttttttattcgtgtccgaaaacaccttccgatatccggtcaaacgtccgatgtgacacccaaaaattttcatttcctcgactaaacaaacccgagcctctttctttttcttttgcgctacctatacttgtactagggcgaaaaatttaaaatttagctagggtggaatcaaggcattgtttagggggtgtctacatcagggtgaaaattactgaggtgtcacatcggatatatggacataaatttaaaatattagacgtagtctaataataaaataaattacataatccgcatataaactgcgagataaatttattaagcctaattaatccgtcattagcaaatgtttattgtagcaccacattatcaaatcatgttgcaattatgcttaaaatattcatctcgctcatgtaaactatgtaattgatttttttcatccacatttaatattttatgcatgcgtccaaacgttcgatttgaaagggtgaaaatttttgggacgggatttaaacaagaccaaacgttcgcgaaaagaaacaatagttttggagacatattatattatgggattatgggatagagggagtactaattatttaatttgatgattataatacttattatgagtagaaataaaaaaaatcgggcggatgagcggatggatgtgctgggccgaacgtggtcgcgcgtgggccgagactccctatacctccccgcaacggtcaacctatccgatgtcggtctcggattgtataagtgtaaaggaggccgagtcggtcccagcaacgggtgggaccagagtgtatggaccgggtttatttagggcagcggcaaaattaaagatatgcgatacgttttagagagagagagagggaagggggaaaggcaaggggaggcggagaaaaacacaaggctctcaaggagagagagaaaaccctagctagctaggcgccgtcgcaaccttgctcccgtccgtccgtacgtcggaacgcagctatggcggctgtggcgctgcgctctctcgcaaggaaggccatgcccgccccggccaccctccgccgggcgccgccgccatcgcgctccctccaccgccacagcctcgaggttcttctctctttccttctcagcttccctattttcgtcagatcctgcgtaggttcaatccaccgtcctcgcgcaatcaggccagctcactcccgggctcaggatctgtttcttgttttcgtgattcattcacctcgccctcaacccgaccgcgattagagccccgatttggggggggggaatattttttttcccatcgaagtttcttcttttccgtattcattcgcttcatggcctgcctgatgtgaactttgtgaaacacaagcaaaactgcccccccccccaccctcccaggaattattagttgtttgaacctagtaaaaatttatgcttcgatattgataatccttggattctactggcatttcaaaactcaaaccctgtctctgcatgcatactattgtctcttagagtaattattagcttgccaagccatatacagtatgctgttagactatatggataggatcgtgtagtatccgttttggttttttatacatggtagataaaattagtttccctctctatctacattctttcatatatactagtagtatataatatggctacgcaagtgcgatacataacagttcgatatgtgcaactgactaaacgaacaactaattatgtcttccttccccttccctttttcctttgtatcctgcaataggtttagtcaccatcatcgcgcaatttggccagctcgcttcccggggttgggttaggatctgtttcttgttttcgcaagtcacctagtactccccccaaaccaaattagagaccaataggggaaaagtttcgttttttttctatcaaatttcttcttttctgtactcatttgcttcattcatgacctggctgatgttaacttggtgcaaactggttttcccgcgaattattagttgtttcaacctaaaatttatgcaactggtatttcaaaccctgcctctgcatgcatactgttgcctcttacagtttctagcttgctaagccatatatatcatgtagtaacaactactatctctgttccatattataagtcgctttgacttattttctactcaaacttttaactttgatcgagtttatagaaaaatatatcagtattttcaacgcaaaacaaacatactatcaaaatatattaaatgttagttttaataaagctaatttgatattatagatgttagcaaatttgatattaaatgttagtttgactaaggaaaaaaatcaaagcgacttgtaacatgaaacagagagggagcagtaacaatggctaggcaagtgcaagatgttacagttcaaagggtacatgcaactggctaaatgatcaactagttatgatgttaattgttagcccttcctctgctgactggtttatcctgaagcaacagctgtttggtagtctgcacttggcaattcctagcaatataattctgtatcttcattcatgtggaattgtaggataagctgcgtggcacgacatctcccaagactacagctcctactgatcaaggtcgagtcagttattttgaagaaaatcctgagctttttgctgaattggtgaaacgagatgcagctcggaggatgttcaccaggttggtgctggcgggtgctgcttcagcgtacgctggtgcccttttcgttgtgtcgtctatgcgcgatagcgtgaaggaagagcttcgcaaaaacatctacgactaggagctctatcgccagctggtggctacatatttctgtctctgtgttatctatgactctgccctgcttatcatggcttgtttaatgtaacatggcatttcctactaatcatcgatgtgtaacgtaccatcgtactatagttgcactctataatagtttgtgatggttggttggtagtaacgccgttacttcatggtatttttggatagactggtgaatagccaatacggtttctatagttttgctctgtgatcagtttagtccctaatatttttaacaagtctgcaagatttaccacttggcctaaatctactgaaaatggcatgcggatgtgacatgtcatcctcgcatgcaaagtcggcaattaaaatttcattataccattatatgtgccacagtaaaaagaaagaaagatcggaaaattgaaaaaaaatgaaataaaggccatgcagaaaaaaaaaacacccaacagttcgactatgtaaaacaaacatccgtgcaaaaagtactcccttaatattataagttgtacaagtcgtttgactgtaaaacaaacatattataaaaaaaacattaaatattagtcttaatgtaattaatttggtatcatagatgttgctaaatttttctataaatttgatcaaacttaaataagtttgactaggaaaagagtcatatttttaagttggtttgtccttccactaaaaaatagttagcttgtcttatttttgttccatctctattttcttaccatggtttatataatggtagaaaggctaacttgcatgtaagaataacgtgacatgcccgtataacatttttttgttgggtttaatgattatgctaagccaaataataaacctttagtacttatttggataatttgatacatcaaagattaaattgaccttggagcggagtttcatacaccatatttgctattcacttgatgattatggatcactattatggtatcatgagtcatgacaaaaatatggtggtgtttattaattttgtaaagtcgggataaatgcgccttgggagagcttttggtaactgtagtttctcgcaaattaatagcactccaaaccatcaactttttgtccagaaattatggaagcttctggagattctcatgagctccttatcagaacctaaaactctccaaaacaagcctttagacttatcttacaaagcaagatgtatttgcaaaattatcacaaaaaattctagaaaaaaaatcatacatgtacttccaatagtattacatctacgtgcaaagtcgcatcttcaaattctttctacatagagagtaacaaaaaagataaaattatgacaacattataactttaaaactgtcagattttttttgttacagctaaaatgtaatgaatttgatgttaacattttacccttagatgtaacactattgaaagtacatgtatgattttttttatagatttttggtgacatttgttagttggtgtgcataatatatgttgcatatatatatatatatatatatatatatatattaaatattttgataaataaacttatgtagcttaggacaatggatttgtttaattaattcaataggaaaagttttttgagaaaacatatttgtagagatgtagaataaataattcactacaataatcctatgaagtatagctgaaaaacaggatttggtcgtcaaagttagctatgcccactaaatttgtgtgcacttccattttcgattgggataattctattttactcctcttgtactctccactttatctaaaactcaccccaaaccctaacaagtaacacctcaggattttcataatcccaaacattcagcaacgtttaaccgacagtcgttggcctaatctgaggtggttctagaggcctagtcagccaataaaaaaagttgtagtaaatttcataaaaccacaggttttgggacatttataaaacaaaccctagcttttgcaacttgtttcaaagaatcatgggctttatggcaaatgtttcataaaaacccacattcatccctatatcttttgtttggctattatacttacgcaaaatacatgtataaaaaataatatgtcataattttctaagtagatacacaggttagctacttccataataaacatgttagct

SEQ ID NO: 3300 - DNA, 5753 bp, Oryza sativa
catactatcaaggggggtaatgacctagcaaagagatgattaaattgccacattaggtcattgcattttcatttatgctcacattttcatcacacacacatattcacattgtatctcactgggttcggcctgaccaggggcggtcagaccggccacatagtggcagtctgaccggcgagccctggccggtctaaccggccgcaagaaggcggtctgactggcgcataaggccagtctgaccggtggcacacgcgcggtcagaccggccccctggagaccgggatggtgctgctcggggtggccgatacagagccgacggagccatattcagtcagactgagccgatggcggtctgaccgagccgaagccggtctgaccggccactcaacctcggtctgaccggccaggccgatggggccctctgacagggctacaatggctagttttccagccgttgcagagtagcacggtctgaccggccacatacctccggtcagaccggcagagcacaaagttgggggatttcacccccaacggctagttttggttggtgggagtataaatactccccctccagcagcaagggggctcccttggcacccaatttaattgcatacaccccttgcatctctctcacacccacttgagctttgtgttcatccatctagtgtgttagagggttgattagccaagagacaagtgcattgcttccatttgtagagctagtgtggcacttgattgatcatctccacgccgggtcattgcttgttactcttggaggttgccgcctcctagacggcttgtggaggagttgcccggtgacctctccgagaagattgtggaggaggcccagcgccggtttgtgagtggtttggagttcaccaccttcggagtgaaggaagaactaccctagtgatcgaggcttgggtagtcctctccgtgggccggctcccgccttgcccaccccttgacgaagggggcgtgcggtggcttcgtggttgagcggtggagttgggctcgcctcaacggggagtaggaaactggcgagtttccaaacctcagtgaaaaatctcttgtctcattgtctcgtttgattgtcatatttacatttatgcaatttatatttctagagacatacttgagatcatatcaccctaggattgctaaacattgacataggagtgtgatttgcattcctagagatataattgagccactatcaccctaggtttgcaaaacataacttagttgcttagttagagttcaccatcaccaagcctagcaacttaggttagttttgattaggtgttattcatcccccctctagtcgacatctcgatcctacacggatagcaggtgctatatcagacgctaagttccaataacatcatttaattgtcacacgtatttaggtatatatatacttatgtatcatgaataatgaatttataaagcattaacaaagaaatcataaacaaattagtgatagatcgatacacctataacctatgaggataagtagaggtttagtagcacttggagaattcatatctcgtgccaacttaaactaaattaagaaacaaacatgatattctacttattagacgttatgactcacaagaaaatgttttggaagacaaaacaactaacaaactcatcatttgttatgtgttggtggttatataaaataggctcacgctatagcggccgctaaattaaattacagacgctataacggcccattaagttccaacatgctatgtacaatccactacgtcgtcgtagcggtagcggtaggggctcgctactgctatagtgcccactatgaacgctatagggtgtgtttggttgcctcgcacctgtgtgtgcaactttctcttgtttagttgtctggtgaccttttcagcctagcccaacacaggcgggactagttttactgtatctttagctatttttgtaaacgttgatttgatagtccgtctgaaaaaataaaatcatgatgttgaaaaaaaatcgtttttctagtggtggctacctcgttttctgttagcatgttttgcaaactactaagttataagttatgtgtggaaaccttcttataaaaaatttgctttaaaatatcagatactacttttaagtttataatagttaaaatttaattaatcatatgtcagtggtttgcctaagaggagctaccgagccaccccagtaggacacaggcgtacgctcttgcgtaagagtagctagtaatacgcaagttacgtaaccatctgcgtaccgagttatggaagtaaggactgctctaactccctcagctaaacagtttcagttctaactaaaatagaatttaaatggagcgctattataaaataaactaaatatatagaactagattttgactgtttcacaactacacttcaaacctaactcctaaagcttaggtgatgttgagataggagggacttattttagtctctctcacacaaatatagacttatgtttagagagttggagctatcaaatagggcctaagctacgtactgtacgttttttttttagaactacgtacgtgtagtctaatcaaaactctctgcctcgctctgctccatttgaaagatggtgaagtccatgcttagacacagaaccaagcatcttaattttttttctagtcagtggagcttgtatgcatttcgtaagccttatccgatcatttatgacataaatttattagagcgcatgcaaacaacattctcccctcacatccaataattaatatatatacgtacttaattagtaattaaatatcaattatctatattttgggcagattcgctctaggatttgcacactacttaaaaaaaacctattagtgccggttcttaaggcctaataggtgtcggtttttttaaaaaccaacacctataatatattataggtgccaaccggcacctatagtattgctaccggtttttactaatgaatcgacatctatagtgctttaaaggtgccggtttttaattttttcagcgtgcagagataggaaaaggcctataggcgtcggttttaaaagaaccggcacctgtaaggccgatccctatgagtgtttttgtagttagtggcacttccaattatttgatttttgcacaaacaaaataagaatcttaaaaagaagttgaagcttaattgatttggtatagtattttaaaattaaatttcacatgaccgtatgaactatggtctttgttgtataaacggaattttgacatgtgtcacacatataaccttggtagtatatatgatatcagagcttcacataaccgcatggttatcaattgttcttttgattcatcgtaaattctaaaatcaaatatcaaatttattgaatagaaagttttagtcatccaagctgagacctttttttaatctattttactataataccaagatggagtagattggttaaaggcgtagctttgttaaaactatacagaacagttggagttatgtgccacttgctaaaagtgttaaaatcttatttatctttgagggggttggtgtagttttccttctaggggggctaaagatgcccatatacaaatttactgccgtttgttaatggcagctctaattaaattatgttgccaaaaggaaaaacaaatggcatgattgcaccatcggataataaccgttttaccggtttgtgcaggagactgttggtccggttttgagctttaaccaaatcgatgtgatatgacaggtccgccagctagatatccggtctgaccggtttgtgcgatacgtgcatgacaccaagtcactctcctagtgatctactctctccgtcccataaaaacttaacctagaagaggatgtgaccccttttaggacaacgaatctggataaaagggtgtccagcttcattagacacattccctcctaggttgagttattttgggacggagggagtatcataataagaagaagcagagcagagtgatcatgcgttactccctccatccataaaagttacaccaattacttttgtcgataagaccaagcagaaattaaatcaacttggatatttcaaaatcaaagagtgaatgtaagcatgtaaccaatgagtatttagatgactccttaggttctaataaaacatttaatttatctcttcatttaagtattgaatgtataaagattataaataggacaacttatttggaaaaactcaaatgtgaaataggtataacttttgtggatggagggagtacaacggaaaaactatttgatcgggtttataacaccttgtatatgtgtagtattttgtgagtaacggattatgactttggctcgagtggttgactatcgctttcgcatcacacactcttaatttaaaccaaatggcggaaggaaaccatacgttgaaaccacgtcagctttggacagaaatgataaaaaaatcataaataatgacataaaattataataaaccttatcataattcatatcatgaaaagtatctaacggaaattttatgttgattccatttagctaaaacaaacattcaacgagcatgagaaaaagatatgctttaattttcctaacaactgtaaatggctcaaacagtgcaaaccttataccgtaaatggaaaaattatgctaattttcccggtaaaacttctaataatataaagcggagtgagtaaaaattaagaaataaaatcagcatgttcgttatcggtagattcagtatatgtgaggcacgatcgaccaatgcttaattagacaccaactcatcgattgcgcacgtcgtagctagaaacaactttaaaaattctatagcagtagagatatcctcgcaaagaaacaaaagaaaatttccgtcataataaaatttcggtaaaacctacacacacatatgtgtgtgtgtttgtatatatgcacaaatttgtcttcaaacaaagctgtcattttcaatatacccctgataaattttaaattttcagtcttacttaaaatttgtctaaatttgacaacttacacaatgaaatgtttgcaggactttggaaccaaactggctactggaaatactaccccgtgcaagtaaaacacgtgactacagtaagcctagctgctaatctgctactctctccatcctatatataaaaaatcaaactagtaaggattttggttttttttgacggtggaagtagtactagtattctctccatccaaaaaacataagctagatgaagatttgacaccatcaaagataaggaatttagataacctcatattcagattcattgtctaggttattgttgatgaaaatccgtgacaatcctcatattagattcagcttcgatctaacttttctctccgatgctgatattaccaattttggtcgttaacagttatctatttttaagacggaggaattaacgtagctggtgtttgaaactcatatagatgaagatgaagattaagtgttttacacaaaacaaggtagtattaacgtatgattaattgagctttaattattataaacttgaaaaatatgtttatctgatattttagagcaacttccttatataaagtttttacatgaaacacactatttagcagtttaaaaaatgtaccacgaatatcaaatttgtatccaattttcgttagagaaaagagcggggcctaactccatccttctcggctctggaacatccttctggcacacaatgtgacctgatcgatggatactc

SEQ ID NO: 3301 - DNA, 8103 bp, Oryza sativa
atgaagtgaccaaccaaaactatagtttatggacaaactatacagtacgccggtcttgttgatcatgggtgaagatgttcttgtgcacatcttaagttttcgagtgacaaaagattaaaaaaaagtcactactaaacttcaattgtcatcgcatggatttgagatgaatacatagcaattttcttaaaaccaaaaaaacagaattaagaaaataagaaaaacacagtatgttaacatgaatgtaagggtaaaccattgaattatacacgcacgggaaaaaaaatacagaagtaaccgtttcactcgatggcataacgaacacgctaaaaatgattggtataccgtatctcttatgttaaattttgtctaaaaattaacttttgtaggattattaggacaccttcgggacaaaggaaatattatgaagtattattggacggtttgaggggctgtttggatagattactcactttaccaaacttctatgctacaagtgtggtatgccatatagtttttgtggcacaaaaaagagagccacactagcggcaatttttttaacaagtgagtgtatgacatgtgggccatgagagtagaaaagtatggcataccaaaactttggcttcaaccaaacatttacaccaaaaagtcaaacttgcctaactatgaagccatttggaacagatggttggttcctaaagtttcatttgaaaatcctctcttattgtgcccgcaattgctgaatttttttgggagaatagccaataagattcctaaagtttcgcttttgggtcattttagtccttaatcttttatattgtctaaacaagttctttaaatttgtcatgtgggctgatatagtccttagtcccaccaaaatcgccatatggacataccacgtacgtcaccttcctatgtaaaatctatatgatttatctaatttaccctcacatatatcataggaaaataaaaacaaaagaaaaaagtttttaaaaaatatggtatatgtaagagcagaaatatacctcaaaagagtgaaaaaaaaaggagaagtatttttttcctatggttatgtataattcacactaatatttatttttttatgatatatgtaagggtaaattggacaattcatcattgattttgcatgaatgatgacatggcatatccatatgatgattttggtggacccaagaattattctaggccttataacaaagtttaagaatttttttggaccatttaaaaggttagggactaaagtagctattctcccctctctttttttttcatgtgttatgtctacacgactgtttgaagcgtttctaattttcggcaggaattcaaaaagcgtggcatcataatcccgtgctttcaaattcccatgttccaaaagaaagagcgtgtccaatcatttgtttgaaagggccaaaattacactatgaatgaagcattttagtgctccctccgtttcatgttattaggggcacgtttggatccttggcaaaccaaatcctagccttaattagcttagcaaagcgaggtgtttggtagagcgattaaaaacttgctttgccaggcaatgtgggctataaccgcccaaaaaagcttgctcccggcggagagccaaatcggctctcccgagtgggcaagcgatcgtctggttgcaccaaaccctctgtgagtggctctttgtaatcatattaaaaatcatcaattagactgtttattcttctctaggctagagtccggccaatgcatatggatcgttttttcttcgcttgaggacttgcttactagtcaaatcatccattttactatcacatgagcatgcttatttgcccggcagaaccaaacaataagcctggctacttcgagctatagctcagccgggctaacttatcctcacccgactaagcaagatgggagaaagatccaaacgtagtagctgttttgactttggtcagagttaaactcattcaaatttgactaagtttatagataaatatagtaatatttacattaccaaattaattttattacattaataattaaatatatttttataatatatttatcttagataaaaaatattacttttttctataaacttgtcaaatttaaagcactttaactttgaccaaagtcaaaacattttataacctgaaacggagtgagtagtatacctcataggagttgtgggggtgcttcggagtacaattaatgcccagctaattaaaagcttaattctggttagcttagttatgtaacctagtaataaattattggcatgacaaatcgagttgccactactatctactgcaattacttcaatttactccattcgtctcacggtatataaaacataaaactagataagtaatttcctcaaacacgctcctgtcatgtacggtagggttaatttcctgaattgtaagggatttttttaatcgtaatatgatggatcccattgatcaatcctataattttttttcttttctctaccgtattcatttttcctttaccaccaaatatgcaaggtaggaatactctagaaagtgcccagctgtccctccctccctccgtccctccctcaattattaggacaagagacgcggaggcgctcatttcgaatccaaagcctccaggcgagggcggcgaaaccctaggctaggctagtcctctcccggaggccggagaagctacccgccggcggcgcgcccctccaccctcgccgtcgcccatggccctccttctgcgcgtggccaagaaaagccgggcgaccgcggcgatggctctcgtcggcggccgcggggtcgccagctcggccgtggacagcgcggcgggtcgtgcgctggccaccctcgaccacgtccccaaggtcatcaagttcgccgccctccctccggcggccgtcgatcgtcaagacgcaggcgccaagccgggggtggagaaggcgcgccgggacgtgcggcggtggcgcgcgaccaggtgcccggagcgcaacctctagggctcggcctcaagcctggtctggcccagatcctggctccgtcaggcaagctcaagctcggcgccggtggcggtgggttgccctactcgtcgtcggccatctccagcggcggcggcggagaagtgcagccttcccgcgtcgccgccgacaactgcaggtgtggctcgccgcacctatgggacaaggggcgggtggccgtgccaggcgccgccggaggcgttgaaggagatggaggacgccttccgcgcgcagatgaagataacagaggatgcaatcaaagcgcacacagccgagtgtctgtcgagcaagaagctgctcaaggccccccgacctctgtaccaagtcttccttgtctgtgtttttgttctggctgcagtctccattctggtgattggattctttgactacgcgctcacagttggggagatgactgtggtcaacttcctcaatggaaaagagttcaaggctgtcaaaaccgacttcatggatgaagccgaagccacacttctcgatctcgcccaacaggagagggttcgagaggtgaggaaccggtacgtgcaggaggcatggaccgaatcaatgggctgcctgatcagggccctcaccctcaagtcctaccgggactcctggttccgcacaaaggaggaggactccaacaacagcaccacggttgctactccaagcgccaagtagagatccacatatatcacatcattgcctgagtactagctagtgtctagagtattagtatctttacttgtggagtttagtacctgttatcttcattccctagcagtaacaatttccatgattagtactagtaatatgtaatgttgcaagatggatgagactatgcagcaccattggttgtaacccacaccaatgcttcctaggagtatgtaatgatcatcctgctagctctatggcaatctactacagtactctttatggaactcagtcacctactgctgctgctgtgatatatgtggtaactctttatgatgttgatctcctctaattttttactgagatgccatgtgatttcctctcttttactcccaacatatagcaatcttttggagttggacatgcctaggagtgaatattgagatggcctacaaggggaggggaggggggtttgggggtttgtgattttgttgtgtgagaaacaaaactactgtcatgtgattttgctgtatgagaagcaaaaattactgtcatctactgtaatggcatatgatatactgggatattttgataggaatcaataccgaggttttagaagaacttaggattactacacatgtcattgtcttatgtatactgtaaataagtactatctccatctcaaaacataacaactttcagaggcatatctggacctacgtttacttgttagtacattttaacagagggccactacactgcacattacacaagtgtgctgcacactcctcgtggcattcttcctagttggtcttgcattcttatttatactagtatatcacaacagtagcctccacaagtatcctctattgcacattcctatttattcttagttgccagctgcttcaaataaaatagcttgtcctagcatgtattatatatatgtgccatttttgcacctgattcaactgtttctggagttctccagatagtaaaattcacaaacctcagaaattaaaaaaaaacccagaggcatctaaaaaagaaaagctaaatagtacacaattgttaagaatggagcatacttctttttatttagtaaacctaacatacagatctcagaaaagattaagcccacacatatttctgcaaacaaaaaaaaaactaacgaatgcaatgcaacagaaagaaacagcaagtacatggacagcatcaatcctatgattttctgagcccacacgtcagtttatcaacatgtctccaatttatcttggcagtagccatgaagtcctcctaattcattcatatgctactaaaaatcataatagtggaacctgcgtcagttgaatatggtcgtatcgttgtccctgctggttgctaacagcacaagacgctgaacaaaaccaaaaggagatgcagtggatggtattgatagaaaacattgcaaacaaccacatggtgaacactgagttgaatgtgtgttgcaaattgcaactattgacagttcaagttaaccgtatctaagctaaccgaaaccacttaatcagcaacacagttaaaaatccatatatcatgaccaacaactcggttggaaataacaaacttgacaaattaaacagttttcaaaatgaaaatcccaagcaataattctcaagcaagaaagtagcgaaactgatatcacagctccagaggtaatgcaaattaaacagcagcaacttggtcatgactcatgataccataacagtgatccataatatataaacacagaactaattaagctcatccaaaaaccctaagtaatgttgcgtacagatcatccataacaaatcgttacttcatagcatctacttgcaaacagcagatatatagggtaccaatgcatagagtgcaacaacaatacattacaccgataattagtcttacataaagacatgtcacatgcatgccacattaaacacatgccattataggcagagtcacacacaaaaatagaaataaatagcccctagacaggtgggtaaagctgctagtcgtagatgttattgcgaagatcttccttcacactacggcgaagagataacataatgacaagggcaacagcatagcctgaagcagcacctgccaccaacatcctgttgaagctcctccgatctgtatctcgttgaaccaattcagcaaaagtcggatgattgtctttgaaatagctgcccctgccattgccaggaggagctgtagtcttgggagatgtcgtgccacgcagcttatcctacaattccacatgaaggaagaaacagaatcagattgctaggcattgccaagtgcaagctaccaaacagcagaggaggggctagcaattaacatcataactagtcaatcgtgcgtaccttatgaactgtaacatcttgcacttgcttagccatagttactatagttgttactgcatggtatatatggcttagcaagccagcaattaagacataacagtatgcatgcagaggcagggtttgaaatgctggtagaattaaagggtgtaatctcgaagcataaattttaggttgaaacaactaataattgacgggaaaaccagtttgcttgtgttaaacctagttaacatcatccaagcaatgaagcaaatgagtacagaaaagaagaactttttatagaaaaaaaagtgaaacttttcccccattgggctctaatttggtttgggggcaagcactaggtgaatcacgaaaacaagaaaacaaatcctgagcccaggaagcgagatggccaaattgcgcgaggatggtgactaaacatattgcaggatctgacagaaatagggaaggggaaggaagacataataagttgctcatttagtcagttgcacataccctgatgtaactgaagtgttacatcttgcacttgtgtagccaaagatactactccagctgttaaatactactagcatatataaaagaatgtagatagaaagggaaaataattctatgtatcataacaaactacacgatccaatccatacagtctaacaatatactactcatatggcttagcaagcgaacaattaagagacaacagcatatacatgcagaggcagggtatcaaattccggtagaattcaaggattatcaatctcggagcataaattttaggttcagacaagtaataattcgcggagggggaacccagttctgcttgtgtttcacaaaagttaacatcaggcaggccatgaagcaaatgattacggaaaagaagaaacttggaagaaatcgaaaattttcccccaaattggacgctaatcggggtaggggcgaagcgcgaggtgaatcgaatcgcggaaacaagaagcagatcctgagcccggcgagcgaggtggcgtaattgcgcgaggatggtgactagaacctatcgcgggatctgacagaaataaggaagttgagaaggggaaaggaagagaaacaacctcgaggtggtggagggagcgcgatgacggcggcgcccggcggagagcagccgggacgggcatgaccttcctcacgagagagcgcagcgccatagccgccatgccaccgacgtacggacgaacgagagtagggttgcgacggcggctagggtttgcttcctcctctcactcgccgagacgcgtcgcgtttgcttcttgtctcttcctgtgtctgtgtgtctcctctatcttatttctagccgttgccctgtatagaccaggtctatgaaccctggccccacccgtcacgcactcacgctgcggatatagtagactactactactccagaaaattgtttttcttttctgatgttccaacttcaaaacaaacaaaactcgcaattccactcaacaaatttttaacttcgggcttattcactttgctactatttttaaccttaccaaatttcgatattatcaaatttcggtggtaaggttgttaaaattttagcaagattgccaaattgaacaaaatacacacgaagacaccttaaccctactcattcgcattttattctaaacgatactctaatgatgtagtggaattagagtcaaatgtaatgtttgattttgaaaaaacaggtcaaatatgcaaattagaaaaaaaacagagtcagattaatacgtaggtttcgaaacaagatcaaataagtaactaataatattaaatagaggaagtactcctctaacaagaaaaaataatttttatctacttatatatatctggacatatttttatctaggatttgtttttctttagactggaggcgtagataattataacatggagctagtttgtcaatcctgtacaaacccagcctggccgtttgacttttgccccaatgaatccactatacacaggcacatactagtacagccatgggacggatcagccaagcagcagagatgctttgcccttgct

SEQ ID NO: 3302 - DNA, 12129 bp, Oryza sativa
tttcaggtgctacctgcctaagagagtgcgtgtgcgcgtgtgcccgatcgagggatttagggtgcgtttagaaaatttttgaaacatccggtgggtgagctatttttgtgtgcggaccatttaacaggacttgttaagtggcccatatgcgaaaattgattttttttcgtgtggtcattttaaaaagccgcacgcgaaaatggagcacgtttttgcagacgtggccacttacggtccgtctgcaatataaaatgagtcccgtccagaaaaaatcattcctgtagtagtgatctacctctccgtacgtttcctcctccaattgattataaaattgattccctattactccctcatcattttccccttgatttcctcttacaattcggctttacttcacaagatttaatctctatttaacggttgtctttttattcccgtcgcttttccggttttttcatctgctttttccatcactattttttagtcacattttttggcacgcggtaaggattcagttttctttacccaattggtttttttccatcgttgggatttaatcttcagccgtcacccgggccaaaccctagcgccaccgccacattgatctgcctccatgtgtgtttactcttccaattgattacaaaattgatttcccactactccctcatcatttttcccttgatttcctcttgcaattcggttttacttcacccgatttgatctccatttaaaagttatcattcttatcccgagtttagaggattgctatgattttagcatcgtatgggcactttcgagattgaaaactatagttggttgtacgagttaggcctacagctttacttatgggctaagctaaaaagacttaggccaagcggagatagagatagcaaactacgctaggcttaaaaggaaataatgggctttcattccaaaaccaaggaagtaatataatattatatagcgatccaaaaattgttttacctgttacaacgcacgggtattttttctagtaatcaaaatacaaatctattggtgccatactatagcagtaatttaatttgtcagaattttgtgaaagttcgtcaaaatttgagtcaaatttgaaagtggtgtacaaaagtatcgaaaaatatccaagagtatacttatttttttaccccacatttaacaccgttaacaagaattaacggaacggaggcaaatgagtgatctgtttcgaaaaagtagggagaaaaactaaaaccctaaagactaggggcaaaatcaatattagcaagaacgaaattgccgcttttcactcttacgagtgttgataaagaatctgctaaaagaaaatacagatcgtcctaaaagcgacaaaaaaaaaaataaatgaccccaaattaaaacccactcacaccccactcccactctccgcttcggattcggaatttcggagagaagaggctctcgcggtctctccgccttggcctcactcaaaccctagcccgccaagaagccacccgccgccgagccgaccatcacccatggcgcttctccgagcggcagcgcgggcacgcgtgcgccgcttggtcggatctggccccccggccctcgccacctttgccggcgccgacagagcgacgggcgggcggggcggcgcagccggggagcgcgctctccaggcgatgaggctatgctgcgctaccccctccgtcgccagcgtcggccgcgacgtcaaagcgccggtctctccgcccgccggcgcctccgtgacgctggtggtcgagcaggcgacgaggttcgccacggccacgacggcgcttccgcttccgcttgccaagattccagccgccggcagaggcggaggcccaagatccgccgggatcctcgttgccacggtcgccgtgggctcgaaaggggcacactttgcgaccgccagcgctccagagcgtgctctgctcacgctagagcgcgcccagcaggccacgtcgccatgcccgcctctcgcggcaccgaggatcctttgccgcgggctctccctctccaccgtcgcgggcgacaagaaagcgcggcgcttttcgagcaccagcagcgccggtgacgaccagtccaagtcgctggagaagaaggagccactgagccgtcgcgctcgcgccgacgacccggcgccggcggtggaggagccactcgagccgctgaaggagatggagcactcggtcctccgtgctctcaaggccatacaaaaggtcatcttgaggtcgttcagcgaacaggagtaagtaattgggcgtacgttcttttgggttaattgtttgagaggaaacaaattctcctttcttcttttttttccctctttctttttgggttgttatgtttgggggtattaatcaagtgatgataatgattcatgcatacagggctttcatggaggatctgatgaagagggcatccacacaaatacttcgagccggcggcttctacaacgccaataccacagttggcttcatcattgccgtcttgctgtgttttgccatcatcctgggggttttactcttcatgagtgtgctgtttgcagagtggagagccaagcaattcctgcacagtgaagagtgtgacaggctgacggatgggatgatggataaagctgagatgaagacccaggagtttctcaggaacaacaattttcatcagattgtcgagggctacgtgagcgaggggttggaattggcgactggggaggaggtgcgcgcgatccggaagcgcttcttgaaggaagctcttcaagataccggggagtacatcgtccacaagaccacatttggttctcagagggacaagattgccagctggtttcgccgcgacaagcagcaagaggcgccatcaccatcagcaacagcactgaccaaggacagcgagtccactgtgggcgtggtggagaaggtgaggatgagggatcgagtggctgcctggttccgccgcaacaaggagacgaagccagccgagccagcgccgagccagcagcagaagatcgccggcaccgaggggagcggcacgccgccgccgccgcagtgaccgaggtgatcattgctctacgtgatctccagtggtgaagaagaagaagaaaaagaagaagcgctgccgcaagatcgatcttctgtcatgtgatgaaattttgttttcgttcataagagagaaaaactctattagaaccgatgcaccttttgatctttgccatggctgtttgtgccgcaagatcgatcttctgtcatgtgatgaaattttattttcgttcaactgatgcaccttttgatctttgtcatggctgtttgtgacctgcagtgaacatcaaaatgctattggtggagatctaatgatttgactacaaaacaaattcgtggccaaaatattatttgaagaagtgaaagaaagaagtagcaaccgacaacacagcagatgtgacaagttgtcaaattgtgaaatgaattgttagattactatcataatataatgactatacatagtactgaatatccgatttgattttcttgctagagacaccaaatagtttggtagaaatgaatttagccaaaaaattggtaaaagatgaatattcagtttttactaaagcaaaatgcaagatgaaactgaatgcttatagtacatgtcagctgcatgcaatttcctgggcggttgttcatctaatcatcttagactctttcaagcaaattaaccgctctcacttttgactaaaccccgaaaatagataatagcagaaaggaaagaaaaggcataaaaattaatgtgtctacattaagcatttgtaacaaccacattctgaagtttggtgccactaaatgaacaaacctgaaggctgaagcttagactcatcacaagtctacaagcttgataaacatatcaaccattcaaacaacttcaattagaaacaacagggggaaatgaaggaatagggaggaattggatttttatcacctcgagcaccagcttcttactggacatttcgtcaaacatgtggcttgccctacattcccatcttccttggcccttgcatcaagagttggcaagaaaaattcaaaaaaaaaacaaaacaaaatagagagctgcatacggtgcggcaacggtgttggctagcagctgagtagaggcgggaggtgctggtgttggatgcagcagtggcggcgacaaggtcatggacgccgcgacggcctgggcggagcagagtcatggacggagcctgacttgcgctgcgatgcgcggaggtcgaggacggagacgcattgtgggcgtggacgacgatagggacagcatactccctccttcctaacggcctgtttggttggagggagtttttacaagggattgacggcttgtttggttggagggagtttttacaagcgattgggagttcagatggatgaggatattaagtgatttatttggttgggagacatgggaattttggtgggatggggatgaggaattgaggaagaaacttcctccttttcaatacctgggtaggggcaggtaattgggagggaattcctcctttactttgtctaagcaaatctcagccatccgtttctattaatgatctaatctccaactaaactccctatcaattttcatcacctctaccaaacaagatattgggattaaaaatcaaattcccagcttaatctcgtcatcaattccctcgtgtaaactctcaatcctcttccctcgagttaccaaacaagccgtaaatgtttgacgctattgatttttttaaacatgtttgaccgttcgtcttattcaaaaacttttatgaaatgtgtaaaactatatgtatacataaaagtatatttaacaataaatcaaatgataggaaattacttaatttttttttgaataagactaacggtcaaacatttttaaaaaagtcaatgatatcaaacattttgggatggagggagtagatggatgctagtatcgacggctccttcggtgacggggtatcggcggcgagctataatcaacggcgcagtggaaatagggggaaaccgggaggggaattggtgtaggtagaggtggaggcggagacgtggacgacggggtatcggcggcagcggttgtttgatttggaggtcgacggaaggcacggtggccgagctcctgcggacggcggcttctgtccgcctcgtcgcgtgaggaaggagctagactgaggggttggtgaggtaggggagaaatttgcactggcttagaatgccatcgttaaaatgggattagctcgaatgccatcctcaagctgtgagcattcactaccatgccattttcgctatttcttatacacttataaatcattttccatcaattttattttttctcggacctttttacccctggttgcatcttctttcttctcctctcatcctatcttctttcttctctctccttcacttgcaaggaaccgagagaggaggcgacgacggcaccggcacgagtgagggaagcgggcccaacggcacaagcgcgcggaaggagggagccagcgcggaaggaggaggcggaggcggtgacaggtgtgcagaaagagggaggcggcggcgccggccgctggtgccgccaaggggaaaggagccgctgccggcgcacggagcaaggaaggcggcagtcccggcagtggagctcgagcggcgacgaggagtggcggcggatccggtgggagatgggcatgcgagctgccggcgtcctctcaccttcctgccggcgccgccttgccctctctttgcccaggcacaaccttggctctcgccgccgtcacctcgccttctccctccgagaagagagaagatgtagccaggggcaaaaaggtccgaggaaaaattaaatggatggaaaatgatttacatgtgcaagatatagcgaaaatggcattgtagtgaatgcccacagcttgaggatggcattcgagagaatcccattttgaggatggcattctagcgaagccagtttttaaggatggcacatatgtaaatagggagaggatggtgacggttgagggaattcggcggccgccagcgtgatttagggtacaagtggcggcggtggcggcggaggaggaccgaggagagcgaggcgacaactgctgagggggaggcggtaagggagaggattggagtgtcggcgctcggtgtggaggagacgacgcgtgcgcgaaagagagattggagcgtgatccgtaggagtgcaggaggagggcgatctagcctggaggttggtggcgtggtaatgtggcggagttgggggtggcgcggaggagaccaatgaggcggcggttagagtgcggtgtcggaggtggcagagggggaacatgagggcatgagggggagagaaaccagggaatagggcccgtgcgaatgacggggatggatgcgggggcgtgcgacgcgatctgaggcattggattcggcgatcgaacgattcacattccatgggtctgtctgggtgagcattcaaagaccaccactacgtcttttttaagtagtagagatttcttatacgactcctaattttccaaaagcgaaaaaacttaaaaactgactcaagtgcggatatgtatttctaaaagcgaatgaacttaaaaaccaacttatacacgaatgacatacaaaagtatcgacaaaaacatctatagtttttataaagaaaaagtacgaattaccccctgaaccattgggtgagtatgaattacccccctaaacatgaaaaccggacgtttttaccctcaactatcgataccggatgaacccccccgagcagttttgaaagcggttttggtctacgtggcagtccaattagcaatccattatttttaaaatcagcgggccccacatgtcagtctcccgcactctctttttccctcacctctctctctccaaaatccgggccatggagcttgggacggcagcgggaagagcccgagatgacggtgggtggaggggacaggggcgggtggagctcggggtggtggagggggcgctcgtaaccgctggcgctcgggacgatggtgagtggaatcagcggtggaggggacagtggcgggcggagctcagggtcgtggagcaggtgctcgcaaccgccggcgctcggcaaatcggcgggggaagcttggggccgagggggcgtcggacctcaggacggtaggaggagaggacggcggagagcggagagggggtggtggagggggcgtttgcagccgcccgcgctcgggacgatggcggggggagcttggggtcgagggggcggcgggagctcggggtggcgagaggaggggatggcggagggcggcgaagggacgcccacagccgccggcgtgtggctcgtcgaggcaacggaggggatgctcgtagccagcggtgctcagggaggtggaggggcgcggcggagcgagccgaggatggcggtgggtggagctccagctgcggaggaagcgcccgcaaccaccgccgtgtggctcatcgaggcaatggagccgtccgttgccgtcggcgctcaagccgcaaccgccaggatttgagagagagaaggtgggggagagggaaagagatagagtggtaagatatatgacaggtaggccccttcgtttttttaattaaaaaaattgctgactagactgccacgtagaccaaaactacttcgaaagctgctcggggggttttcatccggtatcgatagttgagggtgaaaaacgtccgatttttgtgtttagggggtaattcatactcatccaatagttaggggggtaatttatactttttcttttttataataatagagatagagatagagatagagatttcgttatagtttagtatttttcagcactattatcaacagaacaacaagagataacacagggaggcgtattttttgtgcgtaaaggtggactcgaaactctccaaaatatcgcgccgtttcgatgggagggaggaggatgcggctcccttcattctccttctcgcggaagactcctcttttttttcgaagcttctcgccgaagatttcaaataccgctacttgtccaacccgagacccctaattccccgccgcgaaatccctaaaccctagccgccgccgccgcccccgccccggcatcggcgacgactccgacctccagaaggacctggacgagccgcgccgctcctgcatcctctccgggaacgaccccgacgccgcggtcgcgcaggtctccgccagcctcgccgccggcacatcaggggcggggggcggcgaagaatggctttgtccgatgatgacgaggaggaggaggacgatggctttggcgctcgtccgtagcatccgtgagaatctcctcaacaaggcctcttgccctcctcacccgatctgcgtctggccgccctccgacttggaggaggacgacgacaacgacctcgagacgctccgtgcgatacagcacccacttctcgcactaccattccggtgagtaaattctatctcaccctgtttgttcgtggcattgctgtaagataagcaatccgaatttatgggatagacttgcaaggtagtcgactcttgatcaaaacatgaactatccaatgcaaatcttctatacaatatgctattgcaccaggacacacttttctttttgaatgaaattctctagggtctatactgtttctgaattgttgaagctgtagtgagaaattttaaaaaggctgatgcaaatttaatttgaacattgaagctatggaatgcgctttactacatatggtggtaatcatcggaccttataattctatacgtgtgaatgaaacatgtttaaactactgtaattgttctttagaactgaaccaccaatataggtgaataaatgtgatgtgacaaaaccccagattctagggcatgcgtaacacaaaacaccagatattgtgatttgtttcaaggaacctcatgttttgaggcaaaatgtttcaaagaaccttaggttcagctttatattgtcgatttgactaatatatttgtgcctacttatacgcatacttataaaaggtagaatatgatatttttaaaatggaaaaagtatgaattaccacccgaactatcgcagtcgaccgaattaccccctgaatccaaaaaccagacattgctcaccctaaactttcaataccgaccgaattacccccctcgacccaattcagaatggtcttgtcctacgtggcgtacgcgtggcaatccaatcagcattttcttattaaaaaaactggtggggtccacatgttgtactctctcatctccctctttctcctcttccccacttcctatctctctctgtagcgctagccgtcgggagcggcgacaagtggccagcgacggccgtggaggggtcagcgagggcgcgcagcgcggcccacgatggaaactatggcgagcggcaacaacggcggcgactacggcgagcggcggcaatggtggtgagggcactcggtgaggcggcaactgcggcgaggtcctcctgcgcctctcccctgtcggcgctcgagcgacctctgccttcttcgccgggggaggccgaggatgcggcgcaccctagcggttgccgaggacgagctcggctcagcggggttggttgtttcgcgaggagatgcaggggcggccctcgtcggcgtcgtcgtccgctgctgttgctggataggcgtccctgcaagctcgctccactccctcccactccgtcgctccccgtgtcccctcccctcgccgccacccccactccaccgccctcgggatgatgagaagccgccagaagccagggtggcctctgccaaagcagggctcgatgttgatgccgccgctgcgcctgaggccctatatggcgcgggaccgtgtgttagtgaagagaaggaggtgatggcgatcggtttggacacgaaggaagcggagagtggaggagtggaggcgacggctcgccgcccgtccgcatctccgccgcgccgtgcgtgccgccatgagcgctgcaatccgcgccgaccgcccccgcctaccgcctgtccctgcgccgctggggctcaccatcgacgcgccgagggggttgctgctcgtcgtgtccgccgtggacgtggccgcccacaactccagctccctcccggagttcgctgccaccgcctctgcgtcctgcgccgctgcctctgcgtcccgccgtgctacccaccgcgcgccgaacgcctaccgccgctcgacctgggcgtgagagagaggaagagtgagagagggagagagagagagagagtgagagacaaaagagaaagaggaagtgtgagagataggaagaggagtatgacaggtgggacccactttttttataaataaaatgctgactggattgccacgcgtacgccacgtaggacagaaccgctctagattggggtcgaggatggtaatatgtctggtattaaaagctcagggtgagcaatgtctggttttgtggttcggggtgggggggcggggcgtaattcgtactttttccttttaacattacctgcattttcaacatgtgttagttatagatagtataacctcttttgtgtaaatgtaatcggttaatatgttattattagtgaagatcatgttgagcttttgctatgatgcagtacaatagaaaagaagaagataaattagactggtggtttgttcatcttgagcctacttatctgaatatgtatttaaaacataccatatataataacggaatgagtattttacataaatctagtgttccttgaaacattttgcctcaaagcatgggttgccttgaaaccaatcgtacttcctaagatgttgcgttacccatgccgcaaaatatgggggtttgtgaaattacatgtggagattagccataagatgttttctgtgtttgttctttttaagctgcacatatcaatagttcagtacataattgaaaataaagcatgtagagtcgttgtgtacttgatccagcaaaagagtgtcacattacaattaaatgagagcccttagtatgttgatttgcttaatgcaggtacctccagtgggtcagagacaaatacaaaaactgaggaaatctttttcgaaatagacttgatgaagaatttgatgtggataagcaaaataaagaggcaattaccccaattgggtttcctaaagctgcctgctgttagtggatgctcttaagaagaacagagcatgccagaagttcattagaaggtagattacaattcaagcgaaattgaagaaaataagaatcttaatcttaaggatcatgtaaaatgccttttggattatcagttaagccgcagaaaagaatttggcaaaattttgtgccaaaatgaggatcattatgttagattgttttcctctcaaaagccatgtgcacaatcagcgaaggtaattatcattttgtgtctacatctatttattggatgtttactaatgacatgttatacctgtggatacatatctgacatggaccttctattgcctgaaagtcaccaagtttcgagattgacatagcagaatcgattctcctacattcatttgtagttaattcacggagatagttgtagtttcctgtatgaacaaaagttaattagttttgcatcacatgaactaaattagatttgacgtgtaacagctaggatcatttggtgtttccctataaagttcattgttgtcaacttgtcaacttatagattttgtacagtgcatttatacaaattttgttccactaaggacacaattctaaggatctatgttgcccaccggaaaacattaaggggcgcaccctggggcgatggagggaggtgccacgtcggcgatttgctacagtcctacagtgctcggggtggtcgttttgcaaaaataaccctccggtttgctggtaattcgaagtaagtccctaataaacagtaattcctccgtttcacaatgtaagactttctagcattgcccacattcatttagatgttaatgaatctagacatatgtatgtgtttagattcattaacatctatatgtatgttggcaatgctagaaagtcttacattatgaaacggagggagtaccactgaagtgatattttatgtggaggccctt

SEQ ID NO: 3303 - DNA, 1517 bp, Oryza sativa
ctctagatgaactaaggtcacgagtgaaagaagctcttggatggaccgaggataatgtggagattcatttttatgggagatacgatgttggtcaagggcataagtatatattaaatgtgataggtcagttggaatgggaagtttactttgatttggtaaaagagtctcagtttagatctctagaggtgtttgcatcaaagttggtacggaccgtagaaaatttggatctaaacaaatctccttcttatcattacgttgagaagaattttgtgacatattcttctcgccgtggagggggtgcaagtaagactgagttggtacgagaagacttggagggggaaggagataagaagagacctttgcttggaaatgatttaggggaggcaggaccatcaaagagacattgcggtagtgatgatgtggatgcagcgagggagatgaaaagggagttagtacaagaggggcttgatctaagtgaacatttgtcggagagtgtgcattggtcgttgtacggaggcaaccctgaatacccgacggaagtagcaagccaatatgtgaatccagatgattactttgatgtcgaattgagtggtggtcacgattctgtctcagtagaagtcaatagagaggaggttgacgaggaggcaagtgttgagcaatatgatgttgaatttgctgaagactctgatgatgaccgtccattccctccactaactaacaatgacaagttagcattagaggaatgtcgtgcgtttgagaaggtgtttgggaggaagccagacatcctgagtttagggacctaacacatgcccatggtgcaatactagatggcggcatcaacctagatcagttgccagaacattctaggtggatggtctcagaaagggtttagagttcccatccatggtcgcattgaagctatggcttcaggagtacgccatcgtgcaccatcgtccataccgtgttgtcaattctgccgcaaataggaggtacactgttaaatgtgaaaacccacggtgcaaatggaaggtccatgcaactaagaggtctagtggcacgtggaggatatcacgggttggtaaggaacatagttgtgctactgccgaaggttcagggagccaccggcagctgacatctaagttcatagcaaataggttatgcaatgccataaaactgcaacctacactctctgcttctgcgttagctttgtatatatttgaggttttccagtatagggtgaagtatggcaaggcttggagggcacaagaagaggctatgaagctcatttacggtgaatggggtgaagcgtacgtccgtttgcccactttgctgcaagccattaagcagagaaatcccagtatggtctaccacatcgatactcatcctgatagggttgtcaacgttgatggagtgaccaagaaaatttttatgcgtgcattctggtgctttggtccttccgttgaggcttttaagcattgcaggccagtactagctatagatgcaaccttcctaactgg

SEQ ID NO: 3304 - DNA, 3172 bp, Oryza sativa
ccggctcgcgtgagaactccagcagctggttctgggcctcatcctgatggcgcctcaacacagcaaacagctcagggcagtcaaggaagtccaaaaacctcatcctgaaaagcttcatgagagcagcagcaagcaaggctagacgccaatgtgagcgccttgtctgctcaatcaacaacttttggttgccaacccaacacttggtgatgcgctctcctagtgcttcttccatcttgttcaaatgggcggcgataaccttggcgatagccttctcctgatcatcccaggcctccggcggagcctggcatggccagcaccgtcgggtgacgtaggaccgaaccccctcggtgatggcggcggccttcttcttcaccagagatggcgccgccttgccctccaacgccagcttcttggcagcagggccggccatggaggtaggcgcgaagagcagggccttgggcttgggcaccaggtgtagtgacgatccccccgcggctccggcgtacggaaagcccgaggctttggccggagatcccgactgtggtggcgccttgggcaccggcgggtcgacggtgaccagagcgcgttcccgggctccggcggtgcacggagcacccggtggcgcgaacagcagcgccttgggcaccaggtcgagcgtgaccaaagcgcgttcccgggctccggcggtgcacggaaagcccgatgatttctccgtggcgaggccacgggcggtttgggcgaccagtgccctcgcggcggccgtcgtccggccttgcttcgcggcgttgaggaggaggagggccatcggctggttggtggcggcgccggcggcggggaggaggaggtgagggggcttagggttttgagacgaggaggacgagactaggctaggctactagctttctctctctacttcttggttcttgcttgccttgcccctctctcctctttttactccggtagaggaaggaggaggaggagtgggtgccagcctttcaatcccacccggatggccgacacgtccacagccctatcaatccaacggctcccggctcctgacgcacgctgacatctgagagccgagccatatactactatctaggagtaaataataataactttcacataataattctttcttgaaaaggataaacgaacacaaagtatacgttttcctcgatccattgatagcttttcaattcctaaccctccctataattaaataatgagagtattttaagtgctttattttgtgtagcgagatccttcaattctccagtggcggctcgtctcacacatatctggccatatatatactcattgaaatgagaaattcaaacaaattaacgccgttgataaggcctcatttcaacaagtgacattgaacacgctaatttatctacaaaatgacattataatccagtatttctttccctaaacgcccaacaataatactacccgttagcgttgtagagtagtactccatccgttaagtcgttttgactttggtcaaaatcaaagctgcttcaagtttaatcaacaaaagtaatacgtaacatttttaactcaaagacaaatttattatagaaatatattcaattattaattttgacgaaactaatttggtatcataaatattactatatttgtctataaatttaaagtagtttgacttggcatgtaatccctccgtccctaaatatttgatgctgttgacttttttcttattcaaaaacttttatgaaatatgtaaaactatattatacataaaagtatatttaataatgaatgaaatgataggaaaagaatagataattgctgttggggggatggctccggatgacggagccaccctccgtcagtaggaagactcagctcgaagccatccaccacgagagaatgatcgaaggctgtagctaccatgatggttgactccgataaggggcttcagaatcaattaggagctcacgaatcatctcggagccgaccacgggtaccggagtgggccaacgactccggagcgagtcacgggcccgcagctaaccaatggcttcggagccaatcaaaggctccggagtgcccggggaactagagtgctcatcaagcatggaggaatggtccacgggtgtagaggggcgccattaatacgcactacgcatctgtcaaccacctctgacatcctgacagtggcaagaggcatccgctattatccggaagcatgcctttgcccaaataatagcccacaccctcggaaagcgtcaccacctccttaatggctagggattttaccagtagccctacgactggctcactggccagtcactccacatctgtttttagctagggtaaagatgtaacttccccttgtaccccttatatataaggaaaaagtacgaattaccccctgaactattgggtgagtacgaattaccccataaacccgaaaaccggatatttttcaccctcaactatcaataccggatgaaaaacccccctagcagctttgcaagcggttttggtatacgtggcagtctagtcagcaattcttttttttttaaatcagcggggcccacttgtcagtctccaaaactactatcccatagactagcgtggcactggcacaactggcgagcgacgggtacagcctgtcgactgatgaaccgctggcggaggagcacacggaggcgacgaagcggccactcgacgacggcgtggtcgagatcatcaacctcacggacgcgtccctcccgtcgtggagtgcgacgtcgccatcgtcggctcagactgcggcgggggcgtggcagccgcggtgctcgccggggccggccacaaggtggtggtcatcgagaagggcaactacttcacgtcgcgggactacacatccttcgagggtctgtcgatgaaccagctctacgagtctggtgggttcgtcaccacgatgaacggcggcgggctgctcctggccggatccacggtcggcctgcctcaagacgcccgagttcgtgctcagggagtgggcggccgcgcacgggctcccgctgcacaggcggggacgggcgaggcgagcgtggcggggacggccagctgtggcggtggaggcggaggtgcccgggcggttggtggcggcagcggaggcggaccgggcggcgggtgacggtggcggaggcggaca

SEQ ID NO: 3305 - DNA, 602 bp, Oryza sativa
gagtcatgtcgtgatggtcacaacctcacaggctgcaccccagacctaagcacgacccaccagtagtcggaccatgccgtgctggccatgggctgcacctcaggcctaaacacggtttaccaataatcgggccatgccgtaccggcttgaaggcatgcacagccctgttgagattatagacatataatgatttaatctattccataaataaatcatgacattacagatgaaaactagcatgaacgcatcattagatctacacatgtaaactacacagtataacatgaacagatcaaatatgcgcaacatattgaacacgtaccgaggtgacgaaaagaccggctgcttggtcgaaacttttcgcaggtgtgtacgaaggcacgaaacacgcgagcgaagaggaaggcgagccgtcgcgaacgaacagggagcagtcgcgcgaagcgcttcccaaaaaccttattgccgccttctcccggtgcaggacgtcaaaggcagaggttccggagacctgctctcccgatcgctggtgcacgccggcgagcgggatggagtagtctacgagcgacggcgcagtacagagtaggaggcaaaccctagat

SEQ ID NO: 3306 - DNA, 17812 bp, Oryza sativa
ggaagtgggcgcggcgggtgggcgtatgtatctacggcgctgccactggggtcgagacagcgcgtcagtttgtatgggaagcgccagaaaacggctgggggattgtgggggggtggaggcatgggtgcagcatacgtgttccggtcgtcatgggcgctcagaaaaaaccaataggatgagatttgaggttacttagtacaacgaatttgagtaaactaaatagttaaatattattttaggtttaaatatttttaaacggagggagtacgtgttctgcccaaggttttgctttgttggccgtcatgggcgtcgcacaggttgaagcatgtgaattgtacgagtgggtgtgccgccacacacactggggagatgggaagttgcagctgcagccattcctgcgtgctctctaggtttgccatgccaattgccagttttttttttaattttaatcctctgaaactttgatgagagtatactgtcaatagtggcggacgcacttttaaaatatagatgggacggagaacggagatattaattcgataagagcaatcgaacacaacatatatcgtatttatagtccaatcacataactggatcgatcattgtttgtggcatgtgtgctatgaagagatggactaatttgttggacgttcacaccttattatatctattttttgcggggttattattatatctaattttgatggcccataactaccataaggggtagggggtcttaggggtgtgaggtgacacatgtcgtagctgattcagtcgatccacactgtctattagatagatctgcccctaattactatagtccatagagtactcactccatttcaaattatttatcgttctagcaaatcggcacatggttatccttgtcaaatacatcccaattagtttttcaaaacaggtggtacaataagagtagtgagtcttgtgactatattaatgtatgactgcattgaagaagcataggaagcgataagtattttgacataaaatttaaatcttataacgatacgtaatataaaatagagggtgtaataagttttgcgtaccagataatcattacgagaatactctatctatataaatattgtggacttattttaagggtagttgtggacatctttttgtttttgcagaaacgtgtttatttggacatttgcgtatgggggcggttggagtacagatgtatactaacatttttttttaaaggaaatagtatacggtatgtagcatgtatattaggtattaatacaagtagttggatccaaaacaacaactactattataatgccaccaatgatacctaccattactcctgcatctttgtgatacactgatactaatatcaaatatcactagtattattacgtcaagtaataggctccggtgtggacaatgtgcactcttttttttctctacatagtccttcacatttttattttgaacaatgatatattttttaaaaagaaaatagagaggcggatctatcccattttattactagtacaaatgaaggattaaaggttttagcagatacaaaccctagttcctaagcccatcgatatctggatgttaaatataatgaaggattaattgattatacgagcagaacaatatgaaataggtcatatattgatatattggtatacgggttacgagtaagaggggcatacatattatcttacttaacttaaacatgatcatctctacttaatacaaaatttatctaactaaccttgtttttgaagccattgaagccaattgactggtgaattcctttgcttgtcgttcttgctgttattctttttcttttctttcttcttctgtttttcttttgttcttctccttcttaccctgagcttcctgttgacgcaaagagatgatgtagagatatctcatgaacacttttcagcgccaaattgattggacaattggttttaaggtatttttttagtttagactttcaagcgtcccatttgcctcttttctttcttttaaatgcgacgccggtggggctcaagagtctatctccaaaatagaaaacaaattcgttttttctacatatcacacaaaaacaaattatttatttctatttttttatcgttaaggattaattttctcttgatctttattgatagcaagccaataaaatcaaccaacaagaaccatataccaattagttcgatttaacgacttcgacatataaaaaggtaggaataagttcgtaaaaactcttggctagtgttcactgtgcagtaccgcactcttgccatctctctttcaccgcacgatgctctgtctgagagctctttgtcagtaaataatttcctctcttatgcaatcaaaccccaccaaagctgtgcgccctgtgcgcccccgccatcattgcattgttgccgcaacgtacgagtacgttccactttcgtgaaaacccgcttttcagctccgaaagcgcctctgcgccactcccacagcctctgtatagtctgcaccccaacctctaaaagaaatccgacggttcacgtctccccgatcaatccgatccgacggcccacactctccccgtgacgtcggcgcgcggaaaacgacaaaaggcaggggcgttccggtaaatttaccccctcccaatctcttctctctgtgatgccccctgatgcctttcgcttttctgctccccgttgtcgcgacgtgggggtgggggtgtggtcgttgtggcggggcggggtgacacgtggcggagagggacacctggcaggccaggagaggccgtggcagctggcaggccggcacgtggaggtggggcccacgtggtagtgggagtgtacctctcccctgtcgcctgtccgacgtgggcccacagtatccgaggcgaggagatgagatggtgagacgtggagtactgccgtgttgggtaaaagggagcagccgccgtcaagtgcacaggagagagacgccgtcacttcgttgttacagctagcgagagttcgatgtttttgaactggtttcatatttaaaatccttcttgttttgcaccacgattgctagtagtagtacttttttatcttctttcccttggttgatgtgcgaagcagtaggagtacttcgaaacgaggattttaaatctttaccaaattccaagaaaatcaatgcaactactctatccgttactatatttgaagttagttgtgggtttctgtatctaatacatgatcattcgttttatttgataatttaaaaaaaataaaaaatcatacataaagtattatttatatttttattatctaataacaataaaaaaactaatcgtaaaaaaattttaaataagacggacggttaaacattggacacaataacccacaactaaactttaaaatgggggcggagggagtgctgacctttgataatgagccgattgatgttaagtaattaggccctgtttctttcagcctgggattattataatccagattattgagagtaagctgaaaggaacaaacaacttattaaagtagcttattataatctggagcccagcttattataatctgataagctcatttaggtgagctttttccagattattaggtgaaaaattacccaccatgccaccccactctctctttagacttgcaaacccaataatttaggctctaataatctaggaaagaaataactaaccgcttattctactacatattataataatctaatttatagtaatctgactcaataatctagattataataattccaatctaaaagaaacatggccttaagctacagtagcatggagtttttattatcactagtggtactagcctgtgcacacgtgaaccggttaaagtattggtttgtactcgccataaaccgggggatcaaatcgtcaaacgccagagaggaccggaccacggttgacttcacgattaaccagccactagcgtggcatcttgccccaaggacaaggcacctcaaagtcaatagtaacgctgtcaatgccataataaacacagtaccaatactagaaggctctttagtagtactaagtcaatgcgattaaatcaacaccaacctataaactttggacaaaatgattatatcaacccaatgtacaaggaattgctaaaacgcagccacaagttttttgggtaaaacaaaattagatatacttataatatagttataggtaactacaatataattacactactgctacctccatattttaatgtatgacgccgttgattttttgtccaacgtttgactgtttgtcttattcaaaaaaaattatgtaattatcatttattttattgtgacttgattcatcatcaaatgctatttaagcatgacataaacattttcatattttcacaaaaaattaaataaaacgaatggtcaaacattgctaaaaagtcaacggcgtcatacattaaaatacggagggagtacattgtaactatatttaatctctatatcgggacggaggtagtaagaagtagcttcccaaatactctaaattcttatccaaagcttaaaatattatggttataaaattcagaaaatgaaaactcccttcatttttaaatgcaaggccatgtggtcatcaagtcaatgcgattaaattatcaccacgcccatcaactttggataaaatgatcaaatcaaaataatactggtactactctatataggctgttttaatttctcaagataggctcgtactccttgtcctattttaagtgcagccataaattcccgtatacaattttgattgtccgtcttttaaaattttttataattagtatttttattattgttagataataataaaacataaatgtaactttatgcgtgtcttatgttttttattttactaaaaatctttcaaataaggtggacgataaaagttggccacgtaaactctgtactaataaatttaggtgtggaagttggcgctgggccagctgagaatctcatcaaagtgggccgagggcggtgcgggcccacctacagtgactagtacgagctatccacgtgtactgttggtccgtacctcatcttggctgcagcatcttgcttcagctgcagttcagaaaaagctcgctcgactacactacgcttccatttgatattgagtactgtatctagtattccgtatatgtgtttacacccaatcggtcgatttgatcaaacaccacgcaaagggacgcgagatgcagaatcttaatccggattggcagttcaaatccttgtgctaataaaatgtagtacaacagaaaaaaatagagagattacacaagtgtattggatgccagaatctagtcaatgcaatgcgcaaatctcagcgcaccaattatagaaaacttctcctcgctttgatttgaacggatttcgttttttaaaaacagcttttcttggaggagatttgtatatatactatactatactgcagttggtcccaattggggagaaaagccgatggggagatcagatgctttgctgcaccatcacggccggggtgaacacgtgtggatcgtgcgtacgtgcgcttcaaatttaattactagtagcctccaaattgctgcaaaaacaaactttcaaacgccacttgttcctcaagattgatgaagcactgaatttactgaaaagataatgcgtgttttttctctgtccttgtagctgaaaccggaggcagagcgagatgggggagctgatccgaatcatatcgctgcagccattgtacatttggacatttgccaagtggccagagtgatctccagcttagctgtggcacagtgcatttttgccgacgatcgcccgtcgtcgtaaacggtggtctgggagtggctgtcgacccgccattggaggggttactgaagaagctcgtaggtgttcagagagtgtgagattgacagttgagagatgtgttcttctgcaatggtgagtggccacttggagcaaggctgtccactgattggttttatgaacacataacacatgtgtgtttgggactaactgtcatgtcacacttgcaattgaatgattgcgtataagcagctagtagtactagcgtttttgggatggtaatcgatgtggtgtagatcaagacatgaagtactagctgtcaacacttgtgatagctctgagagcaagtttaatagcatagccaactattaacactaaatcatctatagtcgatttaatagttaattcatacatagttacctataaatatatactacacaattaatacatggtcccacatgccatacacacatacatcttgtagtctgtgctgcagctagttataatatgtagcccgctgctttcctcttatatctcctcaaaatgtgtttgtagctggtttacagtctgctattgtatatgctgtaagaacaagggaaaaacataatgtgagctgaaaaaagaattaggggtgaggtgagacggattaacaattcaagtgccccatgatcactctgcctttgtttaagccggagattcgcggtgtagataacattgtttgcaatggcaggaaaagcgaagcgagagaggtcgtcacctgccacccatgatcttatccagtgcttggtctttgagcaccttttgtttaatcctgcgcacacaacttgtcctgattttaaaaacttcccagaactgtattacttgttcttcgttagctgctaattaatctattcctcatttgttctgattctgaagctttcatgcttaaaaaaacaacaaaaaaaaaactaccaggaaaaggagtgcttaatttgtttagtttagtgtcaggttgggaggtgtcaggaactcaggatcaggaagaatttaaagcgtcaagtcataagttgtaaatcaagtggtagtttttttggcgcgttttttttttaaaaaaaattcgccacatggcttgtacgcttgcgaggtggatcattgcaacgaggggaaaaaaacaattacaggagatgagagatgatcagccgaaagggagattgcgccggtgtttttgctggcgtctgctgccaacggcaggagcgacgcgccggccgacggtgcacgcactgcggcgcggtggacggcgccggcaggaaattaagctgagaggaaggtgacgatctgggcgatctccaccgctggaaaaccggcgaatgtaaagaattctcgtctgtcgccgcctccgatgcagtccgacgacgacgaggtaacaagtggcacaaagatagagcacaattctatcgggaggttgttaggcgcatcaggtttctcgagccgccggggccggggttacctcgcctcggcagtaagcacggttaccatggcaaaccgtataaaaattatcaaaattttaaattatttttaatatttatttgaattcaaggagtttactgtggttttccttttgcggtaaccgacggtttggaaaactctaaatttcacttatcgcaccttcctcttaggagtcgtatttggtttaacgggctcctcagtgccataggattgtttattttgttgagtatcaccaacagtctacctatctgattcccaaaactgattttgagggattttagtccaaaaaacagctccaatagatcccctaccctcctatccgagttttggagttcaattctcccgattcctcgctctgtttatatgcgggcgcaaaactcattcccaatctcacactcccgcctctctccttctgttcccacgtgtgggagataacgatctttctgtgcgtgaaagaaaaaaaatgaaattttctgttggtagtttaacagaagggcccacttttaagggcatgttcagattgtagccaaaataagccttaccaagttttaacaatgccaaaattttgacaagatgacaatattatcaaaattttggcaggatttcttatgtattgatcaaatttggcaacaaattaaacatagatattttttttggcaactttgccaaaaaatggtatggttgaaaatggcatcaaagtaaacagtccctaaattttggggattgaatttaggctatctgttggagggaggagttttttcacatcctatttcagtttaggaaacccaaaaacaattttttggggaaatattattgataaaattttgtttggttccttctcaaaatttggtaatgtttttgtgggaaaaagttccgaagctattaaattttggtaaaatggctttttttttgggaaactacgtcgtgtgtttaaggcaccagcctgaacttttattgaaatgaagaaacatttacaggagaggtgttacagggggtgagaaggaagaaaaaagaattaaaaaaagaaagaaagaattaagagatagttacataggggtaggaggcccagttacggagctgttgcttgctctcagtatttttacatcggtgggaccaaagatcaatgtcactagcacaatgttggagaacaaacgaggcgggatcgtcaatggaattgaagaccttattgttgcggcgtttccaaatactccacatgacggcaagcagaatagtgcgccagactcttggagtggcgggttgtcccggcggaggaatgtcccagacaccttcaagctgcggcattgataggttaatgtttagttcgttacccaaccaaaatttggtagtgttgaaagtggcaaataagcaaacataccttatatatatatatatatatatatatatatataaagagagagagagagagagagagagagagagagagagagagacacgcacaaaattacaatcatgcgggctggataagttgataagtgagtaaagtctgtggaatgattgggccgcaaatgtttcattgttttgtttgcgccagacgtatttgtctctgcatcagtaatcaagattgttttcttttggattaagtccactttaaccccctaaatattggtctaatatggtttgtatccttcaaccgccatactagatatcttgacgccccccaacacacacaattaaaactaatgcaaaatagctccctcgatggttttgtgggcggttttcgctaacgtggctcgttgactggtccaacaggatgagtcagcatatgagatccatatgtcagtgcctcatctttgtccttctcattcttttctttgtattccttcctcctcttcctctctccatctattctccatgcatggagggcaatggcgcgcggaggaggaggcgccttggctcctccagacttgaatcgctccttgtagtaggtgggggaattaggtggaggggtgggagttggggacataaccggtgtgggccgccaccgccgttggccgctgacaaagaggatgcgaccgtcaagccagggaggcgggcgtcatcgcggcgccggcttgcaccctttcttgctccctcaccgccgcggccactaccgccttccatctctgccacggagtggggatgagaagtggcggttgggagtgtgctctccatctcccctgacgccttcctccgcaccattgttgtctctgtcgtcggaatcgtcctgcctgctgcattgcgctgcacgatgccttgtgcactccccaaccacccgtccatgcctgcaccccttgccgtccaccgagaaacacatggggagagagagtggggtagagaagaaaggagagaaagactatggagtatgacaggtggaccctactttatttttttttattttatttgatgactaggatgtcacgtggatgccaagttagcaaatactactatcaatactagcttaggagttaaattagaccggttttcacggttaaggagtcaacatatttggtattgcgagggagggtcatgaattagatttggtccactttaagggagccaaagtggacttactccttttcttaatgacagaagtggattaagattgatgttgggccgtgacctgatgctgcttagagaaatgtcagtccaacgttgcttagcgtattacaagaggccaacaatatgttctacaaagtgttgaagaacctcgtacctcatgtttccgttaatcttcttctgatgtatgttcccgctccctcggttcttaaatgaatgacgctgcttactaattgtttttggtgcaaataaaaaataatgttttaattgcctttataataaaacaaatcactacaaaataaatgataattatgcagtcttttaaataaaaagaatggttaaacgccatatctaaaattcaataacatcacacaattaaaaaaacagaggcaatactttgcagctaagaaaattcaagttgtcgtttgccatatgacttacaagctctcgctgaaataaaattttgaaaattaattttgaagttgactttgatgttttttccaacacagattcttttaagtcgttaagaacacgtatgtaaatatttgtcccacaaattatatttttatcactaataaaccactacaggcaaccgatggagccctcagatttagcgcagaagcacacacgatttagaagtacggttagcctgactagtattttttaatttgttttccatcctctcctcggttagctgatcactaacgcgagatctgatgccatcctcttctcggttagctgatcactcaccaaccttagatctgatgcagattagcatttaaaaaatccaagaacgaggagttagtcggccaatcggaatcttcgaaacgagaaatcctaaacttcattaaatttattcagccacagccatttttagtcgtactctgatgagtgtgttcgttgtgttcagttgcagtttgcaaacttgcagtatcatcttcacttgtaagaactgaaaagatatcaatggctatcagccaggaggagcagcacgccggcggcgggagggactacgccgagccggcgccgcagccgtttcttggctcgtcggagctgcggcggtggtcgctgtaccgcgcggcgatcgccgagttcgtggcgacgctgctgttcctgtacgtgacggtggccacggtgatcgggcacaagcggcgccaggacgagggcggcgacggcgaggcgtgcggcggcgtcggcctcctcggcgtcgcctgggccttcggcggcacgatcttcctcctcgtctagtgcaccgccggcgtgtccggcgggcacgtgaacccggcggtcacgctcgggctgctcgtcgcgaggaaggtgacgctgctccgcgccgcgctctacgtcgccgcgcagtgcctcggcgccggcctcgtccgggcgctcaactcggcccacttcgcgcggcacggcggcggcgccaacgtcgtcggcgacggctactccaagggcgccgggctcgccgccgaggtcgccggcacgttcgtgctcgtgtacaccgtcttctccgccaccgacgccaagcgcagcgcgcgcgacagccacatcccggtaagcgatagctcaccacagctcatggtgttcgacatggagagtatagtgaggttctcgtcttctccggcgagtcgctcgtctgcaggtgttggcgccattgcccatcggtttcgcggtgttcgtggtgcacctcgccaccatcccgatcaccggcacgggcatcaatccggcgaggagcttcggcgccgccgtcgtctacaaccagcccaatgcttggcacgatcaggtactcgcaatcatccattcgttgcgtcactgatcagtagctgcagggattcaatctatcgttttcagcattggcatccgggttacagatacaaccgattttttttctgaaattccgtttttcgggccgaaaatacttgatttttgaagagaatttggtcgaatttaaacaaatattactaaattcacaaaaataataaaaacccaaaaaaatcagtaaaaataatatcgaatcgagtccggtacaactgaaaattttgaaataatatcgtattgggggtctgatagaactgaaattttggacgaacaaattcttgaccttagaatctgaaattctgaatctttcccctttttttagtggatcttctgggtagggcctcttgtcgggtccgccattgcgacgctataccacgagcatgtgctgagggcgagtactctcaaggcgttgggctcattcaagggcgccagacaatgagttcttggatcaagtggtgatcactaatcagctagccatgcctggattgaagtgcatccagagacaacgggctcagatggatgatgatgatgataatgctcatcctccttaaatgttgcacaagcacagtctttttttcttcctccatgctcctcccttttggatcatgtgctgtgctgtacatgaattagccattaaatgttgagaagctgtactgtacttgaattagctgttgtactgaattgggctttggatattttctccgaaacacaattgggtttcagtttttgatgagcaattttcattgtgatgttaacatggaacataatcttaattcaatgagacagaagagatcattcatttcttcatcagttctctccattacaaaattcagtctcacacgcacgactattacaacagattacagaccacctagctatacactgtactatattttttttgttccatatccctaatcggctagtctctcaaaagtccaaaaggagcaatcatatactagtacaagacatgcttccttgtgcatgattacctacagatatttaaactaacaccaagattccaagcagcaatctgcatccaattaacaatctgcagaaccaccaggcattcttagctagcctgtcagttaaaattaacctacaggcacatcagaatgtggcacaaaattcagaaatccttctgttcccactccattaagcaaagaacctgtcctaaagaagcacccctcttcagagagattccaagcaaaaacacagtactgataagctgccagtaacacacaacacattcagacaagctctgaatgatactgaattactgataacagctagtactcctgcaggcgctacctgcgtgtaggagaagaagatggagtaaaggcgacgggacgtgggggcacggtggcgccgcacgcctgtttcgattgctgctcaaagctcgcggtttcctcggcatgcggcgtggcgccatgctctttgagtcttgaggagcagcaatgataattcggcatggtaggatgtgatggatgggtgaagaggaagaagaggaggtgagaatgatgtcttctgctgcattcctgcaggtgttgttgctgccaattggggcctctttggtaaaagatgtaggagagaattttgaaatttcaaatgtatatgattcagggtggtgcatctacccaattccaatcaacactgtagttagattgttgtagttcaacaatataaaatttgaatggggtagctatacaacattggacgttttttttctttttcgaaaactttcaaatgtaaccatagtataattatactgcgactacaatcaaacttacatgtaactagtagtataaaattaatcaagaagtgaaagcaactcttaggctcgaccctgcctcatatagcaaacccgtctgtatattgagtgttggtattgggcatgtgaggaacaaaattccctcatgttcagctgaaatgatttgatgaattttctgctaattttgtagtatgttgatacctgctgacctgcaccatgatcagttgatcgcaatagccattactaacgtgatttaagaaaataagtactccctccgtctcataatataagagattttgactttttgtttgtactgtttgactactcgtcttattcagaaaatttgtgcaaatatagaaaacgaaaagttgtgattaaagtactttggataataaagtaagtcataaataaaataaataataattctaaattttttttgaataagacaaatggtcaaatagtaaaaaaaaagtcaaaataccttatattataggatggagagagtatatgttgataggctttactgataaatgaccaccatcctataccaaacaaaaatacacaactcaccaatacgtacgtacaattcatccaattaactgcacggatggtacaagaacgtcctaagctaataccatctgtggcaaagaatgcttccatcattacaaggccaaaaccaaaagcacagataaagcaaacaaaaagttgcttaaaagtcaccaagtaaactaatagtcctctgagataacttttgagggagtatgactatcagtctatgattgagcccccactagcctggataaacaagattaaaattttgaaaatggaacaaattaattaaggatgtgtctcagcctgtgactgtgaggcatggacatccaaaagatcaaaaacatcattccatctctccacacctcgccatcattctgcttccctttcagcttgccactacaagaattgaagtagaagcaaagcctcaacacaatttgtttacttgcttactcctgcatcttctatatatatacacccaatgcaatccaagaacacaagatcatctgcacacttgatgtgattgctgagctcgagctccgaaaagatcatggcaatggcggcggcggcgatggtgtttcttgtgttcgcgccttgccttgcacaggccgaggagcggccgacggcggcgcacccgcacgggctccccttcgagagcccgctggcgctgtcgccggacgcgtacgagttcttccaccccagcgagcgcgcccggcgcgggcacgccgccggggcggcgccggcgctgtcgccgcgggcggcgccgcgcgggcagctgagggagtccgcggcgagcgtggcgagggccgaccaggaggagggcggcgtggcgcccgccaggaaggtcggccgcggctgcgcccgggcaggcacggtggccggcgtggtcgccggcgccgctgccgtggcggcgtttgcggcgctcgcggtggcgtacgccgtggcgcggcgccgcgtgggcgtggcggcgcacggcgacgccgaggcgtgcgcgcgcgcggcgccgaagacgagcgcctagtgggccggcctggtttgctccatacgtatgcgtgtagtagttgagttgggctttatggctatatttatgtgggcccagataggtgggccatggtggtgctgtgtaaaaatctggaaatgttttgtgggcccagagagttgggccatgctgttttgggaaagatggccgaaactatttagaggaggctttcgcttgcaatgtttaagatctctctttgaactcgagaaaaaaaaaaaaccctgtcgagtcattgtttatttttgggagtatctggaaaaattgtcataagttcttgagtcaaaaactttcaaatataattataatataattaaaatgtaactatattgtaattacattataactacactataactatgatttaacttataaaaaacttgcattgaattacggtttagttagctagcaataagatcttacgcatgatgcgtgtgaaaattttttgtagcaattttatccttcacacacaaatcttaaggtgatccgatgatcacaaatctcaaggttttgtgggaataaaacgtacgaaagttttctagcaaatcactttcttaacgtgctttcactaatgaccacagtactacagttggtaaaatgcataatacttaagaatctccttcgtcgaaacagattattcatcggattatcgacacggatcatttggaagctaacaaagccctcatcaaatcagcttagctgtgaactcgaccaatatatcaacatccggcatgacgtccacgacggccgggtgcccgcagaagcgatccgcccaggcagccaggttggggaccttcgcgccgccgaggagctcgacgccggcgatcctctccaccgccctgatccatccgaggtgcgatccgagggcgatgtccaggtagccgatgctgtcgtcgccgaagtattgcttccctttgctgcactcgacgaatgcctcctctaaatacagcagagcggttgtcatttcgtcggacgcttcgtccttgtctccggggacggttcctctcaatatccgaatccttggaggaaactgcatcgaagcaagagtggaaacctggaaattattcgagatacaaggagaagaaaaagtttgaataaattcagtttgagaactcttgttttcttaccggtcgtaaccaaaatttgatttttggtaattgactttagagttgatttcgagggtttttcatcgtagttttgttttttacatttacttttaaataacggataataaatacaatataagaaactagcatggtagcgtcattatattttctctcatataatagcatatatgttttctcattatattattcaaatatattaaaatgacaacataattttaaattttgcaataactttacaaaactactaatgtgtaatattcatattgtattttatatacatgttagttattaattatttttaatatcaaattttagttatttgtaaattatatatatatatatatatatatatatatatatatatatatatatatatatatatatatatattcctatattactcgtcttttaatatttttttaattccgaattttcttaatattgtatttctatatagactctatgctctttttccaatattatttatttttatttctgaatttttattatttctaattgtatttctatgtggactctaaactcatctttcagtattatttaatttttaatttcgaatttcagttacttctaaattgtattcctatatttactttaaacttttcttcccatatttttcttaattttgaattttatttatttgtaaattatatttttatacggactctaaactctacttttaattttattgtgtttattccaaattttcgttagttttaaattcctatatggacactatactctacttctaatattccttattttttaattacgaatttctattttttttcttaattgtatttctatatgaactatatactctacttctaatattccttacttttaattctaaatttctattattttctaattgtatttctatatggactctatactctacttgtaatattccttatttttaattacaaatttcagttatttcctaattatatttctatatggactctatactctacttttaatattccttatttttaattccgaactctatactctacttttaatattccttatttttaattccgaactctatactctacttttaatattctttatttttaattccgaatttcagttaattcctaattgtatttctatatggactctatactctacttttaatattccttatttttaattccgaatttcagttatttcctaattgtatttctatatggattctagtctcctcttctaatattccttattttttaattccgaatttcaactatttctaaattgtatttctatatggactctagtctactattctaatattccttattttttaattccgaatttcagctatttctaaattgtatttctatatggactctactttttctttttctccgattaatgtaagaatttctagaccatgagagcgaacgtggaggcttctttttctattcctttaataatataatagatagattgcctaatcctatgtagataattttcaggtctaccagttgggttctgatgttgccatgaaaggagcaggatactatacgtgatggtgctatagttttagaattagtagccaagggttctcttttccgcgttgaatcacatatgtgattcaattcaagtgatccttttttttcctcactgcta

SEQ ID NO: 3307 - DNA, 676 bp, Oryza sativa
ggcagcatcctccggtgatgatttggtcgcgccatcttcttcctctgatggtttgtgagcctctggcttttcaaggtccatgctatcctctgatggcttggcgctgtcatcatcttccactgatgggcttatcaagaaccacactgtcctctgatggcttcgcactcgcctcgtcttcctccaacggtttctcaagaccagcattgtcctgtgttggctccacacttcccttgtcttcctctggttccttctcaagagttacagggtcctctgtctgcttggtgccagcatcatctttctccgatggcttctcaaaggtcgtactgtcttctggtagcttggcactcgcctcatcctcctccaatgttttctcaagagcatcattgccttctgatggctttacacttccctcatcttcctctgatgccttctcaagagttatagtgttctctgatggctccacgctggcgctatcgtcctgcggcggctcctcaagagcactgctgtcttcggatggctttatgctggcctcgtcgtcgtgttttggttcctcgacagctatggcactttctgatggcgtttctatggatgcactgctctgaggtggtgcctcctcagaaacgttgccgtctgcagcttcgctaatgcttatgctactctttggagtgttatgagg

SEQ ID NO: 3308 - DNA, 695 bp, Oryza sativa
ctggtgaccaagttatcgcctagtcttccagttgttgtggagataccctcagtagacaatatgataaccatgatcgagagacaaaacaactatactccattgtcttatagttttttcccccacgttcctaactgtgtccgtcccctctcaaattatctatcatggattcactgtgagcaagaaaacagcagatggtcaagaaatcatggtttataaagttatgtagatgatatttcatcaagaaattatagtttataaaactgttgtgacatgtgagatcaatgaagtaggcaagtagcaggggctataggcacttcatttaatctcagccataagaaccatacatagatgtgatatagttggatcatttcttgacttactaagttgtaatggaaccagtgaattgcatgttttcagttgaagttgattgaccctcaatcatctgaagcagatttggccaaagaagcactttttactaaacatcctgaaatggagggtaaatccaagtatttctttgtgtcttttactaatgtgagattaactggtgattattttatgacaacattcatgtatggctgtttgataggttggccaaagaatcatcatttccaaatcttcaaattggaaatcaaaaacatatttttgattgattggtttgggggtcctaagcctatatcccccactgataccttgaa

SEQ ID NO: 3309 - DNA, 24834 bp, Oryza sativa
  unsure (1)..(24834): unsure at all n locations
aaccccgactaacaaaatttgtgtgtgccaaaattgtggcattaacggaaggcaaacaaaaacattcctaccatgataaagtggctttaaacatgaactttcttgcagtcatttagtgttaccttaatgtggttgcaacttacatgtccggaggaatgaataaaggttttgtgtgatcctaagtgtacgtaacatggtgagaaatgtggtgttaacaagcaaccttgatctaattattgttcatactaaatcaacattactttagagttgcttgtcttttcccaagataagatccaaagttgtcatataattcctcctgctctaatcaaattgtctaatatggatattacagtctatggagcatggaccagtacatgtcaacaacaaattatcatctaatcaggtattcttccacacaaactaaaacaaacattatgaccgctagataagttcaagcgcacaacaaacaagtgcacctagctagataagttcaagcaaatcatttatattctgaaggacctaaaccaaaacaatcacttctaaagccacaatgagcatttctaacatactgcaaaatcttccacacttttttgtcaaacatgattattgcaggaaaaaattgaactagaaatggcaacactgtttgtttaaccaatggtacagtggaacgaactatgaaaggaactggtgacagtcacactcacattgtctcagagaagaccaagctgctgaagcagcatttttttcagcttgtttcttgttcttagcaggatcacctgtaaatgtaatcccagctagctctactgtgcatgtgaaaaccggaaggtggccaagcccagatcgctctgttgtatacgaaggcaatggtgctccaaccctctgtgctacttcctggagaaggttcttgtaaacccctgtttcgtcctgtttaagagaaacatatcacagtatgtattaactgactggaaaatttacagtacaaaccaaggaatgaaacttgtgggtgccagatcatattgcaaggtaacataaatcatagaaaatgtaaaaggttaacagacagcttggcaaaatagttcatgacaggagtacaatgatgtccatgttagctagttaaacttccattaatactcagtcttgattgaaacagaagtaaccaaataaaaaaaaagaagaaaaggcaccagaatcctaaggaagattgacttctggattaaggtattgctgaacagaacaatacttcaaatgtaaggataatgatttaaaagaggttaaatatggggggtgttagttgagcagtctgtgaactgatcaggtgataataaaggggcaatgaataagaaggaacatctatcaaactaacagaaacatacaagtcaactccaagttagctaggtaatttaaggataaaatgaaccaagcttttttcatgtatattagttaataaaaattgatacagagtgcaaccatcagcacttaaaagactgtattgagttgaccgcaagttcaattagattaatgaatcagatgatacttttttagcattgagtagcatatatgtaaataaattttcaagacacaaaaaagaaatgctatcatattcatggcagcagtactggagtataagtgtaagaacaatagttccatgtatagtcagctagtgagtttactatatcacttaattacttacaaggccattgttgacttagtcaattgatatggtaacttcttctgtagttaaatatttcttttagagataatgactgattttgaaaaaaaaaaagacagatcgtctagcaaatggtcaaatcagtttctgtcagtcaaaaccctcagtactagtcaactatgaggagctttgaacacgcctaacatttgaccagttcttgttcaaaatcactgtgacaactagcaagcttttctatttttgcaaaattttagttattcatattaaacgccaactgacagccgaagtttttttttacaatggcaataaacagtatgacctttacaaacaagaaaatctgataccaaatcacccccatttcaacaaaacgatctccatgcagaccaacacacatcggtggcggtcgcaccaaaaggcccagcctaaaaaggcaagaaccaaagcgacgcccccgcaccatcaccaccaccaccaacagcgacacgcaccaaatcctcccacggataatttccaagtccccttaaagccaggacagggagaagcaaacaccgcactagctagggctgaggcggcagcagacctcaccacattcccccaatggcagcagcaccaccatggcaccatccaaccatgaatccatgatccatcatccatggtggcaatggttgcaatgcactacaacacctcccgccatccatggtgggctgtgtgggggcctgcccgccactaaatttcccccgggcccactgccattgacctgcgatgccgggttaggtgcgggcggtctccaattcaattccccccctcacccactcccacgccctcgccattaataccaccactataaagacctaaacctaatctctactcctccctcctccatctcctttcacactaatctccccccctacgcgctcgctaatcccactaccaccctcaagtcaatcaacaatcgcgtattctcctcctcctcctactagtagtggactagtggtagtggtcgcatacgtgttctcatggaaggctagcctttcactaccaaatgagtcaagttcatacggccagtttttaattgccccctcattaatgcgccattatacgtaatcagggtttagcggttaatggcacggagactttcgtgattagtactcgtactaccgatttccacacccgcggtaattaattaacggcgtgaaaagggaaagaaaaaaaaagaacggaaccctaacggtaattccgaggcgcggggtgttgctcctgcttcttttattaccgctgcgaaagcggcaattaatgcggggtgttaaattcaagtaccgtcgccgttacgtcgcgagagagagagagagagagaggagccccatttaacgagaaattaaaaacggagggggattaatggccggcgcggagtacgagctgattaagaggcttaattgcgcttagtacaccgtgttagtgtgggaagtaagctgtggtgttcattaaattaactccgtgtcaaggtaaacaaattacggtgtcaggctgtagtcgtactaaaaataaaatatggtggatatttgtttattttaaaataacgaactgattaaaaattgaacgaactagtactactcgtacagtggctttttccatcgctcggaatcgaaggaatccccaccttttgagagaggaggagaaaagtttgcggaattttttgaacgcgaaaaagatttgccactttttctctctcgctgattacttgctcccagttcatgccgctgacgagagagaattcaacggaaacagattccctcgaagctaggaccgacgaacacagaacaagtgaacaactcgggtggtttcgttgagaaaaccttcgaatccgatcgaaagtagagaaaacaaaacggaaggaaaaagcgttttcgagccagatttctcccgtgttcgccaacattttgctaaaaaaaaacatcataaaatgtcccaaaccctcgcggcatgaacacccaatcacctaggcacggatatagctcacgacaattccacgacgaatcgtggcagcaacaacggtagcagcgatgattcgagacgatcaaacgagtaagaaccctaccagatcccccaaattccgccatgagcagcaaccacaacaagaggggaaaaacgcggcgaggaaaggagttgacgaggagagaggcggtcaaacagaggggaggagggcgtgggcgtaccaggatgcgggcggcgagggagtaggaagggccgcggcgggcgagggcggcgagggcgacctccgcggcggcgtgctcggcctggcggagcgtggtgaagaacccggggctctcgaactgctcgccgttgaagttgaccgccgccttgaaccgcggcgcgtggtccggcccctcccgcaggcaggtgtacgccggcaggttgaagcagctccgctgcgcgagctcctggagctggttcttatacatcgccgccgccgccgcagccgaggccggccgccgcacctacccaaccgccgccgccaccgccaccgcaagccgctcttcgccccgggacccccaccgctgcttctaatgccggccgccgtggccggagaaggaggaggaggtggaggctgcgctgccgcgagagatctaccgaaggaggaggaggaggaggaggggggaagtgtggagtgaaaggagatggaggggagccggtttatatttttctttttcttttggatttatttttcgaggatgtttaatgcgggtgcctgcggttactagtttggctggcaggggtgaggatgacagctgggcccgcatacactcttttatttttatttttttttaccatttgtcaaatttaaaaggatttgctggtttaaatttgaaaggatcggctgatttatcattctattctatggtttgtaatggctttgtcttaaaaaaaaagttcgacttcaacgtgatttttgtggtacaaaaaataattttcctctcattcttggcttccaaataataattatcgaaaaagtgaatgtatttcagtatatgtgagtactaaaaaaatacacaaaatgaataacacacgtaatcatatcttgtgccgatttaatgtactagaataaatatttcagtgctcctatttctagccgttgttaattctagctgttgtccatgtgtttttaaccgttgtcaattctagtcgttgcctaagtttaatgcgccatgtggaacatcaagttttatttctcttaaaatgagtttgatattctagctattgttgatgtttaacgtgacaggtggaacaccaagtgataagcatattttggagatataatcgtttaatgtgctgaggaatacgttttgaaatgattggatatatattttctactgattaccatccttattcggtgttcgttcccattttacacattacaatcgttaaatagggaaaaatatcaccttatttagcattatccatctatttttgagaggatactctgatgcgagagatctaccgaaggcggaagttgagaggagggggattttggagtggaaggagatggagggggagacaattttgtttcttttggatttatttttggagaatatttaatgttgatgctttgcggttactagctaggatggcagtgggaggatgatatgttttaaaaggatttaaaattgaagaaaatcacttattatcattttatcccatggttatgaacttatgatggctctctattaaaaggagttcgatttgaatattgttttttctgtgatattgaagcgctctctctctctcttaaaaaatagattgatttaaacgttggttgttgtactattttttttaattttatcctacgattatgatggctccttttttttatttgaagcgttggctcttgtgatgttgaattctatttgttctcatttttagttttaagtacatacctttactgatattgaattgcctccaaacaatgggtgctagatgagcggttgcattccagaagacaccaatagtaacacatatggtctgaaaatctgttattggaatgacacgcatcatcacaactgtcctgattaaatgtacaagattaaatatttcttgttgctatttctagctgttgccagtgtttaacgtgccaagtgcaatattaagtgataagcatatcttttagatatggtcatttaatgtgctaacgaatatgttttgagaagattgaattctaaactaattgtcattgtcatttagaactattcctattttacaaataaaaatggtttaataaggaaagtatcactttatggagcacacatccatctatattttctttgttatttatatgttgggatataagaaggctatttgagaggagcgggagtgaagtgtggagaggaatgtgatttagttttgttttttactcattttgtggaaggagttaaatgatggtgacgatgattataaggtggtctccctatggaaggatgataactgggagctggaaaaatgccacacttttattcgtcatcaaatagtaaggaaaatgtgaagcccacttttttgtccatgataaacattctcccgataaaaaaagtttgatttgaacattgatttctaatattgaattcctttctctcctttttggttttagataattgcttagcatcagattattcccaaaataattacagatgctagaggttgctacaagagaactatcaaaagagaatgtggaggacgaggaggcagtgaagtgtggagtggaaggagatagagggggaggcgatttattattatttttgttatggatctagttttggaggaagtttaatgctggtgcccccacggttactagtttgctttaggtaattgtatttgctcatattgaattgcttccaaacaacaattgtgtgattgcatttcaatatacaagaatagtaacaaattatctcaaaatgtaccaactgttcaatgacatgcaacaccacatattgtcctgatttaatgtaataaaatattttttccatgatcccatttgtaaccgttgtcaattttagctattgctagtgtttaacgtatcaactggaacaaagtgatatctctcttaaaatgaatttgatttgaatgtgattcttgtggtattgattttttttctctcattctttgctttaggtgattgtatttgctcatatgaaattgcttccaaacaacaattgccatgcaagtgatcgcatttcagtatacatgaatagtatcacattctctaaaatgtaccaaccgaatgacacgcaccaccacatcttttcccgatttaatgtactaaaataaatatttccatgctcccatttctagcccttctcaattctagccgttgttaggtggaacaccaagtaataaacatattttggggatttagttgtttaatgtgctaaggaatacgtttcgagttgattggatatatgtttaatattgattaccctattaggaattgttatattttatattgattacaatggttaaatagggaaaaagatcaccctattgagcaacatccatctagttttgagaggctatttgacgggaataatcccctcgccggagaaggttgctctactacgagagatctaccgaggaggaggagagggggatggtagtttgaagtgtggagtgtaaggagatggagggggagacgattgttttcttttggattcatttttagaggaagtttaatgatggtgctctcggttactagttgggttggtaatgggaggatgatagctaggcccgcatacatgccttttgtttactattcatcaaaattaaaaagattaaatattcgccccggaccctccccctccccccccactgctgcttctaatgccgaccgccgtggacggaggaggaggctgcgctgctgcgagagatctataaggggagaaggagggggtgaagcgtggagtggaaagagatggaggggagccggttcatatttcctttttttctttcggatttatttttcgagcataattaatgcgggtgcctgcggttactagtttggctggtagggtgaggatgacagctgggcccgtatacactattttatttatttattttaccattcgtcaaatttaaaaggatttgctggttgaaatttgaaatgattggatgatttatcattatatcctttggtttgtaatggcattgtcttaaaaaaaagagttcgacttcaacgtgatttttgcggtacaaaaaataattttcctcccattcttggcttccagataataattgtcgaaaaagtgaatgtatttcattatatgtgagtactaaaaaatacaccaaatgagtagcacacgtaatcatatcttgtgccaatttaatgtactataataaatatttcagtgctcctatttctaaccgttgtcaattctagctattgcctatgtttgacgtgtcatgtggaacatcaagttatatttctcttttattaaaaatagtttgatttgattgtgactttttaggtattgattttttttctatcgctcttggcttcaggtaataatatttgctcatattgaattgctttcaaatgacaattgcctctcatgcatttaagtatacgcgaatggtaacgcaatctctaaaaatataccaattgagtgacacgcatcaccacatcttctcccatttaatgtactagaataaatatttgtgtgcttctatttctagccgttgctaatatttgacgtgccaggtggaacaccaagcgatatctcttctaaaaagaatttgatttgaagatgattcttgtgatattgaatttcttcctttaactcttggctttaggtgtttgtgttagctcatagggaatgcttccaaacaacaattgctagataagtgattgcatttctatagacgcgaatagtaacacattctctaaaaatgtaccaaacacattttaccacatcttgtctcaactttatatacttaaataaatatttttgtgctcccatttctagttgttgtcaattctagccattgccaatgtttaacgtgataggtggaacaccaagtgataagcatattttggagatatagccgtttaatgggctaaggaatacattttgaaatgattggatatatgttttctactaattagcattcttattccgtattgttctcattttacacattacaattgttaaataggaaaaaaatatcaccttacttagcatcatccatctatatttgagaggttgctttgatgcgagagatctcctagaggaggaggaagttggggggagggggattttggagtggaaggagatggagggagtgggggggattttgtttcttttggatgtatttttggagaatgtttaatgctagtgatttgcggttactagctagcatggcagtgagaggatgatagctaggtccgcacacacgtctttgtttattgttcatcaaattttaaaggatttaaaactaaaaaatcactaattatcattttatcccatggttacgatggctctctattaaaaagagatcgatttgaatatcgttttttttttgtgatattgaagctctctctctctctctctcttaaaaagagtttgatttgaacgttggttgttgtaatattttttttattttatccttcgcttatgatgactcctttttcgatttgaaacattggctcctgtgacgttgaattgtatttcctctcatttttagttttaagtatgtacctttactaatattgaattgcttccaaacaatggatgctagatgagcggttgcattccagtagtaacacatgctctgaaaatatgctattcggagtgacatgcatcatcacacttgtcccgattaaatgtacatgattaaatatttattgttgccatttctagctattgtcagtgcttaacgtgccaagtggaatattaagcgataagcatatctttaagatatggtcgtttaatgtgctaacgaatatgttttgagaagattgaatatatttctaaactaattgtcattgttatttagaactattcctattttacaaataataatggtttaataaggaaaatatcactttatggagcacacatccatctatattttctttattatttatatgttgggatataaggaggctatttgagaggtctagcggaggagtgatgtgtggagagaaggtgattttgttttgttttgttttaggattcttgttgtggaaggagttaaatgatggtgaccacaattataagatgggttgcctatggaaggatgaaaactgagagctagaaacatgccacacttttctttccaatcaaatagtagggaaaatgtgaagcccaccttttgtccatgacaaccgttttcctgataaaaacgttgatttgaacattgatttctgagattgaatttcttcctttcctttttggttttaaataagttcttagcattagattatttccaaaataataacaaatgctacatgatgttataagagatctactagaagagaatgacgaggacaaggaggggtcaagagtagagtgggaaggcatggaagggggacgatttatatttatttgttttggaattatttttggacgagcagaaagaaagagaaaaaaagggttacaaatttatagatagttgtaacacaggctccaacaagttgtgtatggctacgacacgactgcatgagcttttaacaagtcatatatgagagaggggtgggtcaggtattaatcgtatagtatatatatccatagttaactgttgtataggtttgctagattaattacaaataatgtgtcaatttctataactagcggttgactattgaacttgctcttacagtaatttattgttaatactagcagtaaaccttaaaactcaagaaaaagacgtacagtacactttctacacttactcgtagaatggatgcccgcactccaagagaaatttatgatattgttcgtattagtttgatgttgttcatataacgccaaatctgattttgcacgatagatttaactaagtagcacatatttcgaatgatttaatcttaacatacacgcacccttctatttctcttttaataacaaccaccgaggaaatttctcttaaaaaaaacaaccaccgagatactacggatttaatatcaccacgtcattgtactaggataaaattgtgggatgcggaaaaatcgttcctctcgtgtactaagtttttacgtaggcatcaccacaagtcaaaatcactcgtatgaaatgggtaatgtctaactttaatttttgtagtattagaggtgggactctcatacaaaattcggagaattgaactttcaaataacttgtgttggagctggagaatccgaacactgcccgtccctcccgcccctgacactcgcagcgtcatatatacatcgtacaagcagacaccacccccatggtgtcaccaagctgactccagcaacagttgcggcatatgccgtctagctaaaaagctttggcagtgaaccaacacagtccacagagcccagccaccggccgtccatttcgaagcaggccagataatcaacggctgatccagaccggccgcgcgcggctctcgtctccccggcacgcgccgctgcattccccgcgcgcgacggcgagcatttccaccggtcgccgcacgcgcgccgtcatggtcgtcgtcgtcgtcgacaacgggtgcattctaaagagctaaggtggtattcttttctcctgaaaataaagatgtagttttttacacaaaacgatgtggtattaacgtatgattgattgagttttaattattacaaacttgaaaaatagattaatatgatattttagagcaactttcatatagaaagttttcgcacgaaacacaccattcagcattttgaaaagcgtgccacgaaaatcttaatcttcatccaactcttcttggagaaaagaacaataccttagttgtttctttttttattaccacgtatgaaaattttctaaatagaaaatggtctataaattaaatagatatgataattatgtttctctaattagctaaaactatatccctaaaatattgtgcccgaaacacatcttttccttcgtatgcgtgctagtactaccatatatgaacgctgctatacgtcgacgcaggcgtccgaccaatgtacgacttgtgatagatcacaaactaaaaaaaatcatctcgcgtatatgtcgtcgttgtggtcgtacaagagtcgtacatcacactcatatgtatagcattttaactatgtattctgtataaatcttgttaattgacaagtactatctctggtttaggttataagactttctagcattgcgtacattcatatatatgttaataaatctagacatatatatgtgtctaatttattaatatatatataaatatggataatgctagaaagttttataatctgaaatagaggtagtagtatattaatctggatataggctaccgattaatgtataaaagttaacttttttataaacaaagaaaagtgctacgttatgaatggatagtacgtatacgacgggtacgccatgatcgatgggtagtagtagtatttgtgtgtgtgtgtgttgactaccagaatcgatgtatacgtatgtactagtatgacgtgcgactggaaaagtatcgtggagactagcaacagggcacacagctagccatacgtgcaggcccagtttgtggttcgagttcttggctgccttcagctggtgatgtctctgtcaggctgtgtaaaatgtgtgcgattgacagcagggtttacgattccgacatgcccacattagcgaaattcggaatttcacgaaatccggtgaaaaactgataaattccgaataaatttcataaactaaaatttgaatacaaattccctgagtttgccgataagttctcgaaaaccggtcggttttggcgaaattccgatcgaaatcatcgaaatttcgatcagtaatttgtaatagaggtaatttgctgaaattatttcctttcctgatgtaagtttcagtaaatacacacaatgcatcatttttttcgaaaatttatatccagtaggttctatgaatatcaaagtatttataagattttatttgattttttttctttttttatcaattcaaatttgaatttggatgaaactcctcgaaatctcaaacggtttctacttccgagcctcgtcgaaacatcgaaatttcgcgaaatccgaccggatttcgtcggaatcgtaaaccctgattgacagttcaaagttcaaatctgctttgatccatgctactagcttctccactcctccttaggccatgtacaacacgtgaccctggcctgtggtctcagaactccacgtcggagccgagccaagctggcacgagtttggatggtctcgcaggctatcagtgagcttgcagaggaaccggcgcaagcgctgcgcctggactcgggagccacgaagccacaagccgaagcctcgtgttggaggagtcggcgccccgcgcgttgcctcattccgtcctcctatgccgtggtcgtcgtcgcctcgctagatctgccgcagctgccgtggtcgtcgtcgctgcttcccgccgccgccagatctgccgccgccgcttccccgtcgtcgctgcttcccgccagcggatccggtgagcccgctgccgccaagctcgccacgccgtcagcgagcttgtacgtgccatcgtgggtggagcaggacggcggcgtcgaggaaccgccgcagccagatccggcgagcccgcgcccggatccggcgagcgcgccgtcgtggggggaggaggacggcggcgtcaagccatctgccctcaccgctgctccccatcgccgtcagatccgccgccgccgccaccgctgctccccgccttcgctagatccgccgccgccagagctcaagcggcgccgatctgccgccgaaggcagagggaaaagagagagcggcgaggggaggggagaggagtagagcgtcggtggagaaatcgaagagagagagaggggaataaaaaagagagggggatgggaagaggctgacagtgggtcccaagttgtttaggggtatacatatatttattttggttactatagggttcaaaatataaagtttcaataggtttgataatacaagggctgacatataaatagataggggctgacatgcaaaatacgttttggagtggcttccactgtgggtagtgtgacctttgtgtggttctatcctacgtggcgtcttgagaccacagttacttatggctaccattgtacatgcccttacgtagtcccccgtcttagaaaaaaccaacttaggctgcgttcctataaaggaaatgggaaccaatctccggcgcataaaaaacggagaggtccattagcgcgtgattaattaagtattagcttttttttcaaaaatggatcaatatgatttttttaaaataaatttcgtatataaactttttgcaaaaaacacaccgtttagcaatttgaaaagcgtgtgcgtggaaaacgagggagaggagttgggaatatgtggtgctgaacacaccctaaccactggctctaaatcatctatagtcaacttaataactaattcatacaatagttacatgtaaacatatattatataattaatatctggtcccacctatcatacacacatgcaccttgtagtctgtggtgcagctgctgtagcccgctgcccttctcgctcattttttatgttcttaaaatatatttatagctggcttatagtctgctattctacctgctctaagggacacgagggagaggaggtgagaatgtgacttcacttattaggacaatcaattcgtacgactatttatccaaattcgttattctagatagagtcatattccaaccttaattgatttttttttgattgagggagtccgccgggtcgccggccaatgccagcgaagaactcgattcccccacctgctgtccgttcataatcgatcaaaccgtgctccggcttttaattacagtcgatgagattttaattccgtttcaaatgtggtgcagacacttccatatgattttcgctgcgatttctaaggcaggaatcactttaccaagagaaactagaaaaaaaaaacccaaagaagtaattaattgttgtttaattaccagaaaacttactcggtcaaaactagtgaaaggttcagctaaacccactcatgcttcttttgaccagaccttggagataccgagcttagtagactaattaggttaaaaccatattaccctacatctttttattagcaaaatgttatgcaatatgtttgtatgatgttggattcgtgggccatacagcgtggttttaaatcctagtgcgtattgtgcataaacatgcatgtgtgtatccctatttgatgcagagaccgaaagtaattttttcattacctaagaatatgtggtaaaatcaatgaatgtgtttcattgcaggtctggaccaaatcgtagtcctggattacagtcacagaggaaacagaggtacagtggaagtgcatgtgtgctacagcgaggctcaattgctcaagtatggccagatgccatcgcccaatgggcttttggcccaacacatcgtatgcattttcaagcccaaaaatggacgcgtgctgcctcgctgcttgggcccaaatggtcttaggaccagataaaggaaaaagtgcacccaaggtccctcaacttatcatcgagatacaaaatcgtcccccaatcgcaaaaccagataccagacgtccctcaactagcaaaaccgttcgctttagatccctcggtggttttgaccccggttttgtctgacgtggcggccgagtcagcgtgggacccacgtggggccccacatgtcagactatccatgtcagcctcctctcccttccttctctcttcctctctcctacacacaccgagacgagtcgtcggctctgtcgacggcggcggcggtagcgtgtccgcgcgtcggcggcggcggcggtagcgcgtctgcccaggagcggctccgtcggcagcgacgactgttgcgcgtcagcagcagcggcggtagcgcgtccgcgcgtttgccctggagcggcttcgtcggcggcgaaggcggatgtagcgcgtcggtgcgtcttcgtcgtcgtcgccgccgccgccatcggcgacaacctcctggagccggcaccgtcgtcgcgggcaccatcgaagaagcggcaggagcggatgaggacggcggcggcgaaaaatcccacatgcgaagtaattaagatcgatcgacagccacatatttacaacagccaccacgcacatcatctcttcatcatgcatatatatacgcacgcatgcgaagtaactaagatcgattgatcgatcgaattaacaaggacaatggagaccaccggcggaggaggatctcccaaggaggcggtggtgccgtccgctgcctccggcgacaccacactcggccgccacttggcgcaccgcctcgtgcaggtgggcgtcagcaacgtcttcgccatgcccggggacttgaacctcacgcttctcgaccacctcatcgccgagcccggcctccacatcgtcggctgctgcaacgagctcaacgccggctacgccgccgacggctatgcgtgggcccgtggcgtgggcgcctgcaccgtcaccttcaccgtccgtggccagctgctgcacggccgccgtcgccgcagccatcggttctggaatcaggtgacgggcgacgaagccggcgccgccttcaggaatcaggagtgcgcgggcgcggctccgtcgttgccgtcggcggtagctcgtcggagcggctccgtcgttgtcgacggcggtagcgcgtctccatcatcgccgccgtcgccatcatcggagacgacagcctcctgggaccggcacggttgaagcgcgtgggcgtgagctcgaggccgcgttcttcttttccgggagccaccatcgcgctcctcccccgccgggcctaccgtgtccactgcatcggtgacgcactccccttctcccgcgtcatcgccgccgagcgacggctcgcttgctccgtcggacaagaggaaaaaaagtgagagagacgaggaagggagatgaaggggaagagagaggaggctggcatggatagtctgacatgtggggcccacgtgggtcccacgctaactcaaccgtcacgtcaaataaaaccggggtcaaaaccaccgagggacctaaagcgaacgattttactagttgagggacttccgatacctggttttgtgactgggggacgattttgtatctcgatgacaagatgagggaccttgggtgcactttttccccagataaaaccttgcatctacatgaggagctctaaaagcacggcccatgggctaactgaacatatggcaaattgatccatgcaaccaatatgaatgtttgggtgtccttgataatattttccaacttcttttcttgtttgtgcgaaactgtcttcaactttcttctcatcttgaaacaagttaattttgacaactttcttcaatgcatgtctggtgccctaaaaatatattttggaagaatgcggtgggactgcagccgtgtgttctgaacctgtagcactaacaaacctcaattttaagcaggttaaattgaactcttcactctctttctcgggccaaaactacacatattgggggtgctgaatgagacgacggcctcacaagttcatgggtcttccgattcacaagttgatagtgagtaccagtggagaccgaagaacggaaagtctatagaatgaatcaaacaaaaacatcaaaattggccggtacgaagtacttcattggtactacagctctacagcttagctagtactatctgtactactaccactaccatgatgacgagtactcgaaaagatcagaaaccattgcaataatttctttttgcgtcacaagattgaataaaaaatcttaccacactcagcgaccatcgttaaaaaaaagattaaaagaaaagagagatccttttcgtatcgttgcagacgacagatttgtggtcgtttctcctttgcgacccgaaagctagctgtgatcctgaggcatctgatcgggcaaaacggatcgaaatctccgagcacaacagaagcgtgacaacgaccgacggtgcaaaaatttgggaccgggaataaaggtctttcgagttagtacaaggctagtaggaggagtactacccatcattatctttttttttttaaatggaccgcacaagacagtgcgagtttcatgtattgataaagtaggagaaaaatacaagtctatagtcctgaaaaacatagttagagaaaaaaaacagcaacactgcacgtctataacaacatctgctgcgagagcaaaaacaagaactagcgatattcgacacgacgttttcaggaagggaacaacgtcgagagcgctgctgccggctgccccgaggagccaggacatggttgcctcgtcaccgtaacgtttactatttgagtgctctctccatttttaaatacacgacagtatcgttgtatgttccattagtcgtgtttaagaatgacttatactttcatatttacaattgttaaataagacggataattttgaaacatcacactattataagccaaacttaaagtgtcataagtcatgaaacaaagtcacagtaaaataaataatacttgcatgctactttaatgaacaaatagctgaatacatgttcaaaagtcaataacaccgcgtacctaagaaacagagagtatgttactacttcctgcggtcacaattattattgttggtatcgtatatactactagtaaaaatgtcgaactacatgtccaccacataagttcttcgccaagtgaaacgttttggttttctacttctcttatccccttgatgctgatgtattactagacatgtactacatccatcccaacggaggtacttagtgtctgtttagagagcttatagcagcaacagcttcttataaaatctccagctggcagaaactcctataaacaattcagattttcacttagattctgagaaatgctatcgtaaaatcccgctactatgaattttccccagttgtttctccgaataatattaagctcccagagccatagtagcgttccgcggctcaccagatttcaacatcacgttaccctttgtacaagcgtcggcggcaacaaaccacgcacggacgcacccaccgaccgaccgaccacgccgcccgcgcgcgcgcccatcgatcggcgcgcggcggccaaagatcgaacgtgacgaaaccgggtcgtcgcgctccaccggagcacgcgacgcgcgcggccgcgcgcgtgtgcgcgtgccgtacgtaggacgacgcgaggccgccgcgcgacgacatccgctgcaacggccgccgatgcgcgcgggcgcgcgctcctagctagctggcgtcgcgggcgacgtgtgatgtcggcacggcctcctctcctggttgggctttggctcgtctcatctccctacggcgatgttgatctgctcgtggagacgccgacacctgctggcccgtggcacgcggcacgcggagaggtgaaactctctatcgcttttgctgctgctgctccctcgttggtttcgaaatatgctccccctcgatgccacccatcacgcatgtgggggcacttggcaattgccaatcgtccgtccagccggccgtgcgtgcgtgtgcgacgggaggtagctaccaccggcaccaccggcatggaggctcgtgtcgccccacacacactttcggctgcttaagctcagtgttaaaaaagtatcgaaattttccgatcgtaccgatgccgtttccacaaaactaatataataatatggttaccgtttttaaattttagttttttaaatttctgtcagcgtggtattgaagttgacactaaatagatgaattcataaatatggaaatttcctgaccgttttcgttcatttcanaaaaagtaataaaataatgtaccgtttccgattatttccaaccgttttcatacctagtgttactacaattatattcagctgatctggtacagtcttagaataattccatttgtaatcctttctattttcttgaaataaatttatttttaaactatcatttcgtcgaagtttgtaaaaatagtgtataaatgtattaggagtaaataaaaagaaaaataattgcaacggcatttgataaagtagtaatgatctaatattttttattttgtattgatatgcgtgtgatgagtaaaaaggaactattttaaaacagagagacaactacttcttccgtgccaaaatgtaaacatttttttattagcatggtattagtaaagtaggtgatactgattggagaaagtgaataattagttaaaaagataaagtagatgaaatataatggttgtaaacttgtaattggttgagaggagaagataggtagagaaatagctttattttgagacatgtaatatgctaaaaataattatattttgggatgacgatcgtacataagagcaggtacaatagcaggctataagccagctataaccacatatcgagaagaaaaaagaagagagagaagaaagcgggctacagatttgtaaccagctacaacacagactccaagacgttacgtgtgtatgacaggtgggaccgaatattagtagtgtagtatatttttatagttaactattgtatgaatatgctattagattaactatagatgatttaaagccaatacttagttatactattaaacttgctctaacagaccaatcacaccagcaaagtatcctagtctataacagaccaaacaacaagaccataactagtctataaagaaagcaataggccaactattaactgaccaattattcggtccgcacgtactgactctacaaactggtccatgatggcaggagtaagataagatcaagaccgaagcgcggtccaggtcaattatttgacaaagcacggaggatatggttaattgcaacatcttaattacattgtcatggcttgtttctaggtcgctgctcccgcgcttacgtgactttatagaaagcttgagattttgacaagttgttagccagtttctgataatttagaaaaactgggttttccatctttcaccttttagtttattttatgaactctataactataatttcttataatcgaaaaaaagttaaactgcctaggagagtttttgattctgaaaaaaaaaatcaaaagctccccaatcaagctctatgtcattttacaaacctgcatctcacgattgcaccatctcctctccttccatcttaaaatgtgatatatcttattattatgaatctaaacagaaatattattagaatatatcatatcacatactactatgtctcaaaagaataactcctagctataaacttgtatacgcatatgtccagattcgtaacttggatttgattttattcttttttagacggaggggtattaaatttgtctattttcaaatgaagggagtacatatgtgacccccatgaaacgtcaagggaaaaggttgtctcccactagcaagattggtgcaccgatggataatgtaactaaacgtgaaacaacccatgttgtttctgttagccttcgccactaaagtgccaatgttcccgccctttagtcacagtgctcaccgactatatacccgtcagtccatactctaaggcatagtacttgattataatgtcttagcatcctctttcggtcaggatcgatggatcgatctagtcatctatagccactaataaagctggtttcgttttgaggaaaaacatgagatttggaattatgaggattaattcataacaataccattcagatcgtatgaataaattctaggaaaaccaaagaatttggtttcctacaagttgtaaacaacgtagaaaatttacatccacttaaatctcttaaaaattccttcatttcttttcttattgtaatgggttaaacaaaattcaaaccaaataagctctaagttatgagacggaaagctgggaaaaattataaaatttggtgtgatttatacatacaaatatcattgaaatggttggtgcagtgttcctcttgccttcctttcttccatcaagatgcacttattcgtatgttagagtgtgcactcgtggatgcgcgtgtatagtggcgtgtgtgcttctttcgtataattgtaagaaaaatattttgaagtggaaattcgagaagataccagaagagaaatgcatgagtttagtatgcatgtagttgtttggacatgagagatgacaatttatttgttgtaatgaatatatcagattttctactctcagtgatggagccaggataaaattataacgggggctaaaccaaaatgaccaagagtaactaagagagatttagggttggttttaagactttttgggccttcctagtcttttgggccttctaacaacctcaaataaagtctatattagcccctcatctataaatatatagattaaaattttaggggggtattatggaggctctaatggtatattagagggtagggagggtctaaacaccccccgcccccatggtgtccccgcccctgtctactcctaattttcagttacgaagagattcttaatctttcgatggcctaaagttgagctttagcaagtctaatttgtattttttattaaaactttaatatccttttgcaatggtccctgggcctccaagcaacgtggcggcaccaccttggccactagatgggagaaggggagtgatccaaacattgacaaagatagctccttgttgacatactcccttcgagggagtatagaagagttaggaggagagatagaggtggtgacgttcttgatagatggagagggaaggaggtggcggggtttgtatacgaagtaagaatcgatcatgaggagaggacttgaggagtgttgggtttaggattacattaaaagtttgtaaccatttaaaagtgagcgttgtataaggaaaaaaaagtaaccaattgacaagtagaccatcctaaatgggccaatttgctccctaccatcgtaaaaattatggtctcgaaagatatcttcatatatatgtcatgaatatgtggattcgggtcccatatataattctcatcgtattttgcaactcacgtgtcctacattagtgttcttcaacaaattttcatccaaatcaaccaaaaagaaccatatactaattagggtgtgtttagttcatgctaaaattagaagtttgattgaaattggaacgatgtgatggaaaagttggaagtttatgtatgtaggaaagttttgatgtgatggaaaagttggaagtttgaagaaaattttggaactaaactcagcctaaattaagatatggcagttgagtaaattgacatgtgtttagttcacgctaaaattgaaagttttgttgaaattggaacgatgtgtggaaaagttagaagtttgtgtgtgtagaaaagttctgatgtgatgtaaaagttgaaagtttggaactaaactcgtctgttgtttcatcccgtttatctgtttggttttgacgtccgtatgccgtctccttccaattccatccctagctctacctaccacgcgctgccaaactcttcctgccccagccggtcctccacctctcggtccctcttctgctgcgaccgagtcagtcgaggctcgcggctccgaaccaccacgtacgatctccgcggaaaagctgggtcgcgttggcaggcagcgacttgttcaccccgtactccgctccgccaccatcagtccatcaccacgcacagcgacctttttgttttttttttacgttttaaaagtcccaaacagaaaaggcaaaacaaaaaataaaaagaagagtccacgactccgtatgtcaagtctactcacacaccctttttttttccctctcgtgtcagtgtcagagaatacgtatccgcttcttctcttctccgtggtgatgagcgacgcgtcgcgtcgctctctcgatggcggacgcggcaatactcccccgcccgcttcgcttgcgtttttgcgcgctcccgtttcgtttcaacggataaattcgcctagtggtagcttctgcaccgcaccgtcctgccttctttcttgttgctttccctgccaatttcctctcaaacatctctccttttaccttttccttcaccaccgcggcgaatattcgctgagacttttagttctcaatttttttcttcaaacttctaacttttttatcacatcaaaacttttatacacacaaactttcaatttttccgtcacatcattctaatttcaattaaattttcaattttaacatgaattaaacacaccgaagacttccatccccaattatactccttccatctaaatagtaaaaccaatcttttattccacccatatcaaaatataagaatatggaaccggattaaatgttttctagcattatgaatctaaatagaaaaagtctaatctgattatgggttcttatattttataacgtttcgtaccataatattttaagtcggagaaagaattggataatacgttttccaataccatgaatctagacacttgtatccagcatgtcccatccaatacaatttaatttctgtattatccacagcgtttcgattatcgtttttataactttgacaagtttaccattaatcttggactgttgcaagaacggagctgtcgttttctcgcgcggtggtctcggctcggctggggagcaaagcgggcgagcatattctctcttgctttgccgttaagtactccctccgtgtgagtgtgcgctaactaacctagttaatgcgaggtgtcgacatttcgctccccccttttctttctccccactttcgcgttcgattaattcttcgtttgatcgtttctcccccaaatcgatggatcgattgaacagcgaatccgtgagatatgattactgcgatgattagttaagagggaacagaacggtaaagacgagtgatgaactaattaatattaattgatcttaataatagtgaacaat

SEQ ID NO: 3310 - DNA, 744 bp, Oryza sativa
tttttaaaattttagttaacaacttaattaatcatgcactaatctactgtttcgtttttcatgctaggacggaaggttcccaaccttaccttaagaacacacccgacatatcaaaagttttgcactgtcgcatactatttgttatagggtgtttagatccactggcaaattttttccccgtcacatcaaatgtttgaacacatgtacagagtattaaatattgaaaaaaaaactaattacacaatttgcgtgtaaattgcgagacgaatcttttaagtctaattgcaccatgatatgataatgtggtgatacagtaaatatttgctaatgacatattaattaggcttaataaatttgtctcgcagtttacatacggtttatgtaatttgttttattattagattacatttaacactttaaatgtgtgtccatatatttgatggaactaaacacagcattaattgagtttgcattggttgagaagataccgagaaatattatggtttctaatgtaaaatttaatttgtagttggtgacaaccatgaaatgctgagatgatacttgtttccgaacttcagctgaaaccagggttcacaatttcgacgaaaaccggtcgaattccgcgaaatttcgaaaattcgacaaggctcgaaagtagaagccgtctgagattttgataagtttcatcaaattcaaatttgaattgattaaaagggaaaaaataaataaaatcttataaatagt

SEQ ID NO: 3311 - DNA, 4271 bp, Oryza sativa
tccgccggccacccgagcgacctccgcctccgccgccgcagccagcccccgagcaagttctgcctacccccaccctcacccgcttgccaccattctcggtgccgtccgcgcggcctccgcccccgcccgccactgtctcccaaccccgtctcctgtcgagctccaccgacgagcgcgacaggggaggcggggctcgctcaggcggcggatggcgccgcgacggtggggaaggaggatcccgctgccatcgctgctgccacctcgctccacgtcttgccactgttcgtcggacggagccacctagccatacccaccgccgcttgctcgctcgcccaccacagagagaaagaggataaggtgatttatatgacatgtgggccctatattttttattttttttactgattggattttcacgtcggcgtcgcacgtatgccacgtaagattaaaaccactttggaagtgctcaggggggtaatttgtccggtatgaatacttgaaggtgtaaaatgtctggtttcgtggttcagggggaggggggggggtaattcgatcgagcgtgatagttcgaggggtaccagccaatttcacgtcgaggggcggaaatctaacaatttgaaaaatcattaaccggttcagttggtgagggactcagggctaggttttaggctttagcaagtctacccggctatgatttatgtggcatcaaaactttgttggaaagctttgagtagctatagcttctttcaaataaaactcttcacatagtctatattctcatgcatatcctataaatctgtagctatataattcagaaaataaattgaagtcaggagctagaaaaccaagatttttcggattcccgtataaaccgctcgtcagaatttaaacgcaggctataaaactcttgccgagagatgcacttaataattcagaggcagatgatgtgtagtttcaaccacgatgtcccgtgttcaatcctcagcacgctcacaatttcttcttaaaaaaatttgagtgaaatatatggccggtccttaaacttgtgaggtggtgtcacataggtccataaacttaaaaattgcatatttaaatccgtgaatttggtttaatgtaccacccccgtttaatcgtcctttgaccacgtttgaccgccaatgtagcatgccacgtaggcaacacttttatgctcagcccccttcacatatatcttcgcacataacttgccctgaccaatgcatttcaacccaaatccccaaaaatatccctaaatcgtctagggtttcgacggtgaggttagcggagggagaccaaaagacagtggttgtggcggtcttgcagtgacattagcggcaggaggcagcgcagtacagggtacagcaggattagcggtggcacactgcggccagatttgtgatgggaggcagcgcaatgcggcttgcacggtaggcatccccatggattctacaagctcaccctcgtcttgaagggccggaagaatgtgttgttgatcaagtgcccgttgtgtaaggatgtaaggataagtttattttggagtgtggagcaatagcaattgctaatcggaaccgcattttctatacatgcaaggagaagaatgagaggggagaacgatttgatttttttttttttggattttggtgttactatatatagctataagaagatatatgcgatgtgttgtgatgtggaggggactgagagcaaaagtgttgcctacgtggcatgcggtcaaacgcagtcaaaggatgtttggaccggggtggtacattaaaccaagttcatggatctaaacatgcagttttcaagttcacggatctaagtgacaccaccacacaagtttagggaccggccatgtattttacgcaaaaaaagttatttaaagagacgtctttcccaccaaatctcgttttataaatctcttgccggtgaaatatgtgcgttgagtgttccggaccagaacgttgctagagcgacataatttttggccatctcacaccacagtaccaccactactgctggggttaatctctcccctgcaccgttgtggtttgtctgttttctcgtacaagcagtcaagcagatgcaggcagcacgcatgcattggcattggccgccctatacggcagcaccggcggttgggtcagcacactgtagccgggtcaaaacccccagtaagccacgccaccaacgcctgtatccccagctgctgctgctgcgccacatgctctccatgcattgcaaaaccccaaaccccagctgctgctgcaatcctgcaacggcaacttcctctgctcctttctgcagaggagaggagaggagatccatcgcttcatcagcaagtgagcaaatgattatgggtctttgttttgttttcttgccgttgattagtagctgtttaatttagtacttacggggtttggattggagctcaagcagcaagtaccagctcacaggtaggtaggtttgtggtcaccaagccagaacagacagacacttgattactttgagctaacccctccctctccccagccctgttgacaggcaaatgatgtgatgtttttttaaggtaagacaatgatgtgatgttaatcgcggaactgaagcaaccgtaagccacaaccagcggtcccaaattcgctcatggccaagaagggtcagggaccagctgccagtaccatgcagcaatttctaacatctcacacactcattccgaaaggacaaaaattagtgagaaaagatagttacttctacagctctactatcaccaacttctaaacatcagcatggcaaagcaggagtataatagtaataagaggattaggagaatgactaggagaaattttaggaggtaaaactgccgccacataatttccttccctagaggcaacaacaatatccacctcatcattgggggtaaaagcagaccaccaactgcatatccagggaagtataaccaaccatccatctccaaacaacgggcaaaccgcctaccactgcatgtatgtcttgtccatttttttccctctcttctgaacaaaaaaaaaagctaggtgtcccctacgagaaatgcagcttgcccagcgcccctaatccgaaccaaaggcaaacaaaactaaaacagaaaagggatgtgcataggaggaggcagctaattacaaaatctgacagaagatgacgccccattcgttcgttgacgctttctgaaattatttgagctcgagatgcctgatgatgtcctccacttcttcagcatccaccgggagatgatcatccttggcgtcagcgttgtcggcgttggcggtcttcaactgggttttcggaagagagtccggcgatgtatcagccttgcattgcaccacagaagaaccagcaacaggttgtgaagcttccttgacttcagctggagcctcaaccttaaccggaggcctaatcgctggcaatggaaccacccccttaccgattgacactggttcgttccgaggctggagttgtacatccttaatctgaacagggatcgcaggtgacagcgcttccttcggtggctgggattgtacatcctttatctgaacagggatcacaggtgaaagggatcccttaagaagctggttttgtgcatccttcacctgaacaggcatcacaggtgaccgggtttcctttatttgttggtgttgcacatcctttatctgaacaggcatcataggtttcggcccttggactgctgaaggagtaaaaagaggaggagctggcctgatgcgaaccggggaagccattcgaattggcggcgggtggctcatgagaggaggaagctgttgtgtccgcgcacctgggggtgggagaggtggagcagagaaaacagggatagaagtcctgactgtgactggaggagccatgctatggcaaggcatacggaagtgcccaactgggacataaggagccgcctctgcagcggggaaccttgaccttggatttggactttcagttggccggaaaggagtctgtgatgctgcatcagacgctgctggcgactctggccttgaccttgaattagacttggggcgaaatagagggagaatcttcgagtagctggagtgagaggattgaggaaatgctgtcctcctctcgggctgcatcggaaatttctttgggaagggtgaagcatgtggattattggccatcgccatcttctccttcaggcgatagttgagaagagctcgagcaatcctgatctgctcctgctcatcattgctctc

SEQ ID NO: 3312 - DNA, 528 bp, Oryza sativa
tggttcgaccccgctgccgacttccatgactactccatctctggaaccccttccacctcgtgtaagctcagttcaatgtcaccatgacggccgtatacacttttgttttaaaacaaatagtagaaatagttacatcttccgtctctaccaacaaacacttgcacatacaataagcgatgggataaatccagtgttttaaatagcgggctataacatttagcagttgacccttctcaagcagctctagacggagatttaaaacctggataaatctaactcctacaaaatgaccacctgaattctgtagaagctaagacaaatcacatgtacaagccatcgatttgattaattatttggcaggatattcgtggacgagacgccggtgagggtgctgaagaacctgacgagccggggcccggagttcgagttcccggcgaagcctatgcggccgcgggggagcgtgtgggacgcctccgactgggcgacggacggcggccggaccaaggtcgactgggcccgcgcgccatt

SEQ ID NO: 3313 - DNA, 686 bp, Oryza sativa
  unsure (1)..(686): unsure at all n locations
aatcttcttttttttagaaacacaatacaaacgcagacgctcacaacgtgcgcacactcacccctataaacgcacacacgtacaccctacccctatgagcacctccgaaagactgagccgacatgtcttgaaattgacgagtcaccacaggcgcctcgctgtcgacgggttcgtcgcctaccactgaaagaataattagccgtaaatgcgagcacccgtgtcaaatctaggatttgaacttggatgggctggttccaccacaaggaacctaaggaacttttgcgagacgaatcttttgagcctaattatgtcatgatttgataatatggtactatagtaaatatttgccaatgatggattgattaagcttaataaattcgtcttgtagtttacgtgcggaatctgtaatttgttttattattagtctacgtttaatacttcaaatgtgtatccgtatacttaaaaactttatacccaaagcactaaacacacccttaggatttctttcttttaactttacttgacggagttgcattgcttcagctcatttagccgtatccaaaatttaaaatttgaaattaaagttaaatttcacattgatgttttaagtcgttaaaaacacctataaaagttgttcctataaataatatnttatcgctaataaatcttttggataatcagttcta

SEQ ID NO: 3314 - DNA, 1224 bp, Oryza sativa
taccatggatgcaatttgtctgtacctttccagtaagagtaagttttgcacaagttgggttttcaggatcaatcttcccacatgtcccaagagggaactcgctaagggtaaaggaggtcctttcatcctccaatgcatctctcgcagtgggatctagcgttgtcagatagaagtaggggattccatggctctcacctggcactccatcactatatgaaactacattgctgtatgtacaggaagcagggaactaagttcagcaatcagaaagggtttgtaaccatgtgcgttggttgttttcaataccaaaacaagaaatattacccaaaaggagctccacttagatcacttgatattgtgctgcaaaaagaaattgcatatgtgagtgaacaatcagtggacatctagcagatacattattaaaagaaagtcaaaacaatatacaatagtgttttaaatagccaactgcactcgcgtaagtattttttgacagtgactgctacgctattgtagtatcatgtaaaaaccagcgaaggcagctatgacaactctgctaaatccactaaatgctgtaccgctactcaatcaattagtttttatcaatttagttttattttgcctgggcttaatttgaaatttgttttcttagaaatcaaaactatttagaatcttgaatatccttgttttcacctgaacaagtactaaaatattagttaagaaactttcatactttttatgaactttacaattaatttcaagtaatacatgacacatatgagtaacttatgctctaaataatatggggggaaaaagctatattgaccttgatgctaaaaccatagcttttcattactagataaaaatctgtctggtatatttgacctaatgatgtatgcagacattaaaacgtggccagaggtttccaacttcacaccaatttgaagaatattgtctatatttatttattttctttgcgaggaattttgatggaactgtaagttttcgttatccaattggcacagtaggacggcaatttagcaaaacacctattcaattgtaaatcatgacactgaatgtcacacaagtaagggaagagcaccaccaatttctcaatactaagcagcctcaggcgattagattactagccactaccaacacttgcccgcgctaagaacccccaatttcgatcgaaccacccattgtcatctcctaaagaaccgaggc

SEQ ID NO: 3315 - DNA, 2327 bp, Oryza sativa
tattttaagtagatatataagcaaaaaatcatgtactcacacactgacatcgtatcggaataggatgacgtatcaaaattttggctagaatttttttaatatttataatagtagagatagatagtatgtgatgtatatatgcggtataaggttgtctataaccagatatgactcaacctattaatacgaatctaaacaggggacatgcatgagatatgacatattcatagtattaaggttgagtcacatccggtcgtaagtttttatattctaagacaaagagagtattatctaacaaatgtcaatcttctctctcatctttctctccccttcatcgcatactcccttcgcccttaaaaaacgaatctagtattagacgtgacacatcatagtaagacgaatctggacggaggcatgtccaaattcatttgtactgggatgtgttatattcagtatttggttggttttttatgagacggagggagtatgtattcctataagcgggcatcacaccattgttagtacctataactcaggagcacctctgtgtctagtttatatgaagaaattacgtgagagagacgtttttatcgcacatatatcccgttcgtgcaaataataattccacgcgaaaacattccaattcctcagtcatccatgcgacccgctgttagttttcggtacgtgttgctcagcatataccactatcaactttgttataaccctttttttcccctaacatttcttgttgcaattgcatttcgcagttttagtgtgtttcccatttaattacccagatgatgaaattgaaatgatatgggcaagggcaacaagtgtgcccattactccagctagaccctgacgaaaaacacagacaattttttttaagataataaaaagacagacaattagaaaaaggaaaaaaaagaaaaataaattcaacaagcaacttgtgacctgcagtgcagggcatgtccgatgatcacttaattaatttgtttgaaggcatgttccgacgatctaatttggaacttggcagagccacaggtggatacgactctgcttttgccgcagaaatatgtgttctgcatgtatggtgatattattgcaccatcaattccaagtttgactgatttcaagtttgtttgatgacattaattacaacgaatagagaaatgagctgtactactagcgatatgaaaaatgtggaaaatcatatttatctgtgatttgtgtttgtttttttttcttcaataaatatctatgaagccaaattgcaccataaaaatgggcgagtttagctgtatgcctgtattatacagcaaagcgatttagatttggtggcaataaatcagtaagataatttgcctctagtttgtgcttaataatgagttcacacttcaaatgctcagttgtcttacagtctttccattagtaccgtttgcctcaacttgttaatggcaaggtttattcgatcatggaatcatggatacgaaaccacacgaacaaaagaaggtttcacattttcaaaattatatattaggcattttcacgctttgtcccattaaataagtggacacagtctctctgaaaattaagctggtcgaccaaccaagctggccatgttcactgtaactgatttttttccatctccctcaaaacggaatgttaaaagaagactgaagttgaggaaacacaaacacaattcatataccacctcatatgtcccaaattgctcgaaaattcttcgcaatacattcatgtcgtgagagacaagtaaaatcatttgtcattttgaccatccctgctatatggctctcacacaccatacctcgctttcatatcatttctttcccccacaaaacataagacaaacttataatggacgcatcacttgcccgcctatcattagtcgtcgccctctctctttccctctaaaagcaacaaaaaggatgagatgtaaggcaagagagtggctaagcccgcgtgacgataaccacataccaacctctcatgttttcgagcgtgtgctagagagactcaggtggtgtttagatccagggacttaactttagtccctgtctttagacactaatttagagtattaaatatagactacttacaaaactaattacataaataaaagctaattcacgagacaaattttttaagcctaattaatctataattagagaatgtttactgtagcatcacataggctaatcatggattaattaggctcattagattcgtctcgcaaattagtccaagattatggatgggtttacataatagtctacgtttaatatttataattaattttcaaa

SEQ ID NO: 3316 - DNA, 3333 bp, Oryza sativa
gcggggaggaggggaggatgcggatggaggggtggctgtacctgatccgatccaaccgcctcggcctgcagtactcgcggaagaggtacttcgtgctcgaggacgccgcgctccgctgcttcaaggccccgccgccgccctcctcctcctcctcctcctccaagcgcgaggtgactctctctctctctctctctcgtactctgttcttaatccgtgcatttttggtgcccccgtgagatcctactggtgttcgtcccccgttccgcgaaattttagtttcggtttttaatttcgatagcgatttcatcccccccggtgtgtgctggtaggaggtagtagtagattagatacgctccggatgctggtcgttgtctctcccgagggggagttattgtttccgttttttaacggccgggttggttgagatgaatcatgaatgcttcatgctcgcgcgcggcgcggccagtaattgcaatcgcgtggttgattcgtcacgacgcagcgctagttgcttctgcgaattcagagtaagtgacaggatggttagagtggtacgacgattccgccttagctgcctcgaaatgttgccgcgttaggtttgcttaatatccctttcacggaaaaaaagaagaatggttgctgggacagtgaggatcacctaagcagtatggaggaatggaagtggagccaaccgtagcattgaaccaaaagcaagagatggttatagtaatggcatggtgtgagaatatggcatatgtgatagcgtgcagttgggtgaagtgaactctagagtggcttccatttctgtctaatgggagcttatgaagctgtcatatttcagtaacatggtgtacaattcaagtgtgttaagctctgctttctcagctccactcgttatgccattgctgcattgctttggggttcttaccatggattccaaggaaaaccagcaagtcattttgatgtgactgcatcatgcttacagaaggaaaaaaggagggcatcttttctacttcttcttctttttgggctgtggggtgttaagtgtgcaaacttgtatatatatggggagggcgtaatgatcatacataagttgtaccaagcctctttttttttttgatacggtaccaagcctttgtttgcaacatgaaaacctctacgaattgatccaatacctttaattagtggaacaagcctttttagaaaagaaacagtgcaaagtttggctgctccactcctatcaattccgtgttcttatgaaacatggtaccatgctttttgctaacatttcccttttgggtacaggatcctgttagaagtgcaataattgattcttgtatacgtgtcacagacaatgggagagaaagtgttcatagaagtgtaagcccatatttttattactgtttttaccatctttaccaaaaagttacacagacaacatttgattatcttcctcaccattttattgacaggttttttacatattcacactctacaatgcctctaatcattatgatcaacttaaggtaaccactagtgttgactcacctaatctgaccttggagctattttttttttttgtacttagtgaaaataagattagttctcatcaaccaatgcttttcagttgggtgctcgaagttcagaggaagccgctaggtggatcaggtgtttgatggagtctgccttaaaggttggagtttttcttatttattttatttcacacaatcattatgttcaaaaaagcactaacgtgatatctgtcatgtgagcagtccccaagaaaagatgagcatattgttgcttgttcacatagaagatggcaagcttttaggtaagctgctatgcagatcaatctttattttgtcaattactcagcaatggactggagattaatgcactgtttatttattgagaaatgctcatacagttagactcccccttttcttttctttcctttttcagtttataaagtttttcctctttttgtatcttttgtcactgaaaacaatatgcaaattgtgaaggctactgtcaaatgtttggcacacatttgataaagtttccaaattatctaccattgtgctagccctcttttttgaaaggcataacctcttgttagtgctggaaacaatcagtagttatggctgtatgaaatgccatgagatcatttagtttagattgaataattgaactaaataattctactgtttttaaatgggatgcagcacatgctcgtgctttcaagtgctctagatttgcttcaataaatggagatatataagagatcaatgatgcctatatgtaattttatagatcaccttttctttttttgtaaacatataattaatcatatgattgatgctttgttctgagtttgactgctagcatctacagtcctatgctacatcctctgttgtacatatttggatagaagtttcattttcttcatcacttggattgacgtttaattataataagaaagtacccaactgtccttgttctattggctaatcggagactatatctttgcaggctaagccgccgcagtaaccgcatgcactcaataggtaactatcgtcttataatgtactccctctctaaaataaacaaaattctagaaatgttataatcaagtttttctaataatggctattaataatgtatataaatttttcagcttgatcattttaaatggtatctttagattcttttcatgaaaaatcattttcacataaaataatcaacacatgaatattgaaagtgagagtaaaagtttcttcttggaggctgtaaaatggcaaaattgagtaaatattcttaaattaagggagcaagacgaaattatagtactacttttagtgattcaattaactatctttatttcttattttaccgttctgtgcaaaactctaccagattggactgtattttcttctgtccataacgatcctatggcatctgatgttattgcgccttctccatggacaatatttggctgcaaaaatggtaagcataaaaaaaatctcctttctttacatcactggattttgcgctgaatccgacttgcatttaggattgcgtttgtttactgaggcaaaggatggtggttcagaggggaaggtaattcttgttctcagaaataatgtgttgtgtggactgtggatggattatgaaattcaccatgattttgcttttttttttctcagtattgggatgatcatccagctataatggctgttggtgttgttgatgcgaattctgaggctgtattccagactgtaatgtcccttggtcaatcaagatcagagtaagatatatcatccctctttg

SEQ ID NO: 3317 - DNA, 510 bp, Oryza sativa
caaactggttgttgtcttaatttataatgaaccaatatgtcttttatgaataataggtggaggatatgtaatatcgccagtcaatcaaggaaaacaatcggttgtgaagcatatgcttgctatagattggaaattctggaagtcttatctgtttaccgcatctgcaaaacacatcactatacgcatgctaggaagagtagcaggcaagtcttgtgatgcatcaataaaccattgcctgatgtgttttatcaaacttcattctgcaaattttcatattattctgagctaacttacctttataagcagccctgcgggaattcttccgagcaaaaaatggaaattgtgcttgcatagagttctcgtcaggtgagttgacaagggatatgcgtctgcaacaaggtgaaaatgagcggataaaaatcgaaatgctgtcagcaagtgaaaataacaggctagaagatcctacagaaggatcactgggtggttctaatagacacttaagtagcgctg

SEQ ID NO: 3318 - DNA, 1616 bp, Oryza sativa
aaagaaggatctagaactattctggataccaaaaattgcctctatttttggtactaaagtttaaactagtgtgaatcacgctagctactaattgagttcgttagtaatttattatgtttctgttggttagcaatcttccattctgttctcagattcttctctttttctttttttccatttgtggcgtgcaggaagagccgattatgctcgtatgctcacatatatctcatcgcgttttaagatttagagtcccctttactatcgtgataactcctgtattttatctattttttgtaatatagtagtaaggtttgtcctcgtttctttgatttagtaaaaaatataacataattcacgtagtgtgacatatataaaccatgtgttatgtacacacacccaaaaaaaaagtgctccctccgtttctaaatatttgacaccgttgattttttagcacatgtttaaccgttcgtcttattaaaaacttttatgaaatatgtaaaactatatgtatatatataagtacatttaaccatgaatcaaatgataggaaaagaattaatagtacttaattttttttaaataagacgaatgggcaaacatattttaaaaagttaacggctttaaatattttgaaacagagggagtaataatgattctaagtccaattagcgtacgaagtgtaacatacgtatacacctaggatgtgtttagttcagcgcaaagtttgaattttagttgaaattgaagataatatgactgaaaagttgtgtgtgtatgacagattgatgtgatggaaaatgactaaagtttggatctaaacacagcctagactaacacgtactggtagttaactatagcagctgccgctatcagcagcaggaaagtcatggtaggccacggtgacgcgcgaggtggccgtgttgctgcgcacacttgcgtgcgtggttgcacttgtttaatccgcgtggttggtcgatcggctcgtccgccgcgtcatcccacgaccccgtttaaggtttccgcgtgatgcatgcacgtcggctttagctgtcaaggataacagtggtacgttgttgtctctaaaatcgcttcaattacttagttctacttttttaaaaaatgtttcttgtgttacaacggtgatgacattttaagaattattaaattatttttttttaaaaaccaaaactctgttttggaaaagaaaaggtcataacagataaaaagatacagcatcatcagttcaacactggtgtatggacatcctctgttcccctccagttatccatagtcgaccttgaccaaattataatctaagctctctctcttttgttggcagaagcacatgttcatagtaaagagtacaacaagagagcacgaagagaacagaggctgcagagcagaccaggccggctagacgagcgtccttcgagtaggcgacaactacatgctcaggaggcacaggcgataactggtggtggcccgcgcggagcgccgaagctgtcgagggaccacggggcacaagaggtcgcctcttccccttaggcagcgacaaccgtgcgttggtgtctcgaacgtacaggtcaagggaggatgccaaagatgcgaatgatgtt

SEQ ID NO: 3319 - DNA, 8706 bp, Oryza sativa
ttttcgagttgaactaaacaaacaccatgtcacatgcactaatttacggcgagaaattgagaattgaaggccagcaaaggcgagaaatttaaacacgactgcacgagcggcgccaacgaaaacaacgggcgcccgcctctccgcttattcgctgcaccacatagttaggatctacggagtatttggcatagctcagctccggctcggcgaaacagttcagctttaataaattagaggtagagctatggacccaactccattctagacggagttggagtaccaaacagatccgtagttttctgttttaaaatacaacaacatctgacaatgtgtatatatatactaccactatttcttttagagataatcccttatatgccactaaaaattggtctgatcccttatatgccattgaaaattagctattcccttttatgtcattggtctaattttgcgctcactttcatgccactcccgtcagttgactgtaggttgactgctaaatccaaagtaaaaaagacgtatttacccttctgagttgttaggcatgtcctatgctcagaagggcaaatatgtcttttttactttagatttaacggtcaacacacagtcaactgatggtagtggcatgagagagtgcgcaaatttggaccaatggcatatagggaaagagccaattttcaatggcatataaggaatcagaccaattttcagtggcatataaggaattctctctttttttatgattttatgtttgatcatttgtttaaaaaattatataaatattatttatgttgttgtgacttgttttatcataaaaagctataatattaacatatattttgacatacatatttacgctgaatttctaaataaaatgaaagattaaatgttatgaaagaaatcaacggtgtcattagaaaaacagaggtacttccttcgttcaaaattaatatagcaaaatttaagaatggatgagatacaccttaatagtacaacaatatctactgttgtattatgatatactccctccgtcccaacatccccttctagattgaggtttttttttttgggacggagggagtcccgttttatgttcttatgaagtgtagtatatattttaagacagctatagcacgtcaataccatcctgacaacgccgatcgaaacatcaaaactcggacgcgcgttggcagagcctggttggttggtgatttgggcatttggccgggcaagcagcgcgcatacttcctccgttaaaaaaaactcaatctcatattaggatgggacacattacacattctagtacaacgaatatggacataggatgtgtcttatccttttttttttgaaatttaggatgtgtcttatcctaatacgaggttaagttttttttttaacggagggagtaggttggaggttggaggcagaaggccggctggcacgtccgtttctgtttgggactttggacgccattttggcagtggtggtggtagcgcccgtgccagtgccgcaacgcaatctcgtttaccttctggcttcgtacaggtgcggcggcctaactcccaccatccaccacacgtaacacgcagtacatacggtcgcggggagggggggtacaatttggcgaagagcttgccaacacaacacagccgcctcaaggttcacgcgacgttgtattaccacggaagcttcgagctgtgtttcgtaaagctcgagttgggacctctttccccattgtacgcagaacaaaacgatggtttagtacatgattaattaagtattacttaaaaaaatttaaaaaaggattttctaaaacaactaattttcttttctctaaaagaacatatatttagcagtttcggaaatgtgttcatataaaaaaggagaaacggagaaatgagaagttggggaagtagactaaagaacacaaccttaatttatccttgtccagataaagcaggtgaatgatgatgtgtatgtacagtgtaccccacggatggcaggtaaccagtccacttgactaggattttcccctcgtgtcgtgtggttcaaagtggtggtgaagtggatggcgaaagcagatgcgctccgtccccggtggcggctcagatgctgagatgcccccctccctctctcacttggataaagttgatgtcgacaaaatgaagccatcgcgtggcgattacagctagtaatccttccgtcccattttaaatacaattgtgagtttatatatcaattatttgaccgtctatcttatttaaaacttttctatgattagtattttttttgttgttattagatgataaaatataaatagtactttatacgttattcttttataatttttttaaataaaacggattgtcacatgttagacacgaagactgactgctgtacttaaaatgggacacggatggagcactactgcaaggtaatttgtgctttggaaagccacagcccaagcccacaacagttagcccaggtacgtaaatgtagcaggcacaacatatatgggccagagttaattaggccatgtctggcaaacttatgagattctgataaccagcgggatatcactagtactactatctataaagctggtgaaatctgatgattacttggtcgttttcaaaattttacaactacctagtttcacgatatgaattgtttgaagatgctggagatttttagagtagttactacagttgataccagatgtcccagcatagggcttagtaagtttaaggtttcatgagatctgtttcaaacagaggatgcagtgtactcaaggaaaataatggattttttcatgataataaccttaaccctttctagaagtgcttatatttgtgaacggagttagcatatctgtcagaacctctcgatgcttcccaagaaccattaaaaatttcaacaaaccaacacattacgtcatcatctacaacaaaaaaagaacagaaagaactgcggtgagatgagacgcatatgatatgttctttccccccaaattctccttgtgctgtcgcagcccaaattgcactagctacagtcctagctgtcacgcgcgcacgcgtccgccctcgtcgtcgtcgtcgtcacggccggctgaacgcgctcttcgccgtcctcggcacctcgtcgaagctctgcaaccccttcacctcgttccacggcgagctcttcgccgccgcgccgccgccgccgcccagcagcggctccgagtccttcatctccgccatctgcaacacacaagcacactcatgtcactatgtcagctaggatcgataatcttatttccaaaatctgaaccttttatccacagtcaagtcattcgtaatgggcgtgacaattttatcatgacgtggcaagacaacattgtcacaccatttagattggtgtggcaacgttgttttgccacatcagattggttggcgtgatcaagaggtttagatatttttttttacgcaaaaaagggttcagatattaaaagctactccctccgtttctaaatatttgacaccgtcgacttattagcacatgtttgaccgttcgtcttattcaaaaacttttatgaaatatgtaaaactatatgtatacatatgagtatatttaacaatgaatcaaataatagcaaaagaattaataattacttaaattttttaaataagacaaacggtcaaacatattttaaaaggtcaacggcgtcagatatttagaaacggagggagtagtattgaaaaagtttgttttcaaaattaaaaattgaataagttcaaaatatatatatatagaaaaagtgagagagtagctagagtgaggtatggtggatggacctgggaggaagagatggggagaggaggggaggggccgtcggcgagcttcttgtcgcgggactcggagacggagaagaaggagtagaggcccatcccgaagatggcgacgaggatgccggcgacgttgcggaaggtgaaggggtccctgaggaggacgtagccgaaggagaggatgaggcacgtcttgaggtgccccagcacctggtacgtcaccggcgacgtcgtcccgatcaccaggaacgtgctgaagttcacgcacaccgcgatcgagcaggacagcacgatgaacgcctgcaattcaacaacaacaaccacaagaacaccatgtcagctcaggctctgtttgtttaagcttaagattattataatatagattattcaatcagattactataagctagattatagtaagctaacatagaataagttgtaagttgtttgtttctttgaattatttgaggcatctaataagggtagtgggtctttaggcacacaataatctgaaaatagctcctccagagaagattattagattatactccctccatcccaaaatgtttgacgccgttgacttttttaaatatgtttgaccgttcgtcttattaaaaaaattatgaaatatataaaactatatgtatacataaaaatatatttaacaatgaatcaaatgatatgaaaagaattaaaaaatacttaaattttttgaataagacaaaaggtcaaacatgattaaaaaagtcaacgacgtcaaacattttaggacggagggagtactaatctggattatagattataataatctatcataacaatctacttgtttgtttcagcttactcccaataatccagattataataatcctaagctgaatcaaacagggccttaatcacgtcaaccatggcggccgcgtcgacgtcattccttcactagcatgatatggcttgacacaccaaggtatacgtacgtaccacgacttggaaggtgtaggtgaaggcgaagacgtcgcggttggtgaggagcttgtcgacgaacgggccggtgacgagcagcacggcggactggtacggcgacgactggtacagcagctgcgtcgacgacaccttcagcctcctctggatttggttcgtcagctttagtttcgctccaggtgaaggagagacaataatcacacaaatttgtagagttcagagaacgaataatgttcagagtgtgacgggtttagttcctgattttagttcatttgagctagaaaattaaggatacaatctggctgacgcacgtcgcggcgatggtgagcacggcgatgatcgagccgaggagattgagctggagatcggtcaccgacgcgataccgactccaaggagcaagaccatgagggagatcttgatgctccggctgcaggacagtagtgttcagtgttgtgaattgtgagaaaaaaaaaacatctttggttgcatcaaagtcaagttgattctgtacaacatagtgctatcagagagtgaggtgtgaatttgacaatgacctgaacttcttgctaagaaagatggtttccaagagcatggtgaatggtatgatagccagcttggtcatctgcagagaaaaacacccatgatttcagaagtgagaaaaccaaaatgcagtgattggggtcagcaaagtgaatggtgcttgcctggtagaagccaactgagttgaatccaaggcaaaggttgaggaggccaatggagataccattgagcagcccgaaggagatgacggtctgcgcatcgatcggcttcgcctcgaagaaccgcagccgctgcgcgacgtacagcgtgcagaaggtcaccatcaggtgccagctcgtcagcgtcgtcgctgcattttccacatttccaaaacacaaaatgacattcagaaacatctctacacaccagagaccagacattacaatttacaaaattacaaccagtaaaactacttgacaaaaaatttgtcggacggagtacagtatctgaaactctctgaaagtaaaaaaagaaattttcactgaccgaagaagaagcccagggtgctgataaggtacttattgcagatgacaatagccaccgacgacgtgaccgacatccccagagccccggcgacgccgagcctcgacgccgcgccgtccgtcgccgacgacatctcctcacaggcgatcacctatctggtggaagaagaagatcccatcggtgaaacaaaaaggaggaaaacctctgttacaaaatcttgaaccacgcaattaaatacacaggtgaaagaagaactgtcccctcttgatttgtttttaggagagacgtgatctcggtaaggaaaaccgagcgttgacatggacggcagcgatcccgatggcgacctccattactgtacggctcaacctctgcgtgatgggggtgtggtagagagcaccatagcgtccatgtgaagcatgtgttcatggcaacattgatgaactcactattcattgctccatttctttttgcattatatgacatgctaccaaaatgtgacagggagaagtgtacactagtagaatctgaaaattgggttttctgtcatgttctgttgtaagatcgaggcatatgactgcggttagttcagttatcacacccaagtttcagttatcgagtgacctgaaattaacatgtttgtctgcttaattgcatatcctatattgacaatgctcaacagccaacaatacatgtgccgaacaatggggtgctcacatcacaagaacacacaaaataattggagtgtttatgaccatcttacgtttatatatgtatactcatttggtagatggtcacatcatcagcactgtgtgtgtggcagatggatatgaaatggacggatgcttcagcagttcaacgcttcaacagcacaagagatcaatcatcaatggcgtccaagctaactaccagtactcacttcgttccttaatataagagattttgacattttgcttgcactgtttgaccactcgtcttattaaaaaaaattgtgcaaatataaaaaacaaaaggttgtgtttaaagtactttggataataaagtaagtcacaaataaaataaataataattttaaaattttttgaataaaacgaatggtcaaacagtataagcaaaatgttaaaatcacttatattaggggacggagggagtagtactcgatcactatcgtactcttgactagtactagtactataattgacacatgtgatggtccaatctgtacataggagactgcatgcatggtcttcgatcgcctaatattgaataatttagttgaaatctgagctctagggctcttgatctgagcagtaatttgctatagccaaggtcattatttaatttgttcggcaggaagtacatttgggctagtaacgtatatgtagctagtcaaacgaggtagaggctgggacgtgtgagattcttgtccattattaggacaaggaaactctaatgtgcgtgtccaaggaaaatttctagggaaataaaatcctttttacctttctctagaacacttgaattcctaagtcattctcaaggcaagatctgctttttttttttttaaaaaaaagagaggcatcctgctaaaataaatgataactagtatggtggcttgcgcagattgcgcagctagcatcattatattttctctcatataatagcatatatgttttcgcattatattattcaaatatattaaaatgacaacataattttaaattttacaataactttacaaaactactaatgtgtaatattcatattgtattttatatacatgttagttatcaattatttttaatatcaaattttagttatttgtaaattatatatattcctacatggactgtagactcgtcttttaatatttctttttttagttccgaattttctgtaaattgtatttctatatagactctaagctcttcttctaatattatttatttttatttctgaatttttattatttctaattgtatttctatatggactctaaactcacctttcaatattctttaatttttaatttcgaatttcagttacttctaaattgtattattatattgactttaaactcttcttcccatgtttttcttaatttcgaattttagttatttgtaaattgtatttttatacggactctaaactctacttttaattttattatgtttattccaaattttagttagttttaaattcctatatggactctatactctacttctaatattccttatttttaattctgaatttctattatttcctaattatatttctatatggactctatactctacttctattattccttatttttaattccgaatttcaattatttcctaattgtatttctatatggattctatactctacttctaatattccttatttttaattccgaatttcagttatttcctaattgtatttctatatggactccagtctcctcttctaatattccttattttttaattctgaatttcagctatttctaaattgtatttctatatggactctaccttttctttttctccgattaatgtgagaatttctaggccatgagagtgaacgtggaggctcatttttctaatcctttaataatataatagattacgtaatttcttttgaataagataaatgatcaatcggcaatcgcatcttaaaaagttaaacgtaccatatatcataaaatggaatgagtacttacgcactccctctatccaaaaaacgatgtcatatatgattgatcacttatattttgggatagagggattattaaatatgatagctgagaaatttccatcgcgacggtcacccacgcccggaattaaattaggt

SEQ ID NO: 3320 - DNA, 3898 bp, Oryza sativa
  unsure (1)..(3898): unsure at all n locations
cctcatcgtccgcctccacaactccctcggcaacaggtccgtctaaaccactctcctttattttcagttttttttttacttcattcaggtctaaaccactcttcttcttcttcttcttcttcttcttctcttttcagtttttttttacttcattttgcactttgtttgtgcgtttgtgtggtaataaacagataattcacattaattttgtcttcacaagatttttgtgtctaaccattgtgtttaactgtcccatcaccttatggcctattctttttctctttttttattcttttcttccttttagaaaataaatttatggtcttgtttcttatggtagaagtcagagatgtaaaacattttttttattaaaaaacattgtggttagagtgttataagcagtttcgctgcatatttgtaagtaatactgtaaaataaaagtagtgatttgattgagatgtcgtggatgaatagtagtggaaaagatatgcaccagcttttcaaactttcaggtaggagtacagtttatcattgattggcggcgatagcctcctcctcgaggaaataaactttataccccaaagaagacaaaagcttgtgccattagtttaatcccccatttgcgaataaccaaatccagggctccagattccatctcgtttggcctttcatggctgccaatggtggctgcctgcctcctgctcatcctcatgctcatgctgatgcatatgcaaatcctgcaattgatatggctgctctgctgctggctgctttgctgctggagcatcaccacttgctcgagctggaccacactaaactgttcggctcagtgcttagctaagcttaagctattcatgatgataattgtgtactgcactagtgtccactgcccaaagccatatatgcatccatgatccttaatttcgtagtatactatagtttatttgcacatgagtggcctgccccagttgctgaattcaatgccaaagcatgattactttaattaatttgattggttatgtaattacaaagaggaggagaagttgtgttccaatgatgcactggatgctcaatctacctgtaactgttgcatttggaatcaaatcttttgctgcagcatcaaaatcttgcagattatacagacttgtttaacagtttgtttattacaaaagcttctctgcttcttttgtttttagctgtttcatgtgacatgatctgggttgcaattgcattgcatcgatcaatgctttagctagctcttcttgttcttggtgctcatggtgcttttgtcatttgttgccaacaggtggtcagccatcgccgcccagatgccgggtcgcactgacaacgagatcaagaacgtgtggcacactcacctcaagaagaggctggacgacgaacggaagctcgccgccgccggcggtggcggtggccgccggccgcatacgcgcaagcagcccaaggcggcaaagagcgccgccgccgtcaagcgcgaggcgacgccgtccgtcagcgtcgacaccagtagcggcgtgacgtgctccacggtgaccgagtcgtcgccgtcgtcggccgacggcgaccaccggcggcagcagcagcaaacgcagcatgccgctgtcaaggaggagagcttcagctcgggcggcgagctgccggcggcggcggcggcgcccacggcagcggccgacatggacgagagcttctggtcgtcgacggaggtgaccgggatgatggccggcctcggcgacatggacgaggagctggccatcgccggcacgtcgtcggcggcggcggcgaggagcgacgacatggagttctggctcaagatgctcctcgagtccggcgacatgagggatttggccgtcttgtaatctatttaatttaatcatggcagaattaagcttgattaaattaattaactaccgggaagaattgatagtatctcttctctgttgtttttttttaccttcttttttcatcttttttttcccagtttccagtgagaaaacgatgggaaattcaggtgatattttcacctttgttagaaaaaggaatactgtagtagtagcaaaaatttctttggttcgttatcagctggcttcagaattagatgcagtgcttctgtgctttgtacttaattaattaccctcgaaatgagatggttaatgttattagtagctttgcttagttaaatactgctccaaattgactgtaatggctgattatgtctcactgtgtatcagttcatggctggctgttgtattaggcttatgttttaaggtgttatacagatgtttacagttagtttttttttttacaaaataaactggggtagaaaaatatgttaccaattgccatgtctctccgaaggtcgaagattgatattcttggaggaaaataatactatcattttgcaaatccaataaaaaggacctttacacacctcaatgctgaaccaaaccatccaaaaaacagttaaacgaaactatcacaatggccacctcaatgctcacgtagcatcaagaagaaatctcaaaagattttagaaacggttaaattctttctgtgagtaacacatgacaaacattttcgcagcacatgacaagaaaaaggttgtggtaattaattaagggtttgatatcctgtcatgtacagtactccaagatgtttacagagagacggagattttttttttatgaaacgcagtacaaagtacaaacacaagcgtggaggaaatatttatgacttagcaggggataatttgctttaatcctacgtaactataaattttgtgcagtaaaatcatgttatttatatgtgatttcattagaggtttcagtatattttttctgaattttgtatggcatggttacctcaaaaaaattatatataagaaacaacattaataaagggtgccgagtactgaggatcggacttttggtatcaaattattgtaaaatgaaacaaatcctcaagttaaacccaagattcagactacgtccacacctactgaactggcttattgaacatgtacttgctgctaattttcagaaactaattaatctcaaagctcaatcaccatcggaacgtacagtgaggtattacttatgtaggtgtctacgtacagtgtacttgctacaaagaagaggtgtatatatatatatatatatattccatcaaaagtaactgaatatttcaaatgctagacttgaacataagattctatcaaatcatgatcagctggcttaccttattaattacaaaatgtcaatgactaacaaagcatttttcacaaaatcaactatgattaactaattagaccggattcttggttgacagtttcaataaaaaggcatcactagatcacaatgtacgggttcacaataaggtgaataaaatgtgaaggtgacatcagataaaataaatgttctcgttgcttttatgctcataattattgctaagtcagagaagaattagtcatgttgctctctagataattgatcctagctgcaagtaaatctgtccttagatcactagcagcagctaattcacaactttcacacatcttttgggttaaagcaactatacactaattaaccttagatcagctgacgctctctctcctctctctntctctctctctctctgacgacccttggctaatttctttggacgaacacattacacacgtacagctagcatgcataaactgacagctgaaaaaaaaatacgtgaaaacacaacgtctccgtgtcatcgaagagattacaaaaactaatgtgaagctggccatgatcgatgcctgttcatcaacgtttcattctttcaaagatttccaagcattcttgaccgaccaagctaatggtcagctgcaagaacaaatgtctcgctgata

SEQ ID NO: 3321 - DNA, 11800 bp, Oryza sativa
  unsure (1)..(11800): unsure at all n locations
tgaataagacgagtggtcaaacgttgcaatcaaaaactcaaaatcccttatattgtgggacagagggagtacacaactacaatgatcgaacaacacgatcatattggattcaccgatccaaccgaatctaatggtgttttttctctttttgctaatatggtactaatttgtaataaatctcggcggtgacttgttttctatctttttataataataaaagtatattacatcctttgacttttataaacaataacaatagatatataatttgggtagaaattgatctataggagtaccttctaactccctttattccacaatatagctactttagtggtcaaattttgtcttgaaatataattaatgaagtattgttctcctaccaaccatctctattggtggtattcttttctcctgaagatgaatattaagttttttacgtaaaatgaggtggtattaacatatgatttattgatttttaattattactccatctgtattttaatgtatgacgtcgttgactttataatcaacgtttgaccactcgtcttattcgaaatttttatgcaaatataaaaatacttatgtcatgcttaaagaacttttgatgataaatcaagtcacaataaaataaattataattacataaattttttgaataagacgaaaggtcaaacgtttgtcaaaatgtcaacggcgtcatacattaaaatatggagggagtacaaacttgaaaaatagattaatatgatattttagagcaactttcatatagaaagttttcacacgaaacgcaccatttagtagtttaaaaagcgtaccacgaaaatcttaatgtttatccaactcatgttggagaagagtttctacccctatatatatatatatatatatatatatatatatatatatatatatatatatatatatatatatatatatatatatatatatatatatatatatctttggctgaaaaaaatggacactcgcacaacactcgtttctaaatttttctcctctatctcgtcatttcctctcttctctctcctaatcttttttagtaacggtgaaatctaaattttttttctagtaacggcaaaatctgaaaaatctcttctaagactcaaaatcagatgtatgttaggacgaatggaataggagaattcatgaataaattgtcttcttagagaaacatcaccgcgcgatccactgcaactttaacatagcacattataaccattggatcgatacagccactattgcatactattcgtgaacaatattttctaatgatctgagctgttggtttttgatccatcagctaccttgcaactgctaaagttgcagtcatagcaacaatctcaaatccccgtgcaccgtatcagccacatccagccgacggctccttggctccatgcaggctcgtcgccaggcagcccctcaaaatcgagtactagtaatagtagtcgactagtcgtagtctgtacgtagactgtaataggttgcggcaggtcatacaattcggtcacgtcaattcgcttagtggtgcacaacacacattcaggttcagacaaatgatcccttccacgaacaaaacgcaacacgtaatcagcacattttttttcatttttaatttttttttaacatttacaaaaatattatatcatctaaaatataaatttacagcacatttttttgcagcaaggtgtgcacattttacacttaggtcccttgccgccctctacaagggcttcaaaggggtaaatgtaattttcgccctaccaaaaatgtatttttctagttttttttcaacttgtccgtccctcacatcacgtcaccctaccgccctctaccggagagggcggtagggtctacttctgtaaatatttttaccggtacaatatttctgtaaatattaaaaaataaaaattttaaaatgaaaaaaattcagtaacagcgcgactcacgtttccatgggccatgtggcagaaagttcaaccaccagcccaagcccgatgcagattatgctttcgcaaaatgtacttgctactggtccatgattccatcagatgtcaaatgggttcaatgttttcagcaaatgtcctgcgaatcaccaggcaaaaaaaagggagctagtacaaagcctcaatacacactggagtaaaaccagcaacggcatctgcgctccacatctcgcgatgtgcagcggtctgagataaacagtttctatgtgatggaacttaaaagtctcttttattcaaaaacacgggagcgggcaatcgctcactatctgtccctctgggtattgcttagttttagttgaggcatgagtaagcgagcgtcttctcctccgacagctcctgggcagtcgcgtccatcttcttccttgagaactcgtcgatcgggagacctgtaagaaacgatagatcatcaggcatttgtaaactgttgcgacataatcagcgcaatactctatacattggcacattttaacagacagcccatgaacatgtagaaagaaggtaagcaagcataccctgaacaatcgtccattcgccaccactgcatgttactgggaacgagtagatcagaccagcaggcacaccatacgaaccatcagagtacacacccatggagacaaatgttccctgtggtgaaaagttgaacgtgttgatgaataattaggaccgaattgagggaaatgtctaaagtaaaattaggaggaaaagacatggaatgtcaaaaggccaaacagacctcaggagtgccaagaacccagtcacgaatgtgatcgcatgcagagctggcagcagatagggcactggattgcttcctcgccttgatgatggcggcaccacgctgctggacggtagagatgaattccgtatttaacctgtttgagagaccaccattaaatccatatgcaatggaaatatgaacaaaaacaaaaactacttttttttaatatatgcagcatttctgatttaccactcatcatcagcaacgagttccctgacaggcttctctccactgggagtcttcacagtggcgtggttaacatcagggtactgggtggatgagtggttgccccagatgatcgcattcttcacatcagtaacttggacattaagtttttcagagatctggccaagtgccctgttgtggtcaagacgggtgaggcaagtaatgttcttctcagggatggatggagcgaattcttttaagatgagagcgttggtgtttgctggattggcaactaccagaacctgaaaaataaaaggtacagccgaacattataaatctctaattagaaagttgagaaagaattaacttcacatggatttacaggcaacttcaaaataattgaatttgataagtgctttttcaagtttaaaataattgaatttggtaatgcataatcaaataggaaaataatggagtgatcaatctcataaactataaatgatgataagactgaattattatgcattatagcattacatgtgattgctactcaaggtgagagcaatgctggcaacttgacaatcattgcagtaaattgcaaactacatttgaaatatttccataccttgcagttaggggctgcatgagcctcaagagcagaagcttgggatttgtagatggagacattttttgacataacatccttcctttccattccctccttcctggggaacccaccaaccataaccgcaacattcacaccagtgcaggcctccacaacatcagttgttgcgacaattcctacaacaccaaaacagaaaagtttaaacatcagcaaggatgctgacagtttaaaaacaaattgagttcaatgaaccagcttacccttcaaaagaggaaatgcagcatcaaccagctccatcttaaggccattaagagattcagtagctggtggaatgtcaagcatgtgtagaataacaggctggtcagcacccaacatcacacccctagcaatcatggggacaagagcatatccaatttgtcctgcggaataaaagaatgaattagctcacaaaagaaagcccctgggtgcaaatttcttaagacacacaagcaacaatggtattgcattccatatgaagtgcaaaccatcagctttcaaatactgctacatttccagatgagcataaaaaaatacatttgttttcatgctgattaccatatcacctattatcatcattcgtgaaagcacccaaaagaaagctagtggcccctcctcagggcttcacctgatccaacctggctaagagtgggattcagagtgtactaaccaacaatcagttacatttccaatgcccgagctcctaagtggagaacaaagcacccctttccacgtacaagaggacctcagaccacattacaaaagtgtttgtgaagtgcacaccacatcagattgaactaactaattcaattaattgccagctaggttcccatctggcataagcatacatcagaaaaatgaagctttcataacaatgaaggcaaactagtttaagttaacaagacagtgatagttttcagctgttgaaagaaaatatttatagcaatttagcaattctaactatggatcacactagacaagagattagaatgagatggataaacaaaaaccatttatatcttggtttaagaaccccaacttgtgtagatcaatttttagcacgagcactgctacacatactaaatttttcttactaaacttttactaacaatcatctcaaccatttgattttagtagatggaagttataaaaaatttagacgcactcatagcatgacatatcagtgttagtaataagaatttagtaagaaaaagttagtatgcatagccttttccttattagtaccctacaatttggtgctaatcccacttattaagcatgtgcaatgcaatttaattatttagatttaaatgtttaaatgccaagatatcctgccaaatcccagatggagaatctacgacggaattttggatcaaagtcactatcactatatggatgcatgataatttttgcagttgaatcctgagctgggataagacatgccagaacttgacggaatacaaacccgatcccaaacagttttgtggggccaaattgaagggacacaccctccagagctaaactaaattaaatgcatgtttcaagacaaacatctcaagttatcagtgtatgtctttgagaaccaagctcacaactgtgactagctcccatcggatcatttgattaacagattaataggtaaaccctcctaaacccttttaacctataagactaacctcccacctctaactatggaatcccacactcccactcatcaaatcgacaccatgatccatttcaaaccactcaaacccctacagatcaaaagaaatacacatggatctccactaaacccccactaaaacctcatgcacagacttaacacaaactcgagtcaactatcacaaactaagcaaaatcagtcccccgaaaaccagatcaagcgaccataataaccagatctaatacaacccaccatcagatgagctcatccaatccacgaaccacaaaacttagtaccgaaatcaaatcacgccagtgaccttctcccactaaataatccgcaccccccccccaaccagatcaaccgccacacaacgagatctagctatctacaaccaccacactcgaaaccctccactggatcggcgcggatctgcagccagatccgagccaccgccccccgcacgagatcgcgtcggcaaaccaagagaacgagggggaagtgaggcgagcgcgacgccgtccgtacctgcggcgccggtgacgagcacgcgcatcggttccttcgccattggagcggaaggggggggggagcgggagcttcgagaaggttctggaagcgtaggggttagggaggaggaggagaggcgacgctgctcttttgggtgagttttgcgagagagggggaaacgggtggccgttatttaacctcgcggcgacggggagcccggagaacccccgttgctcccacgtgggggctcccctacccatctcccactgacggtgggccccacctaggtgggtccacgctgtcggcgacggagcgcgtggggtgggtgggttggagccaggtgtgcgcgggcgtgacaccgtgggcgctggcccacagatcggcgatgggatctgggaaacctgcaacggagacgctaacatcctgacaggtggggacacgactgcgcgttgtggggacaggctgtcagtgatgcaggtggggcccacctggcgtttcgggagaagatgtggccgaaattctttttttgtttttggactaattattaaagtttgcaccagaaagtgtgacgtcgatgccgtgtgggggaagaaaagatgctccgttgggaannnnnnnnnnnnnnnnnnnnnactcttttcttcttccttgggtaacgacgatcatgacatcgtgacaaccgccgtatggagtatttcagaacttatctacgaaaatgtgtgtttgtggatcgtgaggacctcaagtgttcactgaaaataacatgtcattaaaaatatctatcttccacttgatcttcgtattagtgatgtccgtagaacgagtggaattttggagtatacgaagttatatggactaaaggattgtttggatggagactagctttactataactgtagtaaaccacacaaaggctgtgttcgggagtgagggttgggtacccgacacgtaaaacgaagcagcgtctagcgtgagattaattaagttttagctactttttttaaaaaaaatagattaatataattttttaagcaactttcgtaaaaaaatattttgcaaaaaacacaccgtttaacagtttgaaaaagcgtacgcgcgaaaaacgagaaggagaagttgggaacatgtcctatcgaacgtagccaaaatgtggccaacaatttgttagccacaattatggcaaactttggctagaaaatgacaatataacgcacgggccaatgtgctaataaagtgtagcttaattcaactgtgtctaagattttggtatagcaaattgcggtcaccaaccaaacaacccctaaattaagctacagaaatatttttacactacaatgggtggcttcgttgaaaccaaggtttgaccatcggtcaccatagtttaccaccaaggctaaataacgaaaaatgtttgttacgaatttaaaaaagtttttaattaaccttttctagcattttagcttttatctgttttgctcggtaactaacctattaccgaggaggggtacaacgatgataagggaaccactagttgaagatgtcctatatatatggctacacaacaaatcattatcatgtcaatttgtttcaacttgacttttattaatactaaccaagtatgtgaaggaggtcaggaattgactatagtgatgaaatacactctataaatatttaatgtttattagtataagatttggctaacatttaaacccttgtccatcgataattttttaaatgctcttttttaaaaaaaggacaactggtatgcatgaatttttcttgaaaaagtactatcataataccgtatgcttatttcattttacaaacttatgctgatgtaaaattgatggtcaacatttcaaagcctagtcagatcctattctaaatgtcaaatatttataatcggatgaagtaataactactggccaagtgtctccaagacaagactgtaggggttcaaaatttgagacattcaatacccaaaaatatcatagttattgtattataggaaaatgaatggagagaaatatgattgatgaatagtagaggggatgaccaccaatccaccatggggaaacatttttttatgctgagagaaagaaatactagatattaagattaagaaattaggaggttcacttgttgtaaatgtacatcaattcaatactgctgtcccgtctgcaacaaactcattgtgaaggaattacaaaggattgataaaggcaagcatttcctttgtatccatacaacttaaatagggcaaacaatacacaatcttctctctctgtctttcaagaatcacaatcattttaaggttgtgttcttttcccctctttcccaaattacttccctcgtttttccacgcacacgctattcaaactactaaacggtggatttttttttgcaaaagttttctatatgaaagttgctttaaaaaattatattaatatatttttttaagtttttttgctaatatttaattaatctcactataatcgtgtgtttcgttttccgtgtcaggaggcaaggttcccaaccttgcctcccgaacacatcctaaggcactatggagattcaactcatataatagaattgatactacttcatttatcattctcaaaggtaaaaaaacaaaagattatactctcaccatttttaatatatgacaacaataactttttaagatacatttagggagtatcttaaaaactaccgcaaattttttagtcaaaaactttcatatataactataatataattgaaatataattaatacattgtaactatattgtaattatattgtaaccacgatataacttactagtaaaacgtacattcagctatggtttcattagctagcacgtgaatcttatacgtcacatgtgtgaaaatttctttctagcaaaattttccctttatgcacaaatctgaaagttttgagtgcaaaaaaaaacttgcggaagtaatttgagtgagaaaatcaagtgagagataagaaaaaaaatctttcaagtgagatatatagagatatagcaaaatcgtttaactattcacctccatcacaacaaaagcacaatctgaaagcccatgaaaaccgaacacaaacggcctaaaagtccagctaaggctcaatcaggcccatccatcccgctcggcccactaactcctccacactctcttccttcttccgatcgccgcagatagcgcacgccacctcccctcccctcccctcccatggcaacgccaccaccgccaccgccttcgcctcgtcgcctccgccgctagccgttacccccccaccaccggcgccccctcaccttctccccaatgtcgacggcggcgcccgcatccgctacggcggctgcgagcctcttcctccgccggagtctctcctcctcctcccctcgccacgtcttcctgcctcattgggttgcccccattgtcgtcgcgcgccccgctaggtaaattacgcccgcgttgttgggataattggttccgtgcctcgtgaaatcgtagcccaacgttggtagagttcgtcggtttcgcacactttattagttgtcggtgggggtttgcttttttttttttttacaagcagttgttaattcacggtaaatcacgatgaggaaaaaaaaacaggttatctgcggtgccggcgaagcgcggtggaggtggtgttgttgcggctgcatcggcggcggcggggagcgcgcagtttggcgccggggacagtgagaatccatacgaggtagaatgattgggttattgggagtggctatgttcatgtttaggatcagccttcgttggtgatcaggtgattcagtgattggatgtggctcctggtcttgttgtgatggttggtccctgtttgttagattttggggatcagtccacttgatgggttcgaccaggtgaagatggcctataagcggaggcgaaaggatgccgagagcaacaaagatgccgagcacctgttcaaggtggttttgggtcatgggggttcagaatttggttactgttgtgttgttaatgtattgatgagtgatggagttttgtcgaatttcagttagagagggcatacgatatggtcatgatggagcagcttcagaaccggaagaatggggtggcatatggatcaatccaggttactctctactattatttccttgtcacattgatgatgcatggtctacagcaacaaagtttgcacttgcgcgttactgccctttttttgtatgtgctccaccgtttacggtagcactgttcaatcccatgcagtcggcaatttggcatatgtatccaattagagttagatatgaggattcatattcacaaaattgatttgtaattgcaaaactgatttgttctgtatatggtaacagactgttaccattcgtttggtactccttggttaaattccttcatgctaaaataaacacatactgatatttactgttgagcgacgtagtttgagatgcagagatatctaaccaagcaacgcattgcctgctattaagcttgatggttactttagcatggtgaatttgacggagatcttagatgacttatcttgcatcgactcttctagtctccttactggagtgaacttcatgagacctctgtcggttgccatgtttaagaggatccttccaacatatggctaataatgaaatgagtctcatgataattctctattctgatgttttctttcactgattattcagttctctttctgaacattaggtgtcaaaggacattaaatatgctgataatcaaccagtggttccttgggggcctaggtaccttacagttcacattttgtaaccaatctcttcatgtgcttcttcaatatatactgtgtacattttgttttccaatgcatctatacactatgaatcttaggagacttaacagacttaattcttgactgcaatcctgcatccatgaattgggcatccttgttacttaatgcagttctctagcaaaacttgatgatccaatgcccatgcccttattgtttttaaattttaacttttctctagcataactgttgattattcacatgttagttccaaatattaaaactctgggccactggaaatatcatcacacattaacacctatccacttctttgttagctttagtgctatgctattgccatttcatgatcatcatcatgatcatcttgcagatactcaagatccactgggaaggacctgcgcattaatatggcaatatcagcaacatttgtaagaaaattattttctgtatcatcccaagtaccacattgaaatattaataattactgtttttaatcaaacacaatgttttatgaatcccagtggattgttcctctgtactcaactttgttatatgcattggtgttaaacttgaaattacacaatagaaaataatttgaatttcagcattatttcacataggatttttttaatcatcagcttgccaaacttcctatcttgggcaagtcattttgtgtatggagaaaaggtactttattaatggacatttttttatccttttttttttgcagatcatgtatatatctaccatgggccatgcagactggaagcccatgcagtttttgtgttttgcctatttctatcgaatacttgacaaactgaaggctaccgagtcagctagcactcctatatacaatgtgaggcggtttactaaataattttatttgctgttcccttttcattttctatggaatccctgcacttacaggaatgacatatcaaataatcaaattggttcagtttgctttactctattgtagttcagatatgataagagcaaaaggtacactagggaaatggagctattagatgggatggaattcttacttttcatgagttgggaatgcatatatttgatatatgtggctccttttttagttacaaagttacataagtgcatgcttgtcttgtattaaggatcttagattacttggtcactagtttttagctttgcagtt

SEQ ID NO: 3322 - DNA, 3072 bp, Oryza sativa
tgttaaatataatattgaaataaaatgtttgtggcaggagtatggtgaggttgaaggtcgtggcatacacatggcaaaacgagtactccgtagtttgggtttggtacttggatcaatacttgctgtatccctggttagtgggttgttcggatacagtgctatctagatgctaaactattggtttatctgccagttttctctactgtttctcagtattcgtatcctcaccctaatgttttatccttttcagggctacactgggctagccaatttttctcagtttcttgggcagtatattccatctgttgtttataacttccaggtatgttatgcttgagcatatctgatgttgtttgggattattttattggatcagagtgccacatttttatattcattcttgttaccaagatcacatttacagccccattgtttcgcttattcggggaataagcgaaacggcatatttgcaaacgaaaaataatgtgtgaatagaacttttatatacgtgttcttagcgatctaaaagcaaaggctgaaaaataaacttcgttaaaaaaaccccaaaatcaaatccaaatttaagtttgaaaattcaaattttgactgataagcataagcataagcgaaaagatgaggccattaagctgataagttccacacttaaattttctcccatttgctaagttacacacttaaaaaatttcacttctgtcataaagtagaaactggaaagttgttagtgtttttaaaaagacagacaagcctcctgaaaataatattttttcgctggaggctaaaagttaaaaactctaataagaatactggagtaagcaataagtgcaatctctttttctggtggagaacatgtaatggaagaatgctagtgaatattgttgctgttgttttcaggtgaagtaaaactaattggtggctatcttatgccaggaattgattgtgactacagcttcatctgttttgctttgcatattggcgtcgtactatcgatagcaacttgtgtaattgtgttggatcaccccttggcattgcaatcttgataaacctgtcttcatgagggccatggtcgataacttgagcctattctgctatggaatatgagagcccatcaactatataagtgcactgttcttgcatgttttacatcgttcttacatctggaaaattttgcagctactgataagatgttctatccaatgttttgaaactgaaatttagcatgcaagagacagacagctaacaaagcaatgtgtcacatgaaacctgacgatgctgaaaatctagttctagtgagttgttccagcaaaaagttaactgcaattttcctagaagtttccttgagtttgcaatctgcttgcaagttccttgtatatttactgaacaattactctgtgttggtgagttatgaattacaacgtccttatggaatctgcctacttgatcatggaacctcttttgctttagttaatcaaaactaaggtacaatgcctcctctctcactctccacatccaagggaggatgccattttttaatggccaaataaatctggaattggcatgagaaatcggcatctaatccagtcctgaaaatgaacaggatatttaggaaggttaaacagtctacctaccaatctgatctcatacatatacgtagtgatgtagcagatactagtcagcacacatatttgttttgctctgtatgcttccactatacctccttttttcttatgttgactttttagacacattgacaattgatttagtgctgacacacgtttgagttttttccctgtacgagcaaagtaacaatatggaagtatggaagtcaatcactaatatcctatcatttgcataatgctttatagatatatatatatatgtttttccaacagagcattcaaagttttagaaatttgaccactgttttccagcgtctgtcgaataactggcaatgttccatacattcagtactttttagataagacaagtgtggcctcttggcttttaagatgtacagcttgcctcccaaattttagttcgtactattagtgtcatctaataatgcatgggacctattaacatttacagctttcatgtcaggctgtagaacggccacaacttcatctgagaatatcacccagcatacacatgttctccccagtggtgtttttcaatccagctgcttcgtacatgcgccacacaccatctacgattgttctgttccatgccaatttttgaaaccccaaattcaagattcttgaccggtgcatgtccgtcccgttatgtttgttggcttcagcatctcacacgattcacaggtactcatctcagcatttaacaacaccctgattagtccttttctcttaagctgcaataaccgaggagcttacactaaaaccgagcaaattccatgctcacacagcacacacacgcacgtacgttaacatgcttaatcaaacgctttttcatcttgtctcatgcgttttgaagctaccgttgtagtggtatccttgtcctcttcgaacgatcagaacatgggcgtagtgctgggacacacgagagcacaagcacatggaacaaagaactaattgcgatgttaattaatttaagaaatgctgttgtgttgtcattgtcctgatgatatgggtcttggttggtgctattttcatattttatggagtacctgttgagcccttattttgcagaaataaacaggatgaacacgtgtccaaccatctcgaaagaaacaaaatgaaatcaaagtaaattgttttgtaccggaatagaagttgtggattcctgctgcggcatcgtaaattggaaggaaatgcttgtaaatgtctttgtcagaatctatgagagcaaaggtctgctatactatttgttgccccagatccggtgcagttcctacttccaacaaatactccaagttaaacaaagagaagctaggtatgtaagcaaactataccacctgcacaaatacagttttgcatgaattaatttatcctatttcacagtatcgtacaagcacatgcattttttaacgaactaaca

SEQ ID NO: 3323 - DNA, 9316 bp, Oryza sativa
atttttcttaccggggtctggttttggtttccttccacaaaaaggaaagcactgtttctgcacggggacatcgtccatgcatgttcattgaactttggttggcaatgtcgtggaagatgaatttggaagaaacaggaggaggagatagctacctctccggcgaggaaaaatctgtgcaaaggtccccatcgatctcacgtgggtgtgtggagccaaggagcccaaagagtcggcacacttccctttcctcaagctcacaaagagtccttttcgtggctggttgatgtgcaattctggtgtgaaattatgtattcctccaaatggtaatttttcaatgcgatctgatgttaaacgtgcgatgaggtgattcgtgttaatggttattggttactgattttgagcctgtgtgctggattgattaaaatttatagattataatattagcaaatagtaggtgaaaagtacgttatctaaataattttacattattaatttatagaaattttttagtaaatcattttttataagtgtaatgcgaatattccatacctccatgaacttagaaagaacagtgttttagtagagttgtcagactattgaacgaacaagatagaaaagacgcggcactcatgccatcttaaaatctaccgcttcctaaaaaaccaacctcgcactaggatacgatatatcctaatataatgaatctcaacatactatatcagattctttgtagtaaaatatatcacattatagtgcgaggttgatatttttttttacaaagggagtactccccttgtcccctgcaaaactaatttttgggttcccggctaaaagttgttttttttatgaaacagaaagaaagagtactcacttgtctctaaatataaataattttagaggattgatgaagggttgtgttatcgattcgcctaagattgattataagccgtacaatttattaacaataagagtaatttatggataaaactttatatgtgttcttagtgatttaaaagccaaaggggaaatataaactttgattaaaaaaaagaccatcaaaatcaagttttaaaaatcaaatttgttaacggcttattagttggagggcaaaagatgggagccaaaggagatggaattgaatgatggaaaattacaattgggtgaggtgagtaagtaggtagagaaatagatatatactttctccgtctcatattaaattaatttttagctcctttcgtttgtcttaaaataagttcatttttagagcaaccattgcattgcaatttgtgaaagtagggattagttgtattgagagaagataaaatgaggaataattatattgtgatttgataaagtaggggtattttagtcttttttgattttgtattgctacgtgtggaatgggtgaaaaatgaatttattttgggacgaaggtggtaagacaaatttggaactataaaaatatctatgttttcttgtaagaaacggaaagcattgtttgaaaattttcggaagcgaaaacaaatttgaaactttttttgtcgaaaactgaaacagatacaacaaggccactacccattgtcaggaagccgaatcggtcagaaaatttttgaaaaattacctggaaattgtctcaaagtatgagacaaagtgatatgtgaactgtgatgttatccttatgaataaagtggtatttgttagttgctaaaatctgcaatttttattattgctgaagaaaaaaattaggtagagttcggggatgacttttcctaacctcaccttcaactttttacgtgcacgcttttcgagctattaaatggtttgtttttttaaaaaatcatactaatttagttttcaagttttttagctaatatttaattaattatgtgctaaagagctatttcgttttacatctaggagggaaaggttctcaacttcacaaatcaaactcggtacttgaaaaccttcacaactaccttcacaatcaactttaatgactaggctaacatattgttttcgatgagtcatcaaaattattaccttgttatcaacatgttcgttgtctagaaaaaaaaaataatcataaatacaagcacatgtactaagcctataacttaaattcggattgacaggtttctccacaagcggaaactagtaacgggccgagctacactaagagcgtgtccatttgaagcacaatggcgagaaatatgtccttcgtttttcgcgcacttcacatcctaaactgctaaaccatatattttttttcaaaaatatttctataaatagttattttaaaaatcatattaatcatttttaactttaagataattaaataatcaattaattatatactagtggctaacctcatatttcgtattttccaatcagcttctttctcctcctctccaacactctccaacgtaacctaagtccgtttatagtactgtaagaattttactcgtagtttttgttacttccaactataaggtggtgtttagatccagggacttaattttagtctctatatttagacattaatttagagtattaaatatagactacttacaaaactaattacataaatgaaagctaatttgcaagacaaattttttaagcctaattaatccataattagagaatgtttactgtagcatcatatagtctaatcatagattaattaggctcaatagattcgtctcgcgaattagtccaagattatggatgggttttattaatagtctacgtttaatatttataattaattttcaaacatccgatgtgatagggacttaaaaactctagttctatctaaacagggcctaatttgcatatatggccaaaacaaatgcaatttaatttggacggcgatatctcgttccccttctttttaccactggagagaatacagggggtgtttatatgggcctaaaactttttagcccatgtcacatcgggtgtttggacgctaatttaaagtattaaacatagactagtaaaaaaactaattttataaatgagagctaatccgcgagacgaattttttaaacctaattaatctataattatcaaaagtttactgtagcatcacattgtcaaaatcatggcgtaattagactcaaaagattcgtctcgcgaattagtccaaggttatgaaataggttttgtaattagtatatatttaataatctaaattagtgtctaaacatccgatgtgataggaacttagggacttgaaataagtccatggaaaccaaataggcccacagcatatgcatagaatttctacagctagctggcgttggaacttgaaatggggagagagattgcttgcgtctgtactgcttgttactgttattcgtctgacgtctcttgatttatttaactagcagtggttaacatggttaatatactggattagtttaatcaagagtacaatttcatgacaggagtattactactattcaactggttgtcctcgagaaagagcgtatatgcagcgtgaagtcaaatggaacgcgccaacttagaaaggaacagtaggaaacattcctttgtcccatttcaagatatccatgagaaaaattatattattacatgaagaaaatatatattactgctacatgcagtcggatgcagctagttctgatgaatcatactactactattttccaagtcagcaatataaagattagcttccgaagtactggaatattggtgtataggtttactagtaccaaaatttttttttagcaataaccttgagagtcgatcgagggacaaatttatcgcttatttttccaaacgtaagttccaaattagtacacaaatattagtaaaaacatttttaaatcagtatttaatttcgggctccgaggtactcccccgttccataaaaaatgaatttaagaccgaatgtgacacgtcctagtacatcctataaatttagacagatgtatgtccagattcgtaggactagattgtgcacattcggtactaggttggtttttttatgggacggggggagtacatagaactatagaagtagcagctatctttatcatttctttctttctttcttgtctgctctgtaatttttttcctactctatacaatgaattatcacaccgtctggtcgacaaaaaaaaaacttctcatctcaacaaatttcaaccatccaccacttcactttatatactccgtgcataaatcaaacgctatatagatatgttttgagacatgttgtatttaatttagcacactcccttcgtcccataaaaaataaatgatataagatgtcgcacatcataatattataaatgtgaataaattattatctaaattcatagcactatgatgtaaaggatgtgttacattatgtaggtttgtttttatgaaacgagggaaatacacaataacatactctctctgtaaaaaaagttattaccttcgtcccaaaatataacaatctagtattggatgggatatatcatatggctccatcgtttcgcttattcagcaaataagcgaaacgatatatttgcaaacaaaaaattaatttgtgaataaaaattttatatatgtatttttagcgacataaaagtaaatgctgaaaaataaatttcgatgaaaactcccctacatcaactctaattttaaagtcgaaagtttaaattttgacttaataagcataagcggaaagatgacggccgatagtttaacgaatctacacactctcttagccatatttatttgattaggatttgtcctatttaatttcaagttgctatattttgaggaaaaaaatagtataagttattttgttcggaggggagtattgcaaacaacgggccggtactcctaccagctgatgggatcgtagtagtacgaagtacgaacactgtttgcatttaattggagcaggtacgttgcatcaggtcaggagcgcctgcaaatcaagtcatatcaggtcaggcctggtttagttccaactttttcattgaatttttaacttttctatcacatcaaaactttaggtatatttagttttacgttaaaattagaagtttgttgaaattagaacgatgtgatggaaaagttgaaaaagttaaaagttggaagataaagtttggaaactcagcttacacacacaaacttctaacttttccatcacattacttcaatttcaatcaaacctccaattttgacgtgaactgaacacaccctcattcccaacccaatgactagaatagtgaccatagcattaaataagctgctaccgatgaaagatgatgtgacaaatgaataaatgagaaaagagaagaaaactaggtcttgtatgagacatagtttctacatatcatgtgagataagtagtattattaaatttaaatataaaaaagtggtgtttgcattgaaagagtagtatctagtgatagtttttttttatgatgtaaagtttatgaaaactatggtatgttagttcacaccaaacttcccccaaacttccaactttccatcacatcacatcacatccaaaacttttctactcacataaactcctaactttttttctaaactattaactttttctaaacttctctccaatttcaggaaacaccgtctatgttctagtattttgaattgggaatggcttcgctagctacgttgctagtagtagatcagtcgtcacaagagacaagaggaacagccacgtgtgacgattaattaataattaagcagcaaattaaactaacagcgcaactaaataaacaaccctgtacgtactagtacttaattatcaatgtaggaaaatttgtccgtttgtaacgcgattaatttcttcgtggccggatccatatcacgtgtgcgtcagttttcagtgtaatagtagtaatcagtttggttcaacttgaaccggcccttcgtcttcgtcaccggccgccggagtgagatcgatcgatcgagacgtacggcgtcctggaacggcggatgcatctgtcgccggcgggggccaccgttgccggcgtgctagctccagctagctagctgtcactgtcgatctctcatggcgggggccgccatggcggcttggagttggccagtaaccggaaaaccctagcagccggccggagtatagtaccaacttgcgtcatatcatcgaccaataattctgtcaaaatattaatgactgactaagatggagaaaattgcgagtgatatatgctgtgtaattcttttttcttacttttgcaaaatgagtgatgtgtaattcactaactgcgctaattaacaaagacgaagtattcctgagagaaaacaaattataaaagacttcactagctgaatcatatagagcaagaccgattgtctaatggtctgtttggtacagctctaactcctaaatattgctccaggaattgagtctggagtggagttgtggagctgcctaaacccagctccacaactctaggacattttgtgagatgtgagatagctccacccaactccactctcagttttggtggtactgaaactgtttggctgagctccagctctagaaggggtggagctgtgccaaacaggccctaactgacaggacattaaaaaactagtatatatttataaataagataatactatttctcctccctccacccgatatatatatatatatatatatatatatatatatatgagtatttctagtttcgggtttattttaaagagattaaggatgaggtgaaaaactttagtgagaatggttggggtggaagagtgatcgggttaaaatgaaaaaaataagaatgagaaatgatatactcctatgcgtccaatctttatgtacaacttacaacctagtattccgtatgcatgtactaaatgcatactccctctatccagaaaaaacgaatctagaatcagatatgacatattctaatatgataaatctggatatatgtgtatctagattcatagtcctagggtcacatttagtactaggttggttttagggacggaggaagtaggtgttgcttgtctggcccacacgataacaagctcagtgattggtagacgtgagacagtaggacgtgagtcgtacgtatagcaggttgtatatttatagataattttaaaacactttaaatgcttatatttaatttatggatagaagaagtatatataataaccctatgagatagctgaaattaatggacagatgaattatctgatttttgatagctacccccttggtaaagaaaaaaaaaatccaatcattggatttttttagacggagtagtatatgtttaaggacacaaacaaataaataaattactacaaaattaaaaagttgctttaaaataagtattttaggaaacacactatttaggaacttatggagcgtgcaaacggaaaccaaaaatccaaaattggaaaagaataataatactagcactaagattttttaaaggtgctatcaccgtacactaccgaaggcattgttacggatactataacttgttggtttgagcttataagtttcaagacaaaccaattttactaaaacttgctttctaaaataatttaaggagatgtttcgttggttaccatatactccctctgtttcatattataagactttctagcattatccatattcatatggatgctaatgaatctatacacgtatatatgtctagattcattaacatatatatgaatgtgggcaatattagaaagtcttataatatgaaatggaagaagtaagtccttaaagataaaagtatgacctactactttataaaaatagaagtttttaaaatatttgatgggaagagggcagtatgtgtaattatatgtccttaagcaaagtgaatgtaacttaatttaattggttaggctctttatagtgaaataagtccacatagattcaagttctagacttaacacgggtacccgtatttatggctaattattttttttagtggcagatatccatgatgacttcatcaatgtcaagacttactggacaagtctttctgagatgctcatacagatatggtatgcatgtgtgcgttcaatccaaatttcgaaatccattcataaaatccacagggctcaaaggacattttctcataggatttcaattcgttaaattcctttacaaaattattgctccccaaggagaccttagagactgtcttcacaccttgaatctttaagcaacaaagatcataggaaaacagcataagaaccatttgaattgaacacgggcaaaacacgtcatttgaagaatttgagaggtagctaggaagaaaggaaaattttgaaggaggtttggagtttatgctacaaatcctctaaaattgcaatgaaatatctatccatagaaatttcaaagaaattataggtacctactgtaatcctttatccaaagggtctcagtgaaaattgtcttataggagagtagtagtatttaaatccttcaaactttatgtggttttcccgtgtttcaaaatggagctagcctcatataccttatgtagtactccatccattttattttacgtgtatttgttggtttttttctaatatttaactgtgcatcttatttaagtcaagcattatttatcttatgttttatcatctaataaaaataataatactaatcataaaaaaatatttaaataagacgaacaataatattggataaaaaacccatgaatgcagtttaaattgtgtaacggaatgtgtattatcttagtgaattaagatactactccctccgtcccataatataagggattttaacattttggttgcactgtttgatcactcgttttattaaaaaaatttagaattattattattttcacttactttattaccaaagtattttaattgggcagttggctattgttaattgggcagtgtacgttgccagctaccgatggagaacaatccccgcagaagtgccctgtagcagcacagcaaatctcctgtacgcctggccgccgtaagcgcaacttgccccgagcgccattggcccgcccaatccaagctcgctctcctcctcttcatttcattcatctcacccgtgctccccggccctagctagcttagctctcgtcgtcctgcagtcaaagcagcaacagtgtcgctcacactgaacccaactcccggagtgcacaagcgaagaaacactctggctgtggggttttgctgcgccccctgacgatcgatagatgaaagctagcgcttgtgtgtttgtcgtccaaaatcaactggccgtgtttttgattcaaaatttttttct

SEQ ID NO: 3324 - DNA, 601 bp, Oryza sativa
caccactttcgcagtgaccagcaataagtatagtatatgtaacaagatcaggtcaacaccttggcctctcatcatctggatgattttaggaatttcttttgttaaaccaagcaatcggtacccatgataaggctattgtaggtcacaatctcaagttccattccttcttttgtcactctctcgaaaagatccaatgcttcctccattgaacctactttacatagaccgtgtataagggtagaaaaggtatacctgtcagggactaatccatatttcagcatcaggcataaaaatgattttgcagactgaacaaacccccaattacacaatgcagacataagaatgttaaaggtcattcccaagggtttaaactttccctccttcctagcttcctgaaggaaagataaagcttctccaaccttatcttgcttacagaggccattaataataatactatgcgaatattcactgggagagacaccacaagactccatttcttcaaaaagctccaatgccacgtctgtcatccttaagccgtgcaataaactgtcataggtgaacaccgagatttgcatgtttaggctgctcattttactaagaa

SEQ ID NO: 3325 - DNA, 20350 bp, Oryza sativa
aaccaacccgacccgaccgatggggtcgcccctttttctggtgcacctaaagctgggccgcacgcacgtcgcaccgtacgagatgggcgcaccggccggcgccaccgcgcgcggtaaatgccaacgtgcggccgccggagacgggcggcgagacggttgggccggccgaacagatgccgcgtgcatgataggtgggaataagtccactttgactcccttaaaagcaacccgaatctaatccgtggccttaaactacaaaccagatatcctgacctcctcaatgttaaaaccggtgtaatttgattccctcaagcggttttagagagcggttttgttgatgtggcgcttgacctagtcaaactagctgactcagcatgtgggacccacacgtcagcgtaacattttttctatctcctctctttttcccatgctgtctaacagcaaccgatgcagatgcggatttgtaacgatggcgccgccgcggccacacctcacggcaccgggtacggtggccacctcgccgacaccgccgcaggcggcgcttttttctcccgctccgcatcgtcggcctcgacctccgcgacagccacctcgccgacacagccatttgctcggcgaccggacgactcgccgccacggtggtcgccgagctccgccgggccgccctcatcgcagccgtcggagaacaccgcgacgtgcaccaacgacgaaccgcgtcacggcgacggtgcaccggacgccgccatgaccacgaagacgagcggtggcggcggcggcgctggtgggaggggaggccgacatagcgtcgcctcgaggccgcgagcgccgacggctccctcgagctctggctcccctcccccggcaccgtaggctccttcgccctcgcggagtccgtggcgcaccggccgtcgccatcgaggagggtgctcacgatggagtgtgtgtgtgtgtgtgagggggggggggggttgggtgctcgaccagagtatgcggcggtggagcgacgcgcgtcagagccgtggtcaagaccctcctcgccggcgagcgtcacctttgcgacgagctgttagcctccgacgaggagctcggccacgagtggttcgccgatgtcgccaggagatgcctcctgcagctcatcggcttcgcggacgccgtcgccatgtccacaccggcgacggagaagctctaccgcatgctcggcatgtacgaggcactcaccgccgtcgagccggacatcgaatccctcttcaccggagacgtccgcgacttattctcctccgaggtcaccggcgtcgtggcgcagctgggcaacaccatccgccacacgatgacgatcgaccagttcgtcaacgtcatccacggcgagtcgtcgcggcgaccagtccatggaggcaagatccaccccatgacacgctacgtgctcaactactgtggtctcctcgctgagtgccgcaccacgctcgacatggtcctcgccgacaacaacaacaccaacgatgaccaccacgacggtggcggcgcctcatcgtcagggcggtgcatgcgggagctcctcactcacctcctccgcaagccggatgagaaatccaggctctacgaccacaccgggctgcagaacatcttcctcatgaataacctctactgcatcgtgcagaagatgatggaggaggaagaagagatagacccacagtgggccccacttttttttttgcgcgaatgacgaatgggtcccacatatatgtttttagttctgatgccacctaagcgccacgtcaacagtatacaggcaacactgccacgtagacgccacgtcagcaaaaccgctcttcaaaatcgctgaaggagtcaagttgcactggttttaacagttgaggaagtcaagatatctggttttgtggttcagggtcatgaattagattcgagtcacttttaagggagtcaaagtggacttattccatgataggtgcagtagcccgtagggaataaggatgggcctttgggcgaaggacgtcgtacgtggggaataacttaataagtttactttgactcccttaactagtgaccgaatctgatttgcatccctgaaccacagcacatgatatctcgaccccctaaactattaaaaacggtgcaatttggcttcctcggtggttttggagggcggtttcgctgacgtggcgcctacgtggttgtattgacctagtcttcgttccacttggcgttgacgtggcgcttaggtggcattagaattaaaaaatgtgtgtgggaccccatttgtcgttcacaaaaaatatatgtgggatctactgacatgtggggccttctctctcccttatctctctcctctcctcgcttctcccttctccccccaacaacaccccacacacacacacaaatatatgcggaatttgagtttttttttctatgatagtcctagagatggcagtggtgccccattcaccgtttctccacggtgaattcacccattaggggacggggataattagaattggttcaccatgggaattaaatgggaggagacatgtcgccatcggttttcgtggggtggggatgatccttcattccccgtccctactcccaatgcattccaaaccggcctattggttggttattctttgaagtgtagcagggtagaatcatgaaacaaactcaaagtggtctatgagtattttacccgggaatatgaataatgatctagtctcagaattaatggtctttaatactccttgtaatctctttcttttggtgtgtgttggtttttgcatcttagctatgtagagaccggaagtgttctcagggcaatagaatcaccttgatataatgtgtttctcaaactggctactatgatacataccatttatctatttatctatctatatatattatattatatttattatttattttactctaccctatatttcaacaaatactttcactcatcacttatcactcattctttcattcctcactcatcactcaacggtccagattgcctctctgaaatctcaacgattgagattgctcccacctcccacctccctcgattgcgcgctcctctccgccccctctctatcgctctcacgcgctgccgcccctcgccaaccacgacctacgccctcatctctcctctcacgcggcaccaccgtcgtcgccgccgccttcgactgccgccgctccgccgtcgtcgcatccgtcgtctcgccgccaccgatccccgcgccaccgccgtcgccgccgccctcgactaccgccactctgccgtcgtcgcatccgtcgtctcgccgccaccgattcacgtcgccgccgatgccttcctcgcgtggtcgctgccgagaccttccgtgcagatctgctcctcgtcgccaccgatccccgccgccggcttgcctcaaccgatccccatcgccgccgtcgctccaccggctcgccctcgccagcgtctccccgtaggtcagtctcgcgccgccgccactcgcatctcctcacccccgcgattcccaaccctaaccgtcgtcactgccaccgccagcccccgtcgaccgtcgcaccgcgctgcgccgcactgtctcgcccttccaccacgcccccggactccaacgtcgccgctccagccccgatccacgccgccgcagccgcatcaccgtctatttccgccatgggggcgtgattccgcgcgacggctggaggaggcgaggtcgggcctgccctccatcgatggcggactccgcgtgacggctggaggaggtgaggtcgggcctgccctccagccccgatccacgccgccgcagccgcatcaccgtctgtttccgccataggggcgtgattccgcgcgacggctggaggaggcgatgttgggcctgccctccatcgatggcagattccgcgtgacggctggaggaggcgaggtcgggcctgcccttcacgacgctccacgtcgccgcagcccgcagccccggtggggccggtggttgggtggttccatcccggtccggccctggaaggcgaaccggcttgggtccctcgcgccgccactgatccagggctcctcaaccctgcaagccgtcatcctgcctgcgaacaaggtaagagtgcttctcgatcccgttcctgtacatgaggaggcatacggggcagggtatcgtttattcatagagatgcataatggctttagaaatcccctttgttgactaaatccccattgttcattattaaacattgttcactgtgcatggatatctgtgatgcaaaactctaatccaaagcctgttttgcatttcaactaaatttcacatgttaatctcattcgtgtggtacgatttttttttttttgggtttcattgctgtcattggatgagatacttcacatcttgttaacatttatcgtcaatctttcactgtaaaattgtggggaagaaatggcccgcctcagataattcttttgtgtcaatttttctatgtgattgcttctatctagcaaactgacttaacctttcatttcaaatgatttaatctataggacaaaaattcaggttgtcgaagaaaaattcaggctgacaggacaccatgtcaactgctattgtttgctgcacaatcaaggaaatttttggctgattctactaaatttctgtttggtataggtaatttctttcataatgattaccccttacaaatagtgcaaatatatactccgtgggtcaatcttcgcactgttgtagaatctgatgtttaaaattgcctgcatccggtttgcaaatcaagaaaaaaaaatgccctgattactgtgccaaccatattttcttcgagggattgaccaaatctttttcttgtaaaagcttaaccctgttccaaatgtaatactgcaattttgctcaatttcacatgcacaccacagtgtagtcatgcattaatgattttgatttcacagtgtgacatgcacatcacattgtgaacaagtatattgacagatcaacattttgatttcacatatatgcttccctgttaaagcccggttatcctaatcgatctgggatctaagaagttgatggtatatgcagtaccatttgtttttcttgcaattgactctaaattcttatgtcgttcagttcatataaatggctatattctacagaagatagatgaacctatttttctttctctagggcaaataactgaagagtgttggtatttgagttaaccactttttacgagcctaacctgctgcacttccacaaccatggatttaaatagattgttcatgtagttcctattttttctgaacaaagtgaaaaatacgtcgcctatgataaaatggcaacttactgtgtgcaatgcagtacactaatttattttttatagatcttttttttgttggtgattgatagcgtggctgctctccatagacggcttcttattttcttttcatgccatatcaataaaagtaatatatttttccatccgggtgaaatttgatctcttaaccattcggcacttatcttctttcacagatcatttattaaattttccctgtatcctacgtttacagtgttgcatgaatcagaaaaaatctgattgaaggatctaatatttgaggactcctgctctgctggtgactacttcactccagttattcaaggtatcaaagttactctaaaacgatgttgttaaaagggactgctttactaaattgtgatcatgtattatctctttagtttgtggatcttgggtctgtgatcatgtattatctttacgatcaaataacgcgcgcgcgcgcacacacacacacacacactcctactatctctacgtagaccccacatggaaggccactataagattgtgtatccgctatgtcatgtactggtgaaaaaatgataaatagtctgaaccatatttattttttcatatagagcagaaaaattactgaagcatcaatacaaaactttggttgttttccggccttgttgcagataatcatgatttcaacttggtgttactggtaccgacttacaggagtagagattaaaatttcagaaacctggcaatcgaaaaaatgaactctatagattttggtttttaggagtttggaatttcaagttgatggttgtgagcggcagtcgtagcagcaagcttgggatattattggcaaatcatatccaaatctctgtcaattacgctatcctgcagcagatgagagtaaaggttagcaaatcatatccaaatctctgtcagctgctattatggcaatatttccatgtattacatgcccatacatgtcaactcacaagacatacaaggcaatattgttatgtctttccataaaccataaatatcatgataacaacaatggtaacattatcctccttagcctatatatatatgtgggtgaaggagtgtgatccaaaaaaaattactgatcctccttagccggctgcatacgactgctcaacttcaactcatcatcttggtatcgttctccaatctatctcttttgtgttggaaattattatatactttagtttgcacctattgatctcctacttcttctgtattgtagtaaggcatggcatccatgtatgatgtggatttttcaccacatcaagccacacctaaggagtcaatgaacttcaaggatgatgcgaaggtgcagccttcgtcagggcaaacaccaaacaaggggaattattacatgggccacgcgaatgccatcatgatgatgtttcagtacatacgtgatggctgccggcatgttgagagttccatggaagacttcaagtccaagaaggtagaagaaggacgcgatgagaaaaggaaggtgggagaagggtatgatcctcgctggtcttctcccatcgagataacaatgaagatctgcaatgacgacgtctccgatgaagcaaccgagaaggaaccatgatttagtattgtcgctactgtgttttggccttacaataaaataacatttcttgtgaattacacaagaaaattcagtacacaatgtcgttcaggtccattaagtactgcttgtgaaatgcaaccaaatttgatgaaactttgttatgatgcctattcaatattgcttgtgattcagttgatttctgggacctatacaaatgtgctctacctcctgttgaactactttgtatttgtttggcacggttggatgaatagtaatgtccctttatatttgttttccatgtctttttatataaggagacacatcacacaccaatttcctgacgttggatatttagtcatgtgttggatatttagtcatgtgtagcactattgatttctgtaattcttttgctttagatcaaacatattttatttgcttcaaggctccattaatttaaagagctgaccaatcacatgaatattgatttgtgaacatgaaagcgtataaaaaaaagcaaatataattaacataagaaaccagtattgctaatttgctattatgttgcctattcagtcacgataaaggagtaaaggactgctagatgtcaaacttatgtgtatggcccaaatcctgtaatggcccattaacaactaaaatacccatgataaatacttatatgcaatactcaacctaagtgcctttgatctgtcacgtttatcatatatcttaaggcacatatatatgcattatcatatatctttaatatcatattattatgcattatgacatggggtataaatatattggtatatcctattattatattttacttgcaatatatttgatgcatgacataaattgaattaaaactcaaatgcacagttcatataataatattttttttacgaaacatgaaaattttaaaaattattatagacaaatagagttgcaccgtagcgtttagcacgggcatattactagtacccacaggagaaaaatgtgagagctgactggtaaatctcctcaagtaattacttgaaagttggtttgttgatgtactccagcatagcattagctgaaattagcacaagagtaaacatatcacagcatttataactaacaaccgatatgagccagaagagtctccatgagcaaatgtagatgcatgcatgttgtatttccaaataaagaatacaaagttgatcagtgaaataaatgaattttaacttcgaattaacatcttgacaacaaccttatcacaaaaacatgagttgcccatggctcggattcttcgtcttccccggttcctttgccatttcaagtaagattgatcatcagacatcagtcaatcataacatgatgtagattgaagaacacaaaaggatcttcaaattttagttgaaaaatcttcatagaacaattataaccgaacatcaacaaacacactgaattctgaataccaagaagtctaaaaatacatttcaccctcaatttctgcaactactaagagataatttctcgccaagaaagacaagaacaacaactaacgatcagcacatgctgcttaaaagtttaaaagaaaaccctgaacttttctacaaatatgaagaaccagaactgtgggatgccttttcagcggcggatgttagattggaggttgagcaaaaaagacctagccaagagcaattttaccatctaacatttggtacctaaaattgctccctagccaaaggcgggttttttttttatggaggttcaagtcctgacgaattggataagtgtataaaatatttcttcccttttacaacgtattttaactattttcaaccttgtagtaaaagggaagaaaatgttttacaaagttgaaaattttcgtggggctataaatttttttcgccgggctgaaaaaaaaagttgaaaattggtatgtgtttattgtactatttcaatcctgaaattaaccagattttttttaaaaaaaagagcaactgcaaagtgcaaaccacccgcttaactctgaagaacaatcacttccttcttcaccaacacaaatccggaaatggcatggctttttccattttctctcgtcacaaaaatttctgatttctcactagaaaggataatcattttaaccacctctttgcatccattcttcattggtgtaaaatctgcatgtgaaggagcaattcgagcacgcgtgatcgaatccaccctgttttcacattgtttggacagtcatggtttccttctttttcttctgaagtttctgaatcaatgctaaacacctgcatcattaaataaagtgaagcttaattatttccttcctgttcgacaacgatgacgatctttagcagattgatcggcggcacaattaatgcgtgaattcagtcagtgatgagagaaaaacagaagccaaatcagactgacgagaaaaggttcgctcacatgctgagtttataccgaaaagagaaggctcaactactgtgagcttttgtgttttgcctataaatgtactgattcagtgtgaaaatttgcctggaattgctgcgaaatttcgtgggaacttcgtatgttcatctgcaccagaagcgattccattttcgttgaggaggaaggtagctagcacctcaaacattaccggttttggtctgatgttctgaacatgcacgcaaagcaatgccatttctgaagaacaggctagaattgtgatgacattgcttatagaaatttgaagcggttggccttgtttgtgatcaaaggctgtgtttagttcctttcaaagttagaagtttgggttgaaattggtacaatatgactgaaaagttatgtgtatggcaggttgatgtgatggaaaaagttggaagttttgatctaaacacagccaaagatgtagaatttttcttttctatcacaattttcttttcagtggactaagagttggattttcacctgaaaaatattaccactgcaactcttgtctgaagttctgaacatgcacacaaagcaatgccattacagatattctgcaaagttgattttttttttttgctgggtcagccgaagataagtccaatcaaatttcattaagataaagagagtacaggttacaaaattattacatcgaccaacgttgccgaaggcgggacgagaattgccaaaatgcaatccgcccacagaaaggaacacctgaaactattgctgaaaatgttgatcaaatatgtgaaattttaatagtgggtcttcggttttcacttcaaaaaatactactgctgctgcaactctgcaagagataggtggagaaggtaacatgtgagccaaaccacgcttgattggttggtagtcgatcatatttattatttaaattactcaatatcgatagcaatacgatgtaacaagaaatcagaaaaaataaaatcaacatatcgtaaaaaagaaaagataacaatcggatatgacggtacccttagagcaggtacaatagcagattataaataatctataaacatattttaaagagataaaagaggagagagaagagcatcgagctacagatctatagccagctatagcacggactccaagacgtaatgtgtatatgacaggtggaaccaaatattaacagtatagtaagcaactattgtatgtattggtcatagatgatttatagttaatactgagtagatccgaaatttctgtgactatttctatccctttttcctcggtgccgttgggacacctgtccagcaaagtacgatcggaaatgacggttctacccctcctcctcgtctgcttcacctccataaaacccccacttgtgcccagggcttcacctcccacgtctgcgaggaagaggcgctgctgtgattgcgagtgcgaggtatgtgcattccccccacaaatctcggcccccctctcctcccttcgcttctcccgatccgtagaaaagcttcgtgcctttgagggatggagtatgcgtgctctgtttgatggtcagaggctgagaaaggagcgaatttttccaatcgttttgtgagcccagcggttacggtgtttcggggttgtttcaacagtggaggggatttcgattcatgcaggttcttggctttctggatgggattttccttttctcgtttagttgattttttcaataaaagttcctggctttctttgagtatatttgtttcatctgcctgctcgagtggaagtggggtttctaccgcttgatatttcttctctcttttttttccagtgtatttcttgtactccccggttattacttgcttataagataaaattctaaaaaaaaataacttggttataagatttgcagttttgatttggtctgccgttgaggattcttgtgttctatggctcgtctctgttttttatagtgtgcaagattcttcgatcaattattagctcttgatttctattggaggttattggcttgtggtttgtgtgtgcaatgtgcaatgcaagttcttggctttgttgacgttccagagtgtagtgtggttctttgatctgactgcttaagaataaagcacctgccttttgtaacatgaggatcctcaatttttcgtgtttgtgtattcttgtttcttgtggtggttacttggtcaagattattaagaatcctatagaattaggattcttaataaagatatgcactgttgttgaggatcctcatgttacaaacattttttttctttctgaaatgtgcaatattgttcaagttcctagctctgcgttattggctgaagatggatttcatttacaggttattcccaagaagacgaagtggtaaaaagctatgggcaactcctgccttagtgctcgtaaggattcccttcgagattcttaatctcttttgcttgctactaacctactagctactgaaattattgtggtagaagcacagaacacggttcaccagtggtgtcagtcgattctgtttcagatttctgatatttccatgtagaaataaaatgtcaagaaaaaattgtaattttagttcctggaaactagttacctttgtcatcgtgttgagcggtttggtctcatttatcagaaggtatagcaaatggcatagatagatatgagtttgaggcttgaactactagttttcataatcactgcctattgactctggctaggtgtaatcttggctacaatatgttggcagtggttaattacttgtgccatgggccatggcccatgaggttatggcatgtagttttgtataggaaacactttgataccatggtaatgcttgtttgctggatgatttggaaagaacaaaattcacacgtgttcaatcagtgttcccatactattggccggatcttttttagataatgaaagctttatttagacttagttaactacatcaagatgattggcatgtagttttgtataggaaacactttgataccatggtaatgcttgtttgctggatgatttggaaagaacaaaattcacacgtgttcaatcagtgttcccatactattggccggatcttttttagataatgaaagctttatttagacttagttaactacatcaagatgatacaatcaaactgagtcactcttggcctctgcataaaatgcacacagccaaaaaagaagaaagaaacaactagaacatctcccaagccccaaagtttgacagaaacatatatcttagtggctatcaatccgtaggctagaccgccacccatgctcctaggtaaaaaaactcctgtgccacctggtccaactgtcgagataccaccgtatatcttagtggctatcaatccgtagactagaccgccacccatgctcctgggtaaaaaactcctgtgccacctggtccaaacgtcaagataccaccataatagtatcccgcagtcccggttggtggaggatagcccaggtacgtagccaccgggtaattaaggtgataacctgcaaaggagaagacacatcttgttatcaaaaattactccattcctgcttagccaaatggaccaacatagagctgttgcacccatcaaaagtagattcctcatttatttggggacacatgatagccaactcccaaacatatgaccaacattgcgaggaggtttcagattagaagccaactgaattacagaccacaccaagcgagataagcggcaccgaaagaataaatgttggatagtttcatccttgtgacagaaacaacatgtcttgttgcctttccaatttctcttagcaaggttgtccttggtgagaattactccccgacgtaaataccaaaggaagattttaacttttaggggtactttcaccttccaaatccgtctattgatattcggaaccccgctatgtgttagagctagataatgagatttgaccgagaagaccccattcggggtgaggttccagtgaaactcatcttgctcctgtaccaaaatcaaatcagctatgcgaggcaataagttatgccaagcagctagttttgcaccaattaaatcccgtcgccatgaaaagcacggaggattggtttggaaaatctgtgcgatagtcgattgtttatgcctaactatgttatagagacaaggatattgttctcttaaccaggcattacccaaccatttgtcttcccagaacctaacttgggagccgtccctaatcttgaaggatccaaaacggaaaaagtcttgtttgaccttcataagactagcccaaaaatgtgaatcccccgctttccaataggcttgagataaaggttgtgatcccaaatatttattgcgtagcaattattgccatattccatcggtggtaagtagtttgtataaccacttactaatcaacgctttattctttatctcgaggtcatgaattcctagccccccttgttctttgggacgacaaataatgtcccacttagcaagccgatatttcttcttatgtccatccccttgccaataaaacctagatcgaaggtaatcaagttttttaagtaccccactaggaattgcaaggaatgacatcatatacattgggagactgctaagtactgagttaatcaaagtaagtcgtcctcccaacgaaagaagttttcttttccagctactcaatttcttctcaaatctctcgaccacttctttccattccgcatttctcaacttcctataatggatcggaatgcccagataacggaatgggaagttaccgacctggcagccaaagagctggttgtattgatcactataatcaagtgcttcaccaaaacaatacagttcacttttatgaaaattgatcttaagacccgacaactgctcgaaagctagaagcactgacttcatgttctgagctttttcaaggtcatgattcataaacagcaccgtgtcatcggcatattgtagaatgaagagtcccccatcaatcaaatgtggtatgactccatcaatttgcccttgtgttttggctctgtttatcaatgtggctagcatatcagcgataaagttgaataggattggggagagagggtctccttgccgaaggccctttttagtctgaaaaaaaggctcgacgtcatcattgactttgactaccacgcttcccccggaaatgaaagactcaatccaagatatccacttgggtgaaaaacctttcatacgcagagtttgtagcagaaaaggccatttaaccttgtcatacgccttttcgaagtcaattttgaatatcaccccactcaacttcttcctatgtagctcatgaactgtttcatgtatgatgacgactccatctaaaatgtttcgtccacgcatgaaagcagtttgggtcgggttcactaaatggtcagcaaccgagctaattcggtttgtagccaccttagtgaatattttatagctgacatttaacaagcatatgagtctgtattgttggatttgatttgcttctttaacttttggaactagagtaagtaccccaaaatttagtccgaaaattgggaggctaccagtatggaattcattaaaaaggttcatcaggtcatgcttaataatgtcccaaaatttttggtaaaattcagctgggaaaccatctggtccaggagctttattatgctccatcgcaaaaatggcttctttcacttcttccgaaaaaggagcagtaagcaaatcattttcagcttgtgaaacttgagccatatcaccaattatggactcatcaagcgaaaacgagttctcctctggtggtccaaaaagtttttcattgtcttatctttggtgacattaaggacgagatcacagtgtggaagaaagcagagtttttcattgtctctgatgactaagtgtttgtagtgtgaaggtttttgtcttcatgcctttgaggtgggattactatcaatctcacactggtttcgacaacttgtcgatgtaatattactataacctatacctccctaatcttaatgaaatttggtcggcctttttcatcagctgacttgacaaaaaatagtattatgtactaattctgactttactgcaaagaacggatagtttttcggagttgtctttgttctcatacgattagatatgctcttatatgtggaccaaacaatgatgtgacatacacaacagcagatttcctgccttacacgggagtaactcctcttcctttctcccttgtgtagtttgagttaatacacttgacatcttgatttcagccgatgcactgctggtaaagatccataatccagtgttcttatggaaggtttatggcttctcagcgctacttcagaggggagctttagcagccaagtctgctgcatttcattgctctggatacaactggtacgtatagctgtgaagacactacagcggtaatatgcattagatttaaaactgcatgtgactaggcagataccatgcgtcattcatcagttcatttgatatgttcaagagataaaatagttgcctataaacaataagaattgcgaaatagtcttacatgttcacgtcccttaaaaaaatcaatgtagctaagtaattagtctcagcgccctataaaatggaaattgcaaggggatgtttgataggatgaatgaagaaattaggatttgttattacttcagccttgatttttaatctgagttggtattatgctcattgattctcattatacaggtacttgaaagtgtctccaatgcataaaacccttggtgatggaactccacatgttgctctttctcttgtgctgtcccgactaagctttaagccagattacaccatgaatgcagtgttcgtgctgtcaatgtacaaccattcgaagggaaattttcttgtagtcaaaggtaatttcctgaatttggagcagtattgaacatattatctcaattccaccgctttaattcaatgtgtaaatatatatgatcaaatagtttccacattgtttaattcactttgtgttgtcttatgctaccaactttggtttcatcaacctatcgatatttgcagttaacatatggtagtgttgtatagtgcatacatgattccccccccctcttaagaacaaatgttcaattgttgtgaggtctatttatgttgcagcctagactacatttctctaatattgccacattttaaccatgagcagctagctacaacttcgacgtcaagaacacacactcaaggaatatatgcttgatttcccttgaagaccaactgaaatcatctgagtatctgcttgatgatacttgtgtccttggtgtggagatattacaaatagatgtgtgccgttctcttaaaaagaagaatgttaaagttcagaggttctcttcctccagaagaagaagtttgtctctgttcagaatctcttcctccagaagaaggatttcactaaaggggattacacctggaccatgaacaacttccctgagttggatttgaagccatcggtcctttcacctgcatttgaaattggcagacgcaaatggtatgcatctgttctggttacaattttgttgatgtttatatgttaccggtcctttctgtgtgcaatttgttcattatcacaaattagatttctaatttcatgctggccagaaacattgagttgttcttggcagttgacatcagtagtggattcaattagaaaaaggtagttgtcttccatgtcctgtatatcgtactgcaaatataccatgttccagttaaattatctaggatttatctctaagcaatagacctgaataactccaacggtagtatattttcagttagggaacaatatttctagtctgttaacataaacgacatatcttatttctgatagttaaatcctatttaacagccacttgacatatgtatcaacaacattatcttccgatgaacctagagtcatatggtatattttcccctggcatgagcactgaactcgtttggtcccaggttcatcagaatgtatccgcgtggtgatgagtacagcactaattccctttccatgtacttgttcccgcaatcctgggacaagctccttccagagcctgggatgatgatcgaactgacactatccatcctgaaccaaaacaatgcgcaacttcacaaagtttcaggttcagcttttccatgacagatcctgtggaatgaatttatatgcagggactgcttcatttttttgcagcatctcattcttagtttgtctcaatcgcaggtcgctttgtctttgctagtaagaatggctggggatggtccaacttcatcgcgtcaacaaactcaaggatcttgtcggatcaagctgcattgtcaaggcagacatcaccatcatcgggtcatccagtgagagtcagattgtggtctgaggaagaaacaatgcccttgcatccttctggcaagaacacctgccaaactatctatgataaaattatggtagcatcacaaagaacttgtctgatcaatggtattcttatggtagttaagatacctgagcaatggacgctgagaaaaatgtaagatatgccatgctatctatctatgtagaactggagagtaatgttatgttctgaaccacttttatgcatggatggtataagcatttgccattatatattgtcatctcggtgtctttaaattcagcatatgttaatctgctgatcagcctgtgttgttctgcttgatgatgcctctctgaattacattatcgtttcgagtttttgacaacttgtgtttgttgcatatgctgccatatatggtttaattggtcaagccctgtacgtgctaaacgggcccatcaatcttggccccaaaaaaatcaatctactgggcctcgtttttttttcctgttccctataaatctcaggattatgtgtgtgccggtggaggcgttgatcagttgagataaacgcgacgagttcgtgtgtgtttgtttgggcggcgactgcgagggcgatctggctgtttgctaggtatgtacattgtctttctcgcagatgacaaaaaatggtgctttcttaatttggttatctgatgccattatgatctcttggtaaaagaaaatccttttcattgagtggattaaggtacactgatcctacatctgtgatcttgtcgtttcactagcaaaacctagctgctcatcaatccattgttttctagagttcttggttatgagatatgcgattgttacatcagtctggctggactgaagctttgagatatatattttatcgtgaaagctgagacttaatctcttgttattgattatcacctagtatatgctgaggttaatttactggagacgggatctaaaaagggagctcgaagagagaaccatgggcaacgttgctggacgtgctgcaggtgcttgtaagtattcttttctgaaaaattgctctctcaacctggatctcatttgaagttttctttgttcagattagattagacactagtaacacattagtcattctaacctgtacatcggtatgtatgggtatttcaagttagtgcaaaagatatttgagcaaatgggcagtaacattagttttacttgtgtgtactgcaattgtcaatgggcagacttgtattttggagtataaaacatagcattcaaaccctaatgaagttttaattcattctgccaaaaaagataaagtttgaattcttagcagtaaatttctcttcagtgctatatgattttgaaaatggttactgctctcaaaatggagaaagaaatatttcgaaaatgattaattcctaaattcaggtacagtgttgtctatgctaattgaattcaccaaaaaattacaaagtgtcctaatctcatgagtagattcaaatggtttgcatggagacttatgtacactgaaatgattaaggaatgtatatatcgatcctttaggactaaagaatcagtatgaggatgcttaattatatggtgccaatttgttgaaggataaataatttgcataccactgaaattttacatattctctatctacccacgctctgattgagaaattagtgccaaataagagattgaatacttcagtgcaaaatttgagatatcggattggaataggggcgctgctagagaaagggtattgtccaaactaggtgttaacagcccaaaacccactccttagtattaattaaaaaccagatatgcccacaaaagacacaagacacaagaatgtgctggatagaaaaatataaatgatagtacaacgcattaacctagcaagggatttgcatgcgcatatatatttgttacagtgcgctcaatgttatttttcttaaagaaaattattcatggcagcattatcatggtactccctctgtttcataatgtaagtcattctagtatttcccacattcatagtgatgttaataaatctagatatatatattaacatcactatgaatgtgaaaaatgctagaatgacttacattatgaaacggaggaagtaaatcgtatcaatgatgtcctaagagtttattaattgatattgcaaaatcaaatttcagattccaaggagccccaaaatgctccttttgtaaaagaacgtgaaccagctttccaatggaagatttacaattcggatcctctgcattagaggtactaatgcagaggatgaacagtaccacgcgttagaatcactgtggaccgtcggatcaagagtgaaaggaccagattgtgtgatacagtaaattcggaacagtaccaaatagtgcgctacagtgttttgaatcctgtagctacagtaatcgacactgttcatggcattagctaactgttcccctcacatgaacagtgctcttctgcattacggcagacgatccggatccaagatttatggcttctctgcgttatttcagcgaggagccacatcagtcacctctgatttgttccactacggtgggcacacctggtatgtaatatctagtttggtggaaggagaatt

SEQ ID NO: 3326 - DNA, 10842 bp, Oryza sativa
aaattcatgtagcctaaaagtaatctacatatattatagaagtaacttatatcaaaaagaaagtaactgtaatgaatgtcttttttaattggatatgactacacagctagtggtagctagcttggactccatctagtatctcctttcaacttgaaaaatacaatagtatcttttttctcattctacatgaaaaacaaaaatgaaaggaaagaaacaatcgatgattaaacagatttatagagagttacttttgaaccatgcaaaagttacttccaattaacattgaagttacttttaaaaattgttaaacttatgtgtgttgatctgtgctgattaaatttaatttctagataaagtcatatttttatccctacaacgaatttacttctattgtcgcaacaaaagtacttccgttttgttttaagttacttttataatatatgtaaattacttttagactctattaaatttacttttatatgtctaagttttatatgtctaagaagtaatttagtcaacttaaaagtaatatatatatatatatatatatatatatatatatatatatatatatatatatatatatatatatatatatatatatatatatatagaaaaactattctacacccgggtatagaatagctattctatacccctcctccctcccaagggtcacacccacctccccctccttaccaaggcccaaaaccgacctcccaccggtcaaacccacctcttctcacctctcgtcccaggatggtgcagtaacacaacgaccactatgcagtaacactgtgtcttacgtgcagtaacagtgttaaaatataattgaaacatagtcatgatggatctacttttgataagcttttttttctagcatcatggtgcaaacggttttaaaagcccttacatcacttgggagatattgttattcaaaacttgacatttttgcaatttgtctctccacaagtagtaatactatacaattacttgttactacttgtctgttgtacgttactacaatcgcatcacgatgttactacactgcgttttactgtattttttgggtagtgttactgcataaacacgtggtaacgtgtacctttcgtgcagtaacacttttatttttgtgtagtaacaagtatatggttagcttctgagacttttaacctatatatttttgtttcagttcttgatttactgtaattcaccacaatattactgtcacatcttacacatgcagtaacactatattggtgggaggagaccggttttcttgagaagagggaggaagaacggttcttgaagaggggagtacgtagatgcattttgaagtttaaccctctacatgcagtaacactatagcatcatggtgggaacgattttaaaaaaaataatatatatcttgtgagacattgcttttcaaagattggcactttgaactttaaccctccacatgcagtaacagaatgtgtaacttgcagtaacaagggcatatacatgcagtaacatggttttaccaaatgtataaaattgttcaaaacactcctacatcaatcagacctcgctcaaagtgacgtacagacattacctatagcccacctatttaatcttcatctcgtaaaaatgacatattaaaactacaattattgtgcagtaacatagttactttgaagtggtaacatacacctaccatgtagtaacacttctacttttatgcagtaacaagtatatggttagcatgtgaagctttaaccagtaatactagtcacttgaatgtaataacaacctatatatttttgtagtaaccggacgtgttactatatttcatgatggcgttactacgaaaagggtgggagtacatagatggaggaaggagaccggttttcttgaaaagagagaggaaggccaagtttttgggtagagagagatagggagaggagaaagcggagggatcatgagagggagagagagaccgggattatatctattttgttactacacactagttacattattactatatttatttcacactgttactgcggggttgcagtaacatatagtacaaagcagtaacgagcgggagtaaatactaaagtttagaaatcgttagttatacaaacaataatcaatagcgtggtggtgaccactactcatgaaaattcaatgatggcatatcatgttacaatagtaatctataattcataattctgatggtaatattgctatagctgtgtagtaaaagatttgggatagtgcagtaagatggtttgaagtgtatactaacaaccatcctagtaccattactacatgttttgtgccaaatactacaggatttagcacgtatgagaagataaaaatttactaagaaaactctatcacaattgagaaatagcctattagttagtgccctgtggtaatttgagttgaaggtcttgagttctattcccattgaatgcaaaatttttctttatttttttctctctaaaaaaaagagaggtggaaggggatggggagaaaaaaaaggagaggggaggcgcgcgagaaggtgggcgagggaaccccaggtgtagaatagtcttaccctatatatatatatatatatatgaaaatgtttatgtactcccgggagtacgtactcctggtccgcatccaccgtccatccgcgtaccgcatagatcgatcgcacacatgttcctgcttatcggatcccaccagacccaatttgaattttctaaaaagaaatactggaatatttgattatcccttgatgatcggatctggcatcggtgtatatatatatatatatatatatatatatatatatatatatatatatatatatatatatatatatatatatatatatatatatatatctcctacatatataataaaagtaatttacgaatataaatattttttcatcttaatataatcatgtaagatcttgttgtgaagatttaattgtaacgaacacaatggtgtaatcggataagtaatttgagagaaaacttgtttgaagaggaaaaggacgtacatgtatattaaaaaaatgcatgcatgtagtaccatgtattagatggacttctccacgtttctctgtgtttaggcgtcgctagttaagacaaaatcgagagccctctccaattagatgttacgtcctaatctcgtagtaatttcatcgaacgtgcgattctgactaagaatcctactccatgtcgaagaacttcacaaatagggccaagaataaattcggaagaaggcccagattgtcctctaaaccaagcccaatacataattcaagctcattccacatctccacaagcccaaatccaagcccagcccagaccaaggcccaggcccgcctctgcggtctccttcgtcacccgcgcgtcaaccaacctccggcgtctcctccccccgattccccattcgccctcgccaccgccaccgccaccgccacccctcgccgccgccgccgatccgcgccgccaccgccatgccggccgccgcggaccccgcgcctccgacgccaccgccgcctcctcccccgagcctggacctgcggacgggcgggcggatcctgcggcgggcggcggcgcactccctccgcccgcgctccctcccgccgctcctcctcgcggcgctcctcctcgtcctcttccgcctggcgctcgtcgccggcacgctccgcctcgcctccttcgccgaccacgacccggcgctccggtccctcctctcccgcctctccccgcccgcgccgcacgccccgccgcacccgcccccgcgccacctcccgcgccgccgctccccgttcacctcctcctcctcgtcccccccttccctctctgacgacgacttcctcgtcgggaccctcgatcccgcctcctccgccccctcccgacgccgcaacgcctcctattacgagtttctcttcactccctcctcctcctcctcatcgcccaaaccctaccccttgtcgctcccccaccgcctcccttccaccgcgatcccgttcaccttcgttgtccgtaacgagacctcgccgccgaagcccgccgcggggcgagacggcggcagtgagctccggttgctcgacctgaccaggcgtgacgccgtggccatcatcaacctcctcgcgatgctttcgtccgtgcacgtgctcgcgatcctcggctacatcaccgttcactccgtagctctgggcaccgtgttcgcgtctgtcgccgggcagcacttgcaggggcggccgcggcggtggttccatttctctggtatggctttcagggtgagacggctcactgggtttgcgttcctgcggtgggcgacgcgggacgcgatcgtgcagatgctctgcctctggttcttctccgaggtgcacgaccaggcgcagctgttcaggctctttgtcgtcgccaagctcatgcccttttcagcatctgtcaacccgtggctcgctgcgaccgttggagggccagagcttgatgggttcttcattgcgtgggctctccttgatgcggtcgtctcggtgcttttcaccgtggtgccatgggtgattgttatggaccgtgatccacgaccgcctggtcgcaatgctgtgaaggaaggatgctaccttgtgtcattgatggcaactgatgccactttgatcaaatgctggcaaacagtggtatgcggcagcatgggacagcttgccatggttacacttggtgggaaggttcttggcggatttctccactcaatcggagaggtgtacttcatggtggtgtggctgatgttctacttttcagcaaggtgtaaggaggttcggttggggggccgccattttggattggaggatgtggcagctgctcttgatgggttcaggcaatagcatgttgacagttgcagcattactttttcagtgggaagaggtatatttcatgcctcataatgctcattcatgccgcattgctggtcttggtggagtcgcaatttcgtagttctcttaatcttccaaattgtgctatgatgttctgattcggatgagggagagagaacttggcaatgcttgtatatacagtttttgtcctatgggggtaatcatgtatagtgacaccatttggcacacaagaaaggttgtcttgttcctttttccatcggaggtgagatgccttgtgatagaggatgtagatccaagatgatgatagcgagatttatacagtcctatggtgtagtagcagaattatcttgagtgatttttgggatggaaactcttggtgcttcaagttcacacgctgttgacactatgttgatatcctttgtttttcttcttttgttgtgtgagcaactttgtctataacttcatttcaataaccctttaactttcttttcaacgaagttgctaggccattgctgagttttcttttaatggcccagttcttttttgggtcctggttctactagtctgccattatttgtctcttcaattgatacgatataaatttatcacacatgatctggaattctctccaacacatttggtgcacctctataagcaactttgcatgtgaggttctatttattggataataccccttttggaccagtgtctatcatatttcattccacaatgacctttacttttagatatgatctgcggttcatgttcccttacatgtcacttgttcagttgttccaactatttattcaatccataattcattaaaaagtttaaagcctgttgcatgtgggatactggaaaatactgaattggtggtgttgattgatattggtccaaaatcagtagtgaacccgaggaagtagaagggtgggtgcaaagtttggactgattataagagacagcgtattgtcattttaattctgtttaccagtttgtatcatgattgcaacccttacttaattcatgttcagaacataaaacgtacttctcatgagtatttaccatttagatattcacttgtatgtattaatacatagggcaggcattcaagctgaatatactcaactgcagtcttcaaaagacaattgatctttgccttgttcatccctttttccccttatttgtcatgctactaaattaaaggaccagttgctgttaggcttttataaatggcatttagagattggttaagatatgaacaaacatatggtttcagtaatttggtataagaaaaaaaaatataggacacgtatcttgctacgctaggctcaattccaggtttgcccagtattctgtgacccatcgataaacaagaagactaaaccatactctattttgacttatgctgttatgcatcctggtattgattttgcacacttaggacttgaaaggtatagcttagaagttaaaacatcaattttatgaggcagggggccgtgccaactagaaactagataaattggtactagtactatgaagtatggtgccatctctgaagcttgtgccatctactctcatgagtcatgtactgtgaccgcagcaggtattgtttaatttgtaaaagaagttagcatttgcttcgatggcattgtgtttgtaatttttttaaagtttgccagtacatatatgaccagaggatgccgatcatatgtagccatgcattgttatgattcttctcagtttctcagttcttatgtatcatgttatgtttcatggaaagatgaaaaggtatattgcatactgtgggaactatggagtcataaactgctgatgcttatgtaaatttttgtggaaaatgttttgctttgggataatacttgtatcaagtatgttgagaatatgtttgctggctgctcatggaaatgtatttgttcatcggttgcttcactgcatatctcatattaccttctgcacttgaacctgcagtcttccagttatctgaaggccgcatctgtacatgtctgaatagctggtcgcttttacctatggaactttggcttgtttatctcatgcgactatgcgattatctacctgtgttagaggttgctgaatgatgcatttgctattctttgtgtcgagactaattcgttctatgttactgaccctaaattatgctgtgctgtggtctggaaaatggtttgaaatgcttcattaccatttgtttctcctgtcacttgttagtcaaatcctactatcagagagatgaggtacagagcaattgagtaaactgattcatgaaacctttgggcatgtcatgtcgtgttcttccctgttatgatctgatgagctgcgaacaggatgatatgcatctgctttcttttgctgtcctttttattttggagatggatgcttgtgttttcagatgaacaggatttctctcgttgacatgttggcctggcccaacctctcgtagaaggaacggctaaaatgtagcccgcaggcaggtcacgcttcgttatggttgctgaaaattactgagaatatctgacagccaacaggagctctatggtcgtgtactctccctggttataatgtttttcacctgtactctttgtctgttttttaagtacttgccaccggacattattcatgtataaacctcgatcgcttgtatttctttaaaaaaatatataaatactttagagccccttagaaaaaaggtgtttcatcaaagtgtttttcttaaaaaaaatactaagcattaaactttcattcgaagtagtttaaccatttaaaaatttaggggcatgttagtttttagtcacctaaaagtacccacatatttacttttggacaacctagatcgcatcaagatttatgcaagaacaataaactttgtctaattcttccctcttccttcctgtgatgcgtgtcttctctcaattgcggctgaattactagcgatgtaagtgggtagtcctgttacccgcataaaaacccgcttgttagttcatttctcacatgatagtataaaatttagaaaaaaaatgaattaaaagtgagataagcgggctaaaaaaaacccgcttgcccaccccgcttgaatccctatgaattacatgagctcgatccctaacccaagccgccgcctccctccctcccccaccccctctccctgggctttgcttgtgccagtgagccccatcacataggtgtactccctcacgctcttgtctcttctcttatacctatacctagtgagatgactccgtcctgcctatatatttttttttatttctggtgacttacactatcgagacaccaccgttgcaaccacattctaatcactacaaatccaacgtcagttcccgccactgactttgtccatcgtcctcttctagcccctcaactctggtggcaatgtcgttgtatgtcacagtcttgctgcatgctcatgttcaccacctccttagccatccctataaagttgcccacaccgccccctaccacttcaccaccacccaaccttaaaacataatccatatgtcatttgtcgagttttgatgtcatcgccactataggttgtcgtcaacgccatcgttaagaagttgttgccgccgttgtcatcattggtgagtcttttgtcatgaatcccgcttcttcctctccccatgctataggttggaatataactttataaccattggatttagatcaagtgactgagatttgaccatgagaaaatctttgtcacctaaaacctagcaatcggtcaaatggttaatagtaacaagtaatcttggaagagtttggtctctcctggtaagatgtatagtactcaatccatctcaatttaatcatcatctaatatttttgaggtcttcctcttcccacaataatcacactttaaaaagtgtattttcgtttaaactcagtattaattacttcttatgtttcaaaatataagatatgatctatccagatttataatcctgatacacttacattttgagatgatgaaagtagtttttactacccacatggccacatgatgttaatctttaagagaaatgagatgcaaataataagatggctggccggctagatcgatcttcatgagcgaataaaaagatgcacggcggctaacgagataggcccaaggacgtacggccggctgtcgtatcaacgttagtaatagcaagtttaatagtataacccactactagatctaatttatttatagccgatctaatagtcaattcatataatagttgcttactatactattaacatatggtcccacctgttatacacacattacgtctttgagtccgtactgtagctagctataaatctgtagtccgctgctgttctctcttatcttttatctcattaaaatatgtttatagctggttaatagtaagctattgtacctgcctaaccgcacgacgattagtagccaacttggaacgaattgaaacggcgactgcgtctcatcagcagcccatcactggagtagtagtgtaaagtggccgcgccatgtacgttaattacgagctcacacacatgcccatgtgagataattaacccatgcatgttgccctaattaaacaatggaacatatgagatcgagttgttgattaatccttgagccacaacaatacattatattatactacaattcatggactgaaagatatactagctagccatgagcatactgacatatatgatgatggctatagctaatcatggctcaacttttaggtaaacaacgtgccaatatttgatagatagagggactatactagctagtgtgttgaaaggatttctgggtggaaatggcctttttttctttcaggagatctgataggagattacgtgcaagtattttaaaggttatataggttgataggtgtacatctgtagtcaagctcaaatgtagctcatgcattctattgctattatcattatatcctattcaaggcatatatatagtgcaacaaccgtcaaaccgacaaatttttttttatgattactaaaagaagtaatatgtacattacgagtaaatttcataaaattatagaaccatgactttcacaaagcgatattgctctatcgtttgcttttcagcttatcagcaacaaccaaaatttactttttaaattttaaagttaattttgatgttttcttaatcgtattttattattgatggtaaaatcttatcttattcatatatataaagctacagatttaacgtaaaatttatcatagaattctactccctccgtcccataatataagggattttgagtttttgtttatagtgtttgaccactcgtcttattaaaaaaatttatgcaaatataaaaaacgaaaagttatgtatagagtactttggataataaagtaagtcaaaaaaaaagtaaataataattcaaaatttttttaataagacaagtggtcaaaccgtgtaagcaaaaactcaaaattccttatattatgagacggatggagtatattatttaacctacactatgacaattcacaatgcactatcacaatcttaattcatcgcaatttctgcatgatctgttgacaaaatggcgacatgatgtgccggcacgtgcatataccattgttatgtccaggatgtacatgtagtactggagtcgtagcatctgtggaggccatatgctaccactgttacagattctcaggcaactcaacatccatcacatccatccgtttgtgactcggggcctatttggtttccagagacttattctaagtctatgtcatatcgaatgtttggatattaatttaaagtattaaacatacactaattacaaaacctatttcataaccttggactaattcgcgagacgaatcttttgagtctaattacgctatgattttaacaatatgatgctacagtaaacttttaatgg

SEQ ID NO: 3327 - DNA, 511 bp, Oryza sativa
gagtttgcaaagggaagtgacaaatcaacatggggctctgttagagccacgatggggcaccctgaaccattcccactgaagtatgttgcactagggaatgaagattgtgctccattcaagctgatataccgaggtaaattttgcataataaacaaatagtattgtccttcgtgttaatgctgcgatgattggctaaattcatcattctgttttttatcgatctgcaagggtaatagcactattttatttaacttcaccctttttagtactatctgattgcataatggagatattttggagaaataatagatgaaaaaattggctgcatgccttgtggcagaggccagggatgtaaaatatttccattataaaaaaaataatagatgaaaagaaaagcaagaagttaatttaccagtctgctgttatgtttcgaaacagactttaccagttttagaaggttcattagttttacatttgattgaggccaaattggctacgacgtataatgctg

SEQ ID NO: 3328 - DNA, 595 bp, Oryza sativa
tatgcataacaacggttatttccatcgtgacctgaaacctggtatacctttcgactatattctgttgaagttataggctgtctatataccctagaagttaattagccttctctctttcctctttagaaaatctgttggtgacagatggcactgttaaaattgctgactttgggttggcaagagaagtatcttccagtcctccttatactgactatgtttccaccagatggtgagtttgtgtttcaaatttatctctgtataaccagtgaatatgtatacaccactttatccaaattattgtgaaatggtgaaggtatcgagctccagaggtgctgctacaatcgtcagcttacacacctgctattggtgatgcctattatcccagcccctgcattttactacttccatttttattaatgccagctcaacatgaaatttgagtttgtgcatataaaactcgcattgcatgaaactactgaattatataactgatagatgtgcacttcctcagatatgtgggctgttggtgcaattttggctgagcttttcacactgtctccacttttccctggtggaaggtatgtatgatactgtt

SEQ ID NO: 3329 - DNA, 560 bp, Oryza sativa
acaaaaaaatgggacagcaattcgacgtggagacaacatcaccagttcatctcaaagaacttctgatgtcttcattgcagcacctacagcagaaaaagaaagagttaaagttgcaaggcctctctctaactctactgattctgcaccaaagaaagatgggatgggacagcgaatcaataacattagcatactggttcagaagagaactgatagtccaaacaaagagactgcgaagaaagaagctggcaccaattctccactgcttccaagccctgctaataccatgcataagggaaatggtaaggttggtcggccaatggagattccaacacagaggtttgacagtccatcgacttctagtgcaacagcagggacagatagaggaatgcctaggtcatctatcccaagcccaagtattacaatacgaaggccaaatgggcttgtacgaccacctgagagcatttccatttcttctaagaaacctgatgcaggaggtgcttcccctgctatggggaaggaaaaggaacagggtggaaggatattgcagaataatattatcg

SEQ ID NO: 3330 - DNA, 737 bp, Oryza sativa
gctaatatgaatatcagtcctcccaccatagcgcactagttgatgttttctcagtatcttctaatattacaaataaggagacccccaaaatttaccatgttcttaaatgtcacagtatccataattaagtctgcattcattttctgaaatacatagtcatcatcacaataatttgaccttatctctcttagatctttactgattccccttccaaaacttcttaaatattgttgaacgtcatcgccctcaacagtttttgttggttcatgagtgaaggagaaacaagaacttctgccttttggtgtgtcaaagccatcgagatcatcactggagctatttgtagttcttgaaacgggggtcatcatagtatgactataagtatggcctccagacacatcagatccagttaagctaactgagcactgggtttggttgtcagattcctgggagggcaaaaaatacttgttacagtgtgagaatgatcgttactatccacatcatatacctacttgtctttctactaaaatgctgctggcaaatcaacaagagtatgtaatatgattccatacaacacattaagtacaatgtagattgtagacaattcaggaatatttgagtggataccaataggaatatgaaaatagctacaagatgccaattaatggagagcaaagactgtactatttctgaaccacatagtaaaaaaatttaaatgtttaaaaaaatgttgatggagg

SEQ ID NO: 3331 - DNA, 844 bp, Oryza sativa
gaaatcaatcacctcatgtatggcaaatgcaaggatttttgaggagaaatcaaccggctgatgtatagcaatgttgaataagaaaacattttcccccctcaataaataaataaataataatatttggagtttaactttaactgattttttgtctaatttcttgctttaggttttgaagctggagccaacacatcaaacattgacccatggtccatcattggagatgaatcctctgttcacgtgacaactgatcgctcatcctgtttcagtcaaaatcctgttgctgtaaggatagaggttgtctgtgacgattgtccagccggtggtgttggaatttacaatccaggattttggggcatggtatgagttctatccatttttataagtgcattcctatatgaataatatgcaaaatagagcttgtaattgaaagtagtatcctttttttttacgacagtttacaataaacagtgctgccacagaaagaaactatagcaaagttatttattctgttcgaaatggtgaagaaaacaaataattaagctaacctattttttgtttgatttcaatttgcatttatcttttccttgcataatgctggttttttatcagattgttgtgcattgctcttggaaaagtgtaatctatagcttttcttcgaaccgtttcattttaccttctcatattttaatgggattttaccttctggttttgtgacgaatatgatcatttcaattttcagaatgtagaagaaggaaaggcatataatctggtcatgcatatcagatcattagaatcggtggagttgacagcttcactcacatgctcaaatggatcgcaaaat

SEQ ID NO: 3332 - DNA, 793 bp, Oryza sativa
ttatattttgggacggatggagtacaacattagtgcaaccaaatattaccacattgtatttcgaacatagattaatggataccatcgtaaaaagcagttccacaaagattgtacaagaagccatcaagagaccaaaaaaagtagaactagcatatcagtaccctgatagcagcaaccaaaaggaaacaaagtatgtgatatatgattgattctacccattagtttgtaaattgaacaggaaaacagctatattcaaatccacaagagaacactactacaatgtgatacaaacctaacgctccttatcattactccctctgtttcatattataagtcgtttgacttttttcttagttaaacttctttatatttgaccaaatttatagtaaaaatgagcaacattgaaaacacctaactagtttaattaaatttaacattgagtatattgagtatattttcataatttgttgttttgtattaaaaatgttagtatatttttttataaacttggtcaaatttaaagaagtttgactaagaaaaaaagtcaaatgacttataatatgaaatggagggagtattagtcaatttcaaaatataatcatcctcaaaagacatagaaaaacataatttttcacaacaaacaaaaaattattacacatcaaacagaagaatagaagatattactaattgtaacacaacagcttaacaaatcgtgccattatttgtcatttttcaaaagataatcatcctcaaaagacagtgaaaacttattttcccaagaaacaaaaacaaa

SEQ ID NO: 3333 - DNA, 558 bp, Oryza sativa
cagcagctggctaacaataggatggtcgccatctcgcacgcaaataaagagcgaatggtacacgagtactacgccggagtgctaggctccaccccttgaacttcaaggaagcacacactcagcttacccttctttagccctagccgacctgtcatgcacaacctcgaggtgtgcttcactgaggacaaagtccggaatgcaatcaaggacacccctaatgattgcgcgtcaaggacggatggcttcaccggcttgatctacaaatcttgttggtcggtcattaaagaaaatatccttgtagccctcaaccaactctttcatctggacggatcaagatttgacaaagtaaacaaggcccttataactttgctacgaagcgtgcggacgcaagtggcttgaaggactactggcccataagcctttgccacagctttgcgatgttattcacgataatcctatcaaagcaattagtgcccaaacttaatttgctggtcgccgacaaccaaagtgccttcatcaagtatcgttgcatccacgataatttcgtgcttgtacacc

SEQ ID NO: 3334 - DNA, 1314 bp, Oryza sativa
caatattttgcaggaggtgcttaaggaggagacagccgctgggctgtggttgaagctggaacagatatgcatgactaaggatctgaccagtaagatgcacctgaagcaaaagttatttttgcacaaattgcaagatgatggtctgtgatggaccatctctccgctttcaaggaaattgttgctgaccttgagtctatggaaataaagtatgatgaagaggatttaggtcttattctattgtgttcattgcctagctcatatgcaaacttcagggatactatactttatagtcgtgatactctaactttgaaagaagtttatgatgctttgcatgccaaagaaaagatgaagaagatggtaccctctgaaggttcaaattcacaagcagaaggcttggttgttcggggcaggcaacaggagaagaacacaaacaacaaatcaagagataaaagttcaagtagctaccgtgggagatcaaagtccagatgcaggtataagtcatgcaaatactgcaagagagatggacatgatatctctgagtgttggaagctacaggataaagacaagagaaccggaaaatatgtaccaaaaggtaagaaagaagaggaaggtaaagccgcagttgttattgatgagaagtctgatgcacaattgcttgttgcttatgctggttgtgcacaaactagtgaccagtggattcttgatactgcatgcacctatcacatgtgcccgaataggaattggtttgccacctatgaagctgtgcaaggtgatactgttttgatgggtgatgatacaccatgcgaggttgcaggtattggaatagttcagatcaagatgtttgatggctgtatcagaacattgtcatatgtgcggcatattccaaatttgaagagaagcctcatctctttatgtactcttgatcgcaaagggtacaaatattccggtggagatggaattttgaaggtaactaaaggctctcttgttgtgatgaaagctgatattaaatctgccaacctgtaccatttgcgaggtacaactatattaggtaatgttgctacaatttctgattcattatctaattccgatgctattaatctttggcatatgcgtcttgggcatatgagtgaaattggtttggcagaattgagcaagcgaggattgctagatggacaaagcatcgggatgctcaaattttgtgagcattgtatcttgagagaatccattacatgccactgactttgtcacacgtctatgatttaccactgactttatcacgttctacgatataccatcgacttttgcttaacttct

SEQ ID NO: 3335 - DNA, 1817 bp, Oryza sativa
aatatatgctgatgatgcagtattatttttcaaaccaagtcaacaagaagccaaggtagtcaaggcaattctacagatttttggtgcagccagtggattaatgaccaactacaataaaagtgcaatcactccaattcaatgcagtcaggaacaacttcaggtggtggctaatgagttgcaatgcaatattcaattattccctatcatctacctgggattaccactgtccacaagaaagccaacaaaagctgaggtgcaaccaattctcgacaagcttgcaaacaaagtggcaggttggaagcccaagttgttgtcccctgatggccggctctgcttgattaaatccgttctcatggccctcccagttcacttcatgtctgtattgcaacttccaaagtgggcaatcaaggacatcgagcggaaatgtcggggatttctttggaagggacagcaggaggtgagtggtggacattgccttgtagcctggaaagatgtctgtacaccagtggaaaatggcggcttgggcattcgaaacctggagctcttcggcaaagcgctgcgcctgaaatggccagccaatcgcttacatcagaaggataggccctggacccttgttgacttcagactgagcgcagatgacgagaaaatcttccaatctgcatctgaattctgtgtgggcaatggtagagacactaaattttggtcggacaattggctaggtggaggaagcattgcctggagatggcccacccttgcgacttttattggtagaactaagctcacagtagaacagggactcctgggacatcgatgggtgagagatttgcaaggatctctctcggatatagcaatgatgcagtattttcagctttgggacgaaatccaacaaatcaatctcagtcaggaggaggacacaattcgctggaagctcactccggatggttctttctcagtgtcctcagcttatgatctctttttcatggctcgtgagatttctccttgcggacagctaatttggcagacaaaagctccgtcgaaggtcagattttttctttggctagcaacaaagggcaaatgcttgacggcggacaacttggcgaagagaggatggccccatgaagatcactgtgtactctgccaacgcgaataggaggattgcctacacttgttcgtcacctgtgatttctccaggcgagtatggcagctgctgcgagcatgggtcaatgtggatttccctctgccaggacaagcgggagaggggctgataggctggtggatggtggcacgatgccattttcgaagcagctacaggagcaactttgacagcgttttcgccttgacctgttggctgatttggaaggagcgcaatgccagaatttttcagcacaagcagcagaccgtggagcagttactggaagacatcaaagaagaagtttggatgtggaagtctggaggctattttcagattatgtaatagagacatcatactttctttgtagccttcgggcttttgtgtatggctttgattgggggggacctgtccccagcctaatctcgacatcctattgtcgatataaagcccatttgtaatttgttccccttttccttaatgaaatttggtcgaccgaacctttcggccgacccggcaaaaaaaaaagacaaggttagctccttcagtttgcaaaatgcgaagggtgtgtgtgtgtcactgttgaacaagcaatttaaactatccagtccttcaaggcaaagaacttgtagagctggcagctgccacagtggaggaagcttctcgagatttttgcaaccatctaaca

SEQ ID NO: 3336 - DNA, 701 bp, Oryza sativa
aaacatcatatccatggctatcaaacaaaaaggagacgtgatctcattgataccaagttcctttttgatgcattctacatttttatctggtcaacttaataattcccatatcattactaatatccaaacaaacaactcgattttttcttagaagcaataaagggatatattataaataaagcgagttgttcaaactaagctttaattaaaaccatccttggcctaatgggctctgatacagtggaataattagcttttgatcactatgaaatcctgggatgtcattaaggacagaaacagcgtcccaacatgttagcctgataaacttgtgctaattaaacggctaaaccagagcaagatcaaacgaacaaattgagtaaggaaaatgtaagacttgcatctgttctgctgcattcggcaactcgctggcaactggcacgacctgcaatgcgtgttcacaagaaacttgtatgttagaccaacttgcgtaccctgagatatcgtgtgttacaatagattctctgtgttctttagaaagacaaggaaataatccagacatgacaaaataaaaggcagagtacggatatatctacaaaggtgtttatgtagcacgcactacttgacaaatgcgatgcataccacctgcatgtctaattgtaacagaccagatttttgtaatggagaagttaccctcttctaaa

SEQ ID NO: 3337 - DNA, 3749 bp, Oryza sativa
cccatgcatgacatactcatatttgtcagccagagttttcctgccagcctgaaaaggagatacttcagtgttaacttgcctaccgggagttttatctatgtgcctcacttttgtaattctacaagcaacagtggatacaaattatgcatccataactagcagcattcgatattacacagaatttcaaggcctacttgtactattgagtgtcgtacatgaaattactagcaaggggaaccacctgtgtaaagaaggcgctatctggggtaccatctaagttcaaagtaggaaccaagaccatggtaaatctgtcacctggatgcataggatagacatctgtggcaacatctaactgcatgtacatatcgaactggtcactgcgagcttcgatacgagaaactgtacccacaaaagaggacaaagaagcatgaagttatatttgaaataaatagcaacacattctaggaaaggttgtcatatataatttacagcatgtactgactgaaacatcagcgaacgcatatacaaatgatatggtgcggcaatcctagagtacagaacccctttttttaccttaattaaccacatgattctgcaagaacatgatttggttgacaacatagtaagtttgaaaggggaaaaaatatgaagtggttctttcttttcagttaggtatgcatcaataggtaaataagcttacaatatctaaatcatgagctgcaaagatacaattacaaagctcctcgattgccagataaacaactacgtgacgataccgcggtgcatcaattcatcgaagaaataaaaagaaaatcgtttaggggcatcctagcatctaacacagcatttatcgcacataacaagcagcgcaaggttttgaaaccattctcccgaaagtgagaaaaaaagagaatccagggattagtcacctctgtcaaacttcttgccatcagggtcgagcctggtgacagtgaagatgtcctcgaagagaaactcggccatcccaccctgacgtccctacatcagaggaagtgatcagtcagtgtaaaccctacgccatcgatccccccacaaaccactactaccgaagtgaccggaaaagaaaattcgattcgctccggcggagcaggcggactacttcgcagagatgggtggattgaatatcaaccggagatagcggaggaggttttatatgctgcgagctcaccggaagagcgggattcttcgtcagttcgtccgccctaggtcagggctatcgcaggcaggacggcggcgagacggcgaaggcggagcagtgctactcgggttgggtataaagccagaaaaggcaaggcccaattgggatttggctagcaggtccagcccaacttctgagtccccgcgaattttaggaggaataagttcatccgagatccctaaacttatcaacgaatccgattttttcgtccttcaaccgaaaaaacagatacaagacacaataggtccctcaactatcgaaaccggtgcaacataagtctcaaggctgtttggatgacgtggtgcctacacataactttaaaaatgtcatgttagaaaaaaaaatatttcaataatgtgtaattgagctttaattcaattaatgttgtacatcaaatccatctgagctctgcacagagcatttgttttttccattgtataataaaaaaagataggacatataaaccatttaaagtatattcatactacacatcgaacaaattaaatttaaaccaatatatatgcttgtcgtgccaattgaaaaaacaattgtactccaaaaatccattgtataaatatatattcttttccatcaaaacaagaacattgattgtttgcttcatgaacagtgattatttgatcaaataaaacacatatttccaaaagggataaatttgttttttttttacaaaagtggctatgtttaaattgccgatatcttaaattgtacgtcattgcagtgcgatttgttcagagtgaatgaaaagtgcattcataagccattccatttatcttgtttccaaaagtccatgatatgttagaaatcaatagggcataatatgtaagatattcctacaaactggccactggaattaacctgaaaaaggggggaaaaagaagcattggattatgctatcaggatgtgcaaatccgttcagaagaaaattgagaaccagtaaggcttgccaagtgcatcctacatggtcaagctcttatcttatactaccatttcagcacactttgtttttcagatcgatcattgaggatattatgataaacttttgctgccattgcgctgctgcatgcgccgcacatctacataatcctttgctctagggccagtgctccctcagcaaaaagatctatcagaataaacaaaatatcatcagaaaacacataggatatcattagaaaacagtcaggaatttcagtacagctcatcgcatatgcaatgtaagttgcagattgtttaaaacaaagatgaccctctttgcaatgcacaataatttacatttggtaacataataaatcgacaaacaaccatgtagttacctgaaacagatcaatacaaacatgatcaacaaagcaacatgatttataatacgaacccctagggaacatatcaaccatcgacaaactgctcttgatcaaatcaaagaacaacaaattggaacgcaacaaacacatatacacaggtaaaaagaaaagtagatcgagcgatgcttaggccttgctgtcaggcgggatcgatggcctgcgggagcagggatgaggagtcttgcgtttgacataagagaactttctttccagtctatataattaacaattggatagaattaatatactccaacaagcaggtatatagggtcattgatacactgcaaactcatttttattaaaaaaccaaagacattcctttgatcgcaggatgtgcattataccttcttggaacttgactctgtaaactgagcaatgagacgagggtatgtcgtgtcgaggcctcggatgatcccgcagcaattccaaccttgacaaatgatctgaaattgagcaatgatctgaaatccgagtattggaattgattcgggttaaaatactgtgatcatccgaggcaccaatttcaggttaaataccactaaccgctaagcaattccatcatatatattcagccaagtaaaagtaataggagaaattattgtaatgtcctaattttccaacccaaattaaactatttttaagtggagcatatcatcatgaaatttttgtgcctgagcttcaaagatatcatcaccatgcagtttattttaccaaaattagcagctgagctctatctcatcacgatcaaggaaaagggagaaatataattcaatgttctatcaataaaaactaaccttgccctggcaagttgcagcccaactgctcacgctgcacacatgtgctcgcaagtcacaattgatccaatatttgatgggatctatgatgtacaactataatgcagtgacaaccaatgattctcaagtatgctatatacactccacgttgcagaacagcaaattcaaggatccagtaaaactgttttattgactatatagacagaaggtttacgattgcatctgtgtaccatccgctgtcataatgagaacctggaaacaaaattcatataaatagatgtaaacagtagttgcatgatggaatcccaaaaatatttggtgaaatatcagtttttaataact

SEQ ID NO: 3338 - DNA, 533 bp, Oryza sativa
tttggcccggtcccaagcacagcccggaccgtgcctgggctgccccctcggcccggtgggccggcccggcaaggcccggtcaaataaaataaaagaattttgctgatttatttattgctatatccaatttatggaattgataccccgtttaattgatactatcatttagcaaaatgaaacatagcatatgcatccatctttcggctcgagaatttcacgggatagagatatggtataagaaataggctattaagtaactctaaatgaattgttttagctccggttcgtgaagaaccagagaagctttctagttatgaatcgggtatagaaccccctttatagcttcatgctgtttgaatagttccaattaatggaatcgaagtcattacacgagtgagtttagcaagtggaatatctgactttgaaggagctgctgcaagttctcgaattgtagttgtcaattctggaatactttaattaactatttgattgaattttcccttccttttatcctcccgtcttatatgggggat

SEQ ID NO: 3339 - DNA, 677 bp, Oryza sativa
aaaagatggggccgaaagaaacaagcaacatagaggataaaaacagcatgcatgaaactagcatcaccaagcaagagagctattcaaacagttaactgggctgtcacaagcaggcttgctttgccaaatgaaagcattaagcttctaatacgttctaagagttagtaacaagagcatcataaagctatatattcctctccaactagaagttgcaattttgcctgccacttcaaaaggattacctactgctactgtctgtacatgacaaaaggaacctgcatatatcactagcaagcacaaatcaatctcattagttctttcttttttagatgccctggttgactgccaaggtagtgctgcagatggcacctctttatcagccacaactgcttccgctttagagcttctcaaactcctccttgtcatcctcgctgatgggcgtgctctttcattttcttccaccagttcagatttgactcctctgcgtctagtcctcgaatgctggttggctgatgggacctgatcttcctcaggttcgttaacatcctcagcaaggtcatcttcaccctccaaccaaggccattcagtaccacaaccacaagctagctaggcatacatacacaaacaatttagaaagccactcctgttcatatgtgtaaagtggaattaaaaatagg

SEQ ID NO: 3340 - DNA, 2806 bp, Oryza sativa
  unsure (1)..(2806): unsure at all n locations
atagcattttagtgaacaccccttagttaaggatagtattttaatgaatcactttgaagggatagtattctagcgaaaccatccgtttgagatagcaaaatcacaaatttctcgccggcgctgcgtgcgagagaaagagaggagaggggtcgtgcgcggggtgggggtgggtggggagcgtgcgtggggagagaggggagggtaagggatccgtgccgttggattgtatgactatgatttgagaatccttggatttgatgaatgaagtatgaaggatgtaagcagtagttgatgaatctatctatctattattatattattaaatgaatagaaaaagaagcctccacgtttgttctcatggcctataaattctcacattaatcggagaaaaagaaaattagagtccatatagaaatacaatttagaaatagctgaaattcggaattaaaaaataaggaatattagaataggggactagagtccatatagaaatacaatttagaaataattgaaattcagaattaaaaaataagaaatattagaagaggagactagagtccatatagaaatacaattaggaaataactgaaattcggaattaaaaataaggaatattagaagtagggtatagagtccatatagaaatacaattagtaaataactgaaattcggaattaaaaataaggaatattagaagtagagtatagagtccatatcgaaatacaattaagaaaaaaatataaattcggaattaaaaaataaggaatattagaagtagagtatagagtccatataggatttttaaaactaactaaaattgggaataaccataataaaattaaaagtagagtttagagtccgtataaaaatacaatttacaaataactaaaattcgaaattaagaaaaacatgggaagaagagtttaaaatcaatataggaatacaatttagaagtaactgaaattcgaaattaaaaattaaagaatattgaaagatgagtttagagtccacatagaaatacaattagaaataataaaaattcagaaataaaaataaataatattggaagaagagcaaagagtatatagaaatacaatttacagaaaattcagaattaaaaaaagaaaatattaaaatacgagtctagagtccatataggaatatatataatttacaaataactaaaatttgatattaaaaataattaataactaacacgtatataaaatacaatatggatattacacattagtagttttgtaaagttattgcaaaattttaaattatgttgtcattttaatatattcgaataatataatgagaaaacatatatacttttatatgagagataatataacgatgctatccgcataatctgtgcgggccaccatgctagttatagggtagaagaagaataatcacctatttaatctcatctctcctagctaaggaagagcaaggaccatcggcgagtggccgcgagcccgacctagctgaccgtcgcgccggcgccgcacgtcctgctcatgcagctcatcccgtacccagcgcgaggccacatgcagcctctgctccacctcgccaccgccgccctccacatgcccgccgcactccacgtgtgcgggcgcgctccggcggcaacggcagggtggtggccgtgctgtcggatttcttcagtggacgcagtcgctcgccgccgaggcgggcgccccgcggttcgtctttgcgccgtccggcgtgttcgccacggccgccacgcactccctcttttgtcgcatgccaaggctgccgtcgccaacggcggatgcccggtcatgcgaaggagggatcgcagcacgagctgccacggcacggcagggaaggggtgccacgacgcggtcgtgcagctctcggcaccgcgccgcgcgagctccagctcatcggagacgggtggcgccgcggccccgaactcctccacgagccaccgcgcggggtccgcgtcgacgccacgggcgaagacgaggagcgctcctgccgccaacgccgtgtcgttctcccgcgtcgccgccggacctcctcgtgacccctggaggatggagagaggagagggaagagagatggagagaggagtaagaagggtgagaatgacatgtgggcccacgtgggccgcaccattttttaattcattcttttggtgtaactgacatgtggggtcaaagtttttattattttctaaatcaaattgccacgtcaatgccacatcaatgccacgtcagatgaagaccgaatcaatttagccacgtaggcgccacgtcagctaaaaccaccgtgcaaaccgccatgggacctatattgcattggtttgacagttgagggactcgttatatctggttttctggttgaaggacaaaaatcggattcgttgacaaattattccagaataagttcactagaggttcctcaannnnnnnnnnnnnnnnnnnnnnnncccttcaacgcaaaaccagaaatgtgtacccctaaactcacacaaaacgttcaaaagaagtcccatggcagtatcgactcaatttttgcccggttttactgacttggcgctctatgggccccacatgtgcgccgttgaggcgttaatagacgggggcgacggtgggcgagcgcggcgggctgtgagcagagcagcggtgcacgagtgcggtagcggagcggcgacgggctgcactcttcttcaacgagcttgggaggccggcgacaggcgagcgcatcaacggtcgggagcagcggatggagtagtggttaccgattccctttcatgggcccaccaact

SEQ ID NO: 3341 - DNA, 9757 bp, Oryza sativa
atcctggcacattgagtggggttccccatcgatctcctcggctgtgcctccctatgtcgcctctggctcggtctctgccagttcctagacacagtcggccttcctccagcctttgttaacctacaggagatcgttgttgtccactcctccatgcaggaccacgagcttcacgccgtgctcccccgctaccccgggctcgagagtctcgcacttgtgctaacacatgactacccgagatgcgtccatatctggtcggggaaggatggctcggacgacgacgcgacgggcggagtaggccggccgtgctcacccaccgccgccacgctctttgtctagccacctccgccggtgcggcccccttctccgcccaccacctgttccgcccaccacctgtttgtcgcgttcgcccagcaccactccgctaccgtgctcacccaccaacgctccatccgccgccggcctcccaggctcgctgaagaagagcactgcccgctgccagcctcccaggcccactaccgcgctcacccgccgccgctccgtccccgtctattaacgcctcaatggcgcatatgtggggcccatagagcgccacgtcagcaaaaccaaacaaaatttgagtcggtattgccatgggacctcattcgaacgatttgtttgagtttagggtacatattttttgttttgtagttaagggatctcagaaaatctcataagttgagggacctccagtgaacttatccgaagcaaaatgggctattaatagtagagtatatgattttttttaaaaaaaacagtaaatttcataaaaccacgccaattgtttggaatgcttttgaattatggaggagttatttttttggagtactccatatgaaatgttgcgcattgtccaacaaatagtatgaaatgttgccaacaagttccctatgaaaacatgttgaatcatttctttggaattttttttgaattatggaagaaaacaaataatgaacaataaaaagacaaaagtgaaaaactctatatataaaaatggagataatttaggtgactaaatatttgatacaaagtttcatatctatttttataaaatctcgtgcctatgattcaaaacgacctcccatagagataaagttgtagagctcaatagaatctactactttatagaatttatatttgaaattatttgaagcgtaaaacaaatattatgaattttaaagaggtgacaaaaaatgaataacaacttcaacatagacaaactgcgcaggtgctgggaggaaggtatgacgccatgagacgctaattttggactatttatcaagaaatgtccacaaacatagttgtactaatatattttaggctgcatagatcctgagttacgcgtaacgcatcaatggttaagaatcctaatacatgtaggagtaagttcactcagagacagatacacacaaactaagtcaacagcacgagcactgattagacaggcagacagatatagataggtggagtgtactgctaactagcagagtaacccatcccgaacaccacctaaactagcaataatatgagatacactgtcgttgtttcaatccgccaaatactcccgagtcatccatcttgcggtgaaagcgtatgcgactctagagcctgttgcttcgtagatgttgcaaggcatgctggactccctatcatccgataagataaagtgaggaaccttatgacttactgcaaaatactgaattgagctcatcagacaatgcatcacctgaaactgtcttccctgggttcgctcaattgcgcgtgcaattgagatactgcttatagcagtaaggtacagccttccgtaaccagtagacatgccaatcaattcgaaactgttgttaagaagaggagccccaaattcggagtcctcagatatacaaggattacactgaaatgctatatcgctggtagttccgctgattaaaagaaaacgacagaaatgaattagaatatattcaattaacataataaaaacgaagggattggaaaagcaatcaattgccttgacttacataatgttcccagaagtaaccctgcaatattcaggactgaagagatggatattctcatgcaggctgggaagcgtttcacacagaggaatctcttctacatcggtaatatcaaaaccttccggtatggaaacagggatcatggcgatatcagcattaaatagaatgtgatctgtgtcaacaagaattttttcatactcaaaagtcaccccgatccctaaaacttcctcataaaagtaatgcccgcatgttattacgatggcattttttgaactcaggccaataactatgccgaatatgtctttatcgccaggtgggtatgtgacggtaacacaaacaacacttctgctaatgctgcgtggaatctgggattgaacctgtgcataacgcaaaaggaggtttttggattcgaaaagaacccaaaaaaaaaattgtaagactaaaaaatgctacaagtaatatgagaaattcgcaccggctctgccatatagggcagctctggatggcggggagtgtcgtcttctaggactaggaggccggagtagagatggcaacgggcttgtacgaaaccacccccgatggccaccgtagccgttcactgatccgatgggatcttttcaccaagacggggaagagctccagggcccaggcaatgcgagcaagacggcggccggcggcgttgctcccagatctggatgaaaaagcgaaggagcggtgagcgctggcagatctggagagagcggctctgggagatgagatctggagagcaaggaatagaagagagcgagaaaacgtacccgcttgcgctgccgccgctgctgttgcctgctcgcgccgtcgcctgctcgcgccagcccgcgccgccgccacccgcttgcgctgccgccgccgttgtgtgattggggtaggagaagggagcggggaattagagtagggtttctagttggatatataatggcctgtttggcacagctccagctccaaccacacctctcctgaagctagagctcagccaaacagtttcagctccacctaaaatgggagcagagctgggtggagctctctctcaaaatgaagggcctgtttggcacagctccagctccacccctcctggagctggagctcagccaaacagtctcagctccaccaaaactgggaatggagctctctcacaaaatgaactagagttgtggagctgggtttaggcagctctacaactccactccagactcaactcctggagttaaatttaggagttggagttctaccaaatagacccgaactagagaggtggagctgggtttaggcaactccacaactccactacatacccaactcctggagctaaatttaggagctggagctctaccaaacaggccctatatatacaaaggcggctccatgaatttttcactgggtgctcctactccacgatccaaaactttttgacaccacgaactcaatttatacatatccaaattttgctcagacacaaatatgacaataatatctctaacatcataagtccgataaaataggcatttgagtcaaaaaaattgcaaaaatataacagtaatagtccaaatataaaaaatattacataagtagaggattacagtactacttcttttctactctatgagctctcgtacccatggaagtgttaattatgtcatctctttcaatgaaagtattaaacaatcattcaacaatttgtcacacgtacaatttctcggcttattcttcactagacataatgcagaaaacaatctctcaacacttgttgttgccaccggtaggatcaataccaatttaaggagcaaataggccaaatcatagaggacattgtttgtctcgacaagtttaacagagagctcaccaagattttgtaggcttttgaatctttcattttgtctcatgtcttcaataaaattcgctgcttggaattattgtcttattatatccatgcttgaaatgtccttaggataaaacttggcaagcttaagtactttttgtgcatcataagaagcaaatgaattagaagggtttaatgcagccatgcaaatcaacaactccatattaacctcatcaaacctattgttaagctcttggctaatcttgtcaataacaccaatataaacttctcttctgaaatgatcatcatttgtttggtccagataaaatcttggagatctcccatgaggcacatatttctcatctaagagtggaactttaatgctatgcttagtgcaaaatgaaagaacagtcccttcatagaattcttcccaaccatcatttcttaatttttgcattcttccctttgccaaagttactagtgtcattgcattcacaatatcttggtctctcttttgcaaagacatagacaactcatttgtatatccaagaatggcaagcatcaaatgagcactaaaaacaaagtcaaatgattcaaaagccccaaccatagcatgtttttttggccaatcgtctctttgtgtgagatctttaccaagagttataagtacatcctgaattgtgctatacataccaataatatgcaatatagttttaaaatgagaaccccatcgagtgtcaccaggcctagctaatcccatatcttgatttaatccaatcccactttctatttcacccaattcaagtgcttccacaagtttttgagctctaacatctctaagcatgtcatgacacttacaagaggagccaataatattcagcaagtgagagacttgagtgaaaaaccatacacaatcatcatttcccttggcaaaagaaacaagaaccaattgaagttgatgtgcaaatcaatggatgtaataggcagaaggagactctttcaaaatcaatgtcttcagcccattaatctttcctttcatgttgctagccccatcatatccttgaccacggatttgagtaagagtcaagtggtgatcagttagttaagtctgaattgctttcttaagtgaagcggaggtggtactagctacatgaactactccaaaaaaccgctcgcatacccttccaaatttgtcaacataatgcaaacaaagagctagctgttctttatgtgaaatatcactacattcattagctagaattgaataatgatcatcaccaagttcttcaatgagccgcctagtagtttccccgtcacaacattagataatttgcctttgtatgctagaacaagtcaagatgcaatttctaggagcatttttcaagaccaaccgatcaacttcttcattatttttagcaagccatttcaaaagttcaataaaattccctctattgttagactcttcactttcatcatgcccacgaaatgccaacccttggttcaaaagaaatctcagtcatctaagtgaataagttagcctagccttataacaaatgatcaattaatatagtagctcaattagagagcagattttcatggatgccaaattttgtggactgaaagtaaagttgtaatcaactaaacatctataagcattgctgaagtgtaaacaataacttcaggactgatcattttaggagcatagtgacaaagtgaacttaataactaggttagaaacaacttctataataagagagaagcatcttcatggcttattgaactatgctgccttgcatgtgaataaacctcaagatacaaaagggtgataatttccttacacctaggaattttaattttaatttacaacatgtatacttatcgccttgaaattgtatgctgccggagacctgcgcaactaggggcaaattgtcaaattatagaatttgagtgtttgtcaattgcaaaaaaaaatttaatattaattgttcccgttgcagcgcacgtgcacccaactagttgctaaaagaggagcatgccattttttcccctactttcgaaatgaattcatgtctgaaatgtgtttcatgggggctgcttacgtccttctatcgtggatgaggactgagaacagtgaaacaagcttttgaattttcttcttgttgagattataggcatataatgatttaatctattccataaataaatcatgacattacagatgaaaactagcatgaacgcatcattagatctacacatataaactacacagtataacatgaacagatcaaatatgcgcaacatattgaacacgtaccgaggtggtagaaagaccggctactcggcaggaacttttcgcgattgcaagcgtctacgaaggcacgcagcacgcgagcgaagaggaagacgagccgtcgcggacgaacagggagcagtcgcgcaaagcgcttcccaaaaaacttattgccgccttctcccggtgcagaacgtcgaaggcagaggttccagagacctgctctcccgatcgcaggtgcacgccgacgagcgggatggagtaatctacgagcgacggcgcagcacagagtcggaggcaaaccctagattgatttcgcgtgtgttgcgtgaagacggcgggtcgatttatatagagaagggtcacttgatcagggcgcccgcacgatctccactgcgcgtaaccgaactggataagtcgcgcgtaacttatccggactccacgtcgttttgcacgcaacggatttttcggaacgtttccaaaacaaaaatgaatccaaatttgcggcaaaacaaaactgcaaaaggaggctgcatctgcgcaagggtgaggagccaattttgcggaccattcgacgcgtatgtcgtgcacgcgcgccgcctgccctgccctgccaggcaagcgagcgcgcgcgtgtttcccctcttctctccactacacatgcttcaagtggctaggagggcatcctcccttttaaggaggtccccctctcctagaataagcaaggtggtactaaactccacattcatgccatcccatgaggtgggctccacgcatttaacaggtcaagaagcttcaatcaggttgaaggcagctagctggctgaagctaggaacatgttaggatttgtttgacagcaaagaggttcttatgaaccgttgataaccacatgataaagttcttatgaaccattgataaacatgtcggggagaagattagcttgacagcaaaaaggttcttatgaactgttgataaacatgttactttgtttcgctgtttatgaacttttggccctttttccctccctacatttcatgtgtttgtttgttcttgtgtctagagatggagagagaaaaagccagataattgtcatggatttctttttctcttttcttttaagtccgaattgtcatcatcatgaatttcattgataagttccttttcttgtttcaagtggctcttttgatagaaacgctagtgaacactcatgaagcaataagcatgttctgaacttttttttgtctagatttgttaagatcttgttcatgtttatttggaatatatacatgcaagttttcattggatcaagatgagacaagaaatgttcttttcgttcccctctttgcctccacggtcagataattaaaagttcagttcttgtggcatcactatttccccttttttttttcacagttgcttcctgtatgtatttttccacttttctggctagctccaaatgtgatgggttagtcggcctggattcgaagcttcacctcttctatttatttgatattaggtcattccctaatatttacgttttttaatcaccattgtaacttgtaactgcatttgttcaatgattcgtttgtaagtgaaacaataatgtaagtgacctcctgcttacatgtacaaaaacatgaactggaatatcttacgatatgatatttgatgaggacagcagcacacaccttgtccaatgtccattaattgctcactaatttttagataatggaatataacatccagaaaagtgtgtagttcagataaaataaaacacaccaaacaaaagcagaggaaaccaagccaaaataaggagaactcatttattcaagtctatttgtgaatctcaatccataattagtaaaaagttacataaccactgtctccaacttgtgacatgcaacttttagtaatggaaatacttactacttattaatggaaattcaatagagtccaaggaaagtaattaaggaaaaagggagaaacaaatggtgtatccactatccagaatattgatgcttcaacacagccaccatctaaagccgtacaaaagcaagttatttttttgaacgaaacaaaagcaagttattgtcctagtcaaattcaactaagttcaaatccatcatctctctctactcaaaccagcaaaaacaacttttgatacattttcatatgcaactttcgagtttttaaatgaaccaagaaatgtgaagcacttgttttggtaagcctttgaacaactttcaactgtgcacatctattgtttcctatccccgaataaaatgtaccccactcatagaaatgttttttacacacaagtgcctttacagcagccacagtgtgtccaacgcactttacaaaagtacggagtagtagttcacgctataattagaagtttgattgaaattggaacaatgtgatagaaaagttagaagtttgtgtatgtatgaaagttttgatgtgacagaaaaggtaaaagtttgaaaaaaaagttgggaactaaaccaggccgtactactactacgaagtgaaaggaaagggtttactgcgtgctgaccctcaagagctatgtaagtatgcaaccaagaaaacactccagactgcaagtttaagcaaagcaacagtagctgtttgcaattgcttgttcaatcatcataactatcgctaaacaaaagaatttatttcactgtattatccaccaatgcgcaagccgcaagcaccaatttttacaaaatgcaacagaagttatcaaacaaaacaaaataaatgctttagacaagatcagccaagcacaaaagagaactcaatttattcctctttttccgtccctcttctgtgactgactgactgctcgagtgctcggggatcaatcttctagagaagggaataaatagaaacagctttgatagaatttatttcaaataaaatcaaaattagcaattagtaaagggcggctaaaattattttattgcaaacttaatagattggtatatactacgtactgtgcctgtcgaggtggacgataatgatgaattgggagaggcttaattaggtggagattggagatcaataagtggaattaaggatgacctctgatcttcacattagtgattagtgatgacgtttttttgtgcgcaattcctcttttaagtggctttcatgatgcgactggatttagtaacgggccgacgacggaaacctgtttatttgggcctgattggcacagatggtagtgccatgtgcactcttgaaacgttgatttaagatctaacggtttcagctaattggggtgatgtggctaattctcaaagcagttttatagctagtggataccaactataccaactatacagaaagaagggattcctccgtccaaaaaactggacgtttcactgccccggcgctgtaaaaaaaagtgttattttagcaatttacattcatggaaccagaacgtgccgagttttgatttttttccctaccgtgatggcatctcgcgcagggttccccttaccttttatggcgcgattaccgccaccccctccccccccccccgcggtaaggcgg

SEQ ID NO: 3342 - DNA, 5729 bp, Oryza sativa
aaaccgcgtggtaaccacgagacatacccgtggttttaaaaactgaaaaggttaccgtgcatggtaaccgcgcggttttgtaaaccctggtctctcgtcaatttagtcggtatggatggataagagccacatgcgtccgttctctctctctctctatctctttcttctcctcttctcccctcctccccttggctctctctctccatctccaccgcgcaggagagcgcaaccctagctacagcgcatgcaggggcttgtcgtctcctctctttcttcttctcttctcccctcggctctctcgcaccctcccctcgcctttctcgcgcgtcggcggcggcaccctccataggaagggaggcgggggcggcagcggcggcgtctgcgcctcccctccgccagatttggccgggagcggcggcccggcaggaggggaggcggggacggagggaaggcgacggcccggcggcggcgaacgggagcagaagcaaaaatcttgtgttcatgttgggttcttgaagtgaaagtgaaattgctcgatgcatcggctcgatgcgtaatggatttgtgtgaattttattccttttctttttctggggttatcagtcggtgtagttcttatatttgaaagtgatgattgctcgattgggcttttaatccatctttgattttgtgatttgcccgccgtaagcgattaggattttgaatcgatctctgattcttttgtgaattggccagcgtacgcaatgaactcatacggatacggacacaatcagtgacgacgcgcaaaatttgtggcaaaaacatcttaaacttttataatagataaagaataatggtataaaataatagatccaccaatttaaatgaaaatcgacggtaagattatagaatgccacgtggcaatctgggagtgcttgtagaaacgccacatgacggcttagaaacatttatagaaagattaatggacttttagtagataatagatatgattaagtggagccaggtcttatatatttctagtttcttgatccaatagttataattctagttccagatattggctccaggatggctacggttcttgccgtgatgctgtcggcctgtcgcaggccgctgccctcctcatccacgcacaagcagtcaagcacctctcgtagaagctaaacctgacctggtgcagtagcatgcagagcatgcgtggactaagctacgatttgctgcacagttgaagcatgaataaagggctattatgtcttttcaaaagaactaacggtgcagtagctgatggcagtgataaatcgtaaccataacaaacttagggcgtgtttggatagtgccctgacctgatcgctctcattcagacgggtgcatccaaccacagaccaccaaaatcggacgcctgagaatcgtgcctgacttaggcgtgattctcagggtgtgaagcaaacaaacccttaatgacatataatatattttctccacaaaagcaaccaacgaccagtcgttgctgaaacttcaacaatagttgcaaatagataatatccaaaggcgccaaaataagagcggcagatattaaaatgtcaatagttccaagcatgtaggagtacttgagttgatcctaaaggataggctaacaccgctctaaagaatagtgctgcatctcgatgcttacagataatacagacgcatgtgtagaaatgcttaagttgatcttatctccatgctaacagattagcctaagtacggtactgatataacatctggatcaagtcttcaacagggatcgtaccttcgtccacctgaaaaagattaaaataaataaacaatttactttagcctacaattaaacaaatagttcttttagcctacaatttagagaaggataactcacaccaagcctcgtttccaaaaaggtgatcaaattttcagtgcaaactgcaagtgatgcttggtatgcgccacgccctagtattccaataaccttttcttcatgcaggaggggacttccagagtaacctgctttgtttgggcatgtaaattgaatctctcttcttgttatatgaggaccatattccactttgcatggtgcactgcagatcaattaaagaaaaaaaacacgatttttttgtttattagtacacagctcaacgaagataagtttaattctcctaacaaaataactgaggtacaaaatataccttattccacctggggatacagtaggtattgttggcataattgcagtttgaatattgcagcctgggagttgctccagaaagcagtttcctaggaggaagacaggagtgccgactggcaaatccactcccggggcaaaacgcaacgccggcagcataattggcatgttactaactaagatgaaggcaatgtctaaaaatggatcttctaatattaattgaccttgcatgtcctcttcaacaccctgcagaaacctaatacgcagcaaatccgtagctgggtcaaagcccttgcttcctttgaccacatggcgacatgtgagtacaatgcacttgccatctgctgtagaactgatgataaatccagagcccgcaccatgcataacgactcgacggccatcaatcactttgacagggtaaacgataacaatgctgggccgatgttgacgagcacgctccacatcgacttgaggtggattggtattcaaattgagacctaaaaagaaaatgaactactaatttggttaaaataaggaacccaagagtaatcgaaagggaactgacacattggatggaactgaggaaactgcgatcgagcggcacacgcccgcaacccgcgcaatgtcgccgaccagaggtacttccctctcgcgcggcacctagctagtccacgcgatagatcgatcgaggcgcgcggctgctacaagtcggggtcgggcgcgaggcagacgtcgccacgaccaccaagcatatgctgcggccgcagtgaggaaaaaaaaacatatgtatagtagagagagagaaaaaatacattaagcaaagaaaaatctttcttgaaaagaaaaaaacaatgcgaaatatatactctgttgctcatacgaatcaaaccaggtaagaaaaacatacactattgctcatacgaatcaagccagcaagatataatatacaaagatgatgtatgcggagagggagaggtggcgtaccacggcggcgatgcctttgacggtctgcgcccctccgccctcgagtacgtagacatagcaggcgtgccaggtgtttcatgaatggtttcatggttgatgagaggagtggaaatgagaggagaggggaggaagaacaagctagaggaaggggaagctaaagtggagtagaactgcattaaaaactgtgagagttctcttccgtcaccatggtcacgagctgctcagctctgctctctcctctctgcgtggtttccacttacgttcataacattcatatgcagcagattttgaaaaaggtgttgacctcccttttttcctatttggtgaagaagctccgctgtggcgctggagttctttcttttcgtttgcacaaaacccctcctacttgtttagaaatattatgttctatagttcacaagtgcactttttggcccaaggtactctaaaaacatccttttcatatgacaaatgtcttcggatcttttacatgcatttcatagatttttgttcttgcaaattgagcagatccaaccttgacgaaccagattgagttcttggcgtccgtgtttgttccattgccgccgcacttcacttctcaacttcggtactcggtagctgctgctactacttactggactacctctgtatataaaaaatggcttcatcatattcaaagctaatttccttttgggaccgaggtagtaactattactaaacggcataccaatactctacaacatacttctttcataccaaaataaacatatgtaatggtatacaaatactctacaacatacttcttccatcccataataaatatatctaacggtatacagcaaataccgtattccttccatatcaaaataaacatatctagaattagatggaatattatctggtgcaaagaatctggacatgtttttatctagattcgttatactaggtaatattctattatatcttaggttgacttattctgaaacgggggagtaagtaattaggcaaattttacaataagacaatgcgactttacgattttagctcctaaacacgtaaaagacaatctttggaaaaaaaaatacactgtcaaaacactgatgcttgctgctagaaatcgcatccattaaaatatacctttttatcaataggaaagaaaaacaacgtggtaggtcaaaaaaaaaaactcatgtcagtccttccatctctctttctccctatccccatgcatcgctccctcaccacgcctagtgtcagttaggcagcaccattagcagcgcgtcgtgcatgtcctgccggtcatgcccgcgccgcacgtccctcctctctatctcaatctctctccctctcttcctccctaaattaatgtggattcttctcaatacattcaattttgccataattttatctttacatttgatacctcaaacaaatcaaccaaagcagtcaaacaatggattatttctaaaaccctaattggcaaaaacattgcatcactcaaatatgtattaactcacatgaatgtgtacaggtaacataatttattcaaatattagtttatttatcatacaacaatatatttttccagaatttatttcatcagtttaaaccttaaaataaattcaaacagtgctccaacaagcctcttttctttattttcctgagaataatataccctgaatttttttagtgcaacttggaaaaatggaaactagacacttaactatcatcacaaaaatccacactattttatcagccccctaacttaaactattgaattacaaagaagtgaggacgaaaataaatgaagaaaatcctgaaaatcactcaaacagtatgttcagtgatttgcttacccatccttctcacgccctggacccacttggcagtcaccttggtccttgggtcgtttcccttgtgtgcaccatctccagccgaccaaaagacacagaaagaaagatagtagagcgagaaggaagcggtgccgacgcgtagcctcatcgtgcccaacgccgaacacgtggcctggtttagttcgcgaaaaaaaattttttggtgtcatatcggatatttgatcggatatcggaaagagtttttggacatgaatgaaaaaactaatttcataactcccctgaaaatatcgagactaatattttgagcataattaatccattattagcacatgtgggttactatagcacttatggctaatcatgaaacaattagactcaaaatattcgtcttgggaattcccttttaactgtgcaattagtttttatttttatctatattttatgctgcatgtatgtgtccaaaattcgatgtgacttttttggagaaaaaatttgggaactaaaccggtcctttatatcctcctagctgcctcgccttccctttcatgttcgctcctgagttgaagaaactgagggggagaacttcagcccccctcttccatctcaacctcgtcgccggccgtgaagacgacgaccgtcaccagcgccgatgagccacgattgccctctcttttcttgtgttcctcaatctactctcaatg

SEQ ID NO: 3343 - DNA, 508 bp, Oryza sativa
caactgattgcgaagaagctctgactttgcttcctgttataaagaaagaaaaaacataaagctttatgactgtaatagtatgccgtcaaggtagaacatttggaagaaaatataaaaggtgctcaagacctgttcgccgagggcttttcttagtttattgattagggttattctagccatgttgacactttcaagttgctcaatgcactgcttaaggactgtttcctgcccttgaaggtcagaaatcaacgatgatccttgctgaatacctatgaaataaaaaaggagtaaggtgcgcatgttttgatcaagaatcgaagtgaaaggctgaaagcattatagtgtcaaagcatcatttcttcatatctggtctccaactttgtaaatacagaaagtcagggtacaggtttccgattagagtgaaatgcatggtcggtccttaaaattgagcagtggtgtcacttgggtccgtaaacttgaaaattgcgcgtttaggtccatgatcttg

SEQ ID NO: 3344 - DNA, 910 bp, Oryza sativa
aagtactcagttggcgccggcgatccaatcaggatttataccaaactaaacgaaattgaagttatacaaaaaaaaaataaagtcaatcgaaatggttggcgacatagcaaggattagccgtaccttctgatgtgctcccatatttcaaaattagtgtgcaatcaatttgacaatggagacgggattcgacggcggcgcaacgcggtcggagcgagggggcaccggcagtgtcggaacgcggtcgaggaggaggggcgctttcgtgccggcggagtcgatttggatgaggggaggaggggagttggcggggaggggcgccggcggcgtcgcgcgcgaaggcgggccgtcagaatcgtctgtggcggcggcgggggagggaaggatcggagcggcgatggttagggttaggcggcagccggcgctgagaaatttgtgatcttgctatcgcaatttaaaatgttatcctaaactaacggaggttcactaaagcgcccttcactgaaatgctattttggatttttttgttgctagaaatgatttcgctctattttaatttttgttctgactaaaatacccttgtctcttttatctgttttaccggatcgaatcgatctcatccagcgtcatcccgtggcttcggcgttgtgaggaggagcctgggagcggcatcggcagcggcgacacccgtcgcgcctgcgcattggctccggctccagcgccggcgccggcccccaccactccttcacctgctcggctgctcctccttgttcaagatctcctgcatctgctttctggaatggagagggcaagggtacatgcactgatgcacacgaactccagctgaccatccctgatagagtcgaacaatccaatggacgggccgacgccatgcacaggggcgcaacacacg

SEQ ID NO: 3345 - DNA, 8532 bp, Oryza sativa
gatatgattgcagatgtgatgaggaagcagtttgggcttaagccgaaggatactggaaacttgtatcggcatccataccttgagtggtttgagagggttccattacctaaccgatacaaagttccagatttttcaaaattcttaggacaagacaatgtctcaacttatgaacatgtcagccgattcttggctcaatgtggtgaggcatcggctattgacgctttaagggttaggttgtttcctttgtccttgtccggatcggcatttacttggttttcttctttgccctacaaatctgtcaatagctgggccgatttggagaaacagtttcacagttatttttacagtggaatccatgagatgaaactatctgacttgacagcaatcagacaaaggcatgataaacctatgcaggattacattcagagattcagacagataaggaataggtgctacagtttggctttgaccgattcttagctagccgatctggcttttcagggtctgatagctccgatcaaggagaaattttcatctcaggagttcgaaagcttatctcatcttgcacagaaggtaaccctgcatgaacaaatgtttgcagaggctaagaagaatatcaaaaagatcaaccacgtgtacccttacatgtatggttccgatgaagaggatgattccgaagtagcagtagtcgagtgggtcaggagcaagaaggttgtgccattgtcacgactggaattaacccaataggcattccatacatgcgtgtattattccttgtcccaggaggcaaggtacaccaaatgttgatacaattcagagtttaacaagcggaagcgtaaatagttaatttattacatgggcgacgaaggcccagcacacacgaagataaacgaaaaacagctgaagactagggcgacgaccacagacacttgacggcaggcacgagctagacactaaagccttcatcctccaggaactcctcttctgggttggggaaaaaattgagcaagattgagtacaaccaccgtactcagcaagacacacccacgaatgcagaataaatgcaaaggagtacaaggcggttataataaaggggttagggtttgcagtaaacagcattaacaagacttttagttgctcagggtcattttgtaaagacgatcctagagctacacagtgttattaatcaaggccgtgaacccgcacaaacctgccttaacccaagacctacgatgattcagactaaactggcaaccagacctgggtcccagctcatcccaagccaaccctggccaaccattccacattttagttgttaaccatgttttaagaaataaaccactaacttgggtacattgctaggctttgatgtgcactagggttcccgatcttccgaaaggttctgataaacaaatatttgggcggagtcgcgacacaaatcgatccggcttcatgaacgcgcacgctcttgagccccgcaatcgcagcaccacgtctcctctggttatcacccgtgtcgaaacgcggatgacctcgccgagaaggctaatccctgtttgccaattgaagaatacaaacaagaatgagatagaaaacaaccaaaattgcagatgaatgattaagctcacaagttggggtcttacaaaccgatctagcggcgaaactgttctcgatagaataatctaagaaaaacccaaaaacctaaagatggcggcgggtactgatacatagagtttagggtcgtgcaaaccgctctcgatgcaaccctaatggagaacccaacacgatacacggcccaaaggcccaaatacggtgacgcaacaccgggatagattctagacatcaacttgttctgtcgattcccattgactcggaaagaatttggacgtgggaccaaaaccattggaaatgcgatcttcttagctttccatccatataaagaatgccccaatccgagcacgtatgcgacctgggcgcccattttagtgtagactggttctagactccgaattgcacccgaggtcgacttggtttgggcctccaccttgacttggacatcctcgaggatcctccatggctctaagtccttctccaagtgtctccttgtcccctccattgtacctaatcacaatataatcattaggtagcaatctattctcgaattcatacaaagaagaacataggaatgagctcacctctaaattcaattgtcgcgcacgagctcttgttatcggtccttgaatgaccgttggaggattgttgtttgtatccgaagtagtgatgtccgcattaggcttgcccataaccgagggcgcggctattcggatagattatactctgatcagagatgtacatctttaccgacaagacacgtcttcctcatgtgtaaccgtgcgccacataccaccacggcatgcggacggaagacgtgacatagttcccaacccatcctagccataaacaagagtaccgacccaaccctggctacggccggaattcctgagacaggtaacctaggttgagcccctagcagcaggacaccggccctgtgccatgacatctcgactaccgggccacggctcgtgtagccttcatttgtcctagaggtgtccatcgagccccgacttcgtccatccctatccgtgtacttttgcccatgaccagactgagccacaaactaagccttacccactagacatgtggaagtatggtagtgctttgcaacagaggcccaaagaccggtccttatagtggccgaggtgctactatcaaaaccatgcacctcgagcccagtctaaaactattttgggggttttgaatggaggagaaggggtatgtccattttcacataagccaaccattccataatatccaaatgatatgtgcatttccaaagtctaaagtaataaaaccacctaatattgcctaatttatcagcgaagcatctacctaaattcatactagtggaaccatgaatagagtacccactagttggggttttgtttatcctagggtgaacaaggtaataataacaatagcaataataatgaggtcataacaaaggtaaataagcatggctaaataaaacagtgataacgcgggaatttaaataaagcgataatggaataatttaaaccaaaataattttataaactgggattcagtatgctcaaggatgatgtgacttgccttgctcgcttcccaaacgtcggcttcaacctccacgtagagcggatcttctgaagctgcagcgtctacacgaacaacggaaaggaaaaaggcttttactcaaataaactccatataaaaaacagaaacaaaccataaaaatgggtccttgacttcttaaggaaaaattagagacttgaacggtccaagtccgagttcaaacgaccaagttatggccacttgaagtttatatgctctttaagtgaatatttgcgaattgcttcatttaaaattttagttaaaacaatttattgtgtgagctgaggggagggggcgcgcgggctgggtccaagggagtggtgggccccatgcggcagcccctcggtccacggtggaccgggtgcacccgcgggctcaccagccggcgccgtgggccccactcgtcagccgcacctaagggcacgggtggctgacggctgggccccatgcggcggccacacggcgcgcccggaggcagccacgtcggcgtggccggcgggaggcggcggtccacggctcacctcggtcgacgacggcgacggaggaggcggtcggtggcggagggagacggtggcgcggctcgggttgacgaggacggaggtgttccggcggtcggcgagctcggctaggcggtggacggggtcggcggcggtgcggtgaagccggaggagacgacgtcgaggcgggggacggtcctggcgagcggctaggcccggccgaaggtcgacggcgacggcagagagagaggacaacggcgtgggcgttaatccgacggggaggaggggcggcaaatggcggaaacggactagggaggtacggggagggtttatatagggttgggagtgagagagggcagctagagggtaaggaaaccagcgtgggggtcccggtaggcatcaatggcaccggcgagatttgcgggagcaaatctggccgtttgaatgcgggagggggaggggaaaatgggggggaaagggagagggaatcacggggaacatttcccccctcttaattgcacgcgggaacagtcggggcggcggatttggcggcggtggcgctaggcgcaggcggagagagcggcgggaggaagggatgacgggtgggccccacccgttagcgagggtggcgggcaggcggaatttggccgagagagagagggaggggatttttagggttttctttttatgaaaccttttcgactttgtttatttattgataattattatttgtgctgtgaaaattctactaaaatttatttacacattttaggcttttaggaaatgtacaaaaatcctccaagccttatttgacttttaactttgcacattttaattttggaggctttcacttggattttaattattctaggcataattttaatgatatatttttagggttgtattgggacgtgataaacctaccccccttaaaaggaatctcgaccccgagattcggaagaactggcaaagaggttgggatgggctgccttcagcttgtcttcatgctcccaagtagattcttcctcggcgtggttgctccactggagcttgcaaaaacggattacccgattccttgtcctgcgctccattgtgtccagaatcttcactagcttgtccacgtaggtcaagtcttcacgaacatcaatctgctctgaatcggcctgctcggacggcactcgaagacatttcttgagctgcgacacgtggaacacatcgtgcacattgcccaaggatgcgggcagctccaactggtaagcaacttcttcgcgtcgagcgatgatacggaaaggtcccacatacctaggtgcaagcttcccttttgtctgaaacctgtgcactccccgtagcggcgtgacccgaagatacacaaaatcgtccactgtgaactccagatcgcggcgtcggttatctgcataacttttctgccgagactgtgccaactttaggttatcccgaatggttctgactttagcttcagcttctcttaggatatcagtcccgaatacttggctttccccaacttggtcccacaacagtggagtccggcatttgcgtccatacaacgcttcatagggtgccatttgtatgtaggagaactcagcataggggacacttttatcccaggtcttcccaaaatcccgaacacaagtgtggagcatgtcttctaggacctgattcagacgctcggtctgtccatccatctgcgggtgataagcggtgctaaaattcaatcgggtgcccagctcttcttggagcttcttccagaagtgaggtgaattggcttcccctatcagacataattttcttaggaacgccatggagactcacgatcctggcgaagtaaagttgagctaacttgttccctccataggtggtcttcacagggatgaatcgagccaccttggttagtcgatccacgactacccatatagaatcatatccaccttgggtttttggaagtccggtgaagaaatccatcccaatttcatcctatttccattatggtatctgtagaggttggaggagtccggccggtcgttggtgctcagctttgacacgccgacacacatcacaaagggccacgaactctgcgatttccagcttcatactgacccatcaatatttctctttcaagtctaagtacatcttcgtactgccagggtggctggaataaggactttcatgagcttcctgaagtatcaactgtttaagttccttgtcgtccagaatgcatacacgatttccattccataaggttccgtgttcatctttcgtgaagccagcggctttaccctgcttcatattcttaaggatcccgtgcatatccggatcattcttctgggcctcgcgtatttgatcaagcaaggtgggcttggcttccagtgcagccaagaatccatggctaatgacacttaggttcagggcttccaactgttgattaagttctggtggaatgccgcggacgcaaagagaactgcaatagcctttttgactcagcgcgtcggccaccacgttggccttaccagggtgataatggattcccacatcataatctttgatgagctctaaccatcttctctgctgaagattcagatccgactgggtgaagatgtatttcaaactcttatgattggtgtatatttcgcagcgatttccaaagagataatgccgccagatcttcagagaatggaccatagcggccaattccaagtcatgggaaggatagttgccttcatggggtcgtagctggagtgaagcataagctaccacatgaccttcttgcattaacacacaccccaatccttggcccgaagcgtcatagtacaccaggaaatccttgcgattatcaggtaagattaacactggcgaggaaaccaacttttccttgagagtttgaaatgctctctcacactgcggactccacacaaatttttcttccttctttagcaactacgtcatgggcctggcaattttggagaaattctcgatgaacctctgatagtacctaccaaacccaagaaactgcggacctgggtgaccgtcttgggttgcttccaattggttatggctgttactgtttcgggatccacagtaactcctttagcagatatcacatgccctaagaacttgacttcggacaatcagaattcacacttgctgagcttggcatacaactgatgttcccggagctttcccaacaccagacggagatgctgcttatgttcttcctctgactgtgagtacaccagtatgtcgtcaataaagaccacaacgaacttttccaaatactccatgaacaccttgttcattaaattcatgaagaaggtaggagcgttggtcagaccgaacgacatcaccgtgaattcatacagcccgtactgcatggtgaatgcggtcttagggatatcttctgcacagatacgcaactggtgatatccggaacgaagatcaatcttggaaaagacagtggcaccttcaagctgatcgaacaaatcatcaatccggggaagagggtacttgtttttgatagtgacttcattaagagctcggtagtcaacgcacatcctctttgtcttgtctttcttttctacaaaaatcatgggagcacctcagggggaagtgctcggccatatataccccttctctttcaactcttccaactgcttcttgactgcggccaattcatttgttgccacacggtagggtcgcttgtacatgggagcggttcctagagcaagatctatcctgaactcaatctcccgctttgggcggcataccgggttgctcttccggaaacacatcaccgaactcgttggctacgggtatttctgatagtcctagctaatgaagtactgagttgccggtgggagttgggtgcgcaaagaagacagccggttgatcaggcttccggtacacagtgacagtacgtcttgtgcaatccactactacttggaattgggtcaaccaattgatcccgaggatcacatccaagtccttggtgtcaagaaggatcagatccgaggggaaaggaattccctggatctctatagatacggccggactataatactttgttgtcatagcccctccaggggtggtgatgagcagagagctcctaagctttgctacccccagttgatttctccccatgaattgcacagatataaatgagtgggaagctccagagtcaaacaaaatgatagtggggatggaatgaatgaagaacgtaccggcgatgacatctggagttgtcagcacatcttctgtagtaatgtggttcacacgaccccgagtggcatcctttccatcattgttggggtggggaggcgcttggccttgctgacgcctcggcttcgggcatttatccgtgaagtgcctaggctcaaaacagtagaagcacagacgcggctgaccttgaacatccctgcgtccttgactaggctgcacggccggtgcagggggacggggtggaaggttccctttctagttctgctgctgctgcggctgtgggacgcaaaccacaaattaaggtcgtggcgcggggcgaggctgctgttgctgctgctgctgtgaggaggatccccctggatagggattggtgtagcggatcctttggttagccccatgttgattacggaaattcgccaagcgacgcttgtgtgactccagttccttgtgcttggtctccaggcggatgctcttgtccaccaggcgctggaaatcagtgtaatccccggtgaccagacgcaccgaaaagtcagggtccattcctaccagaaacttctcctgcttttcttcatcttcacgaacatcctcctgggcgtac

SEQ ID NO: 3346 - DNA, 748 bp, Oryza sativa
aagtgcaaccgcagtttaacaacttccaagatcagattaactatgcagcgcaacatgctttgatcaactaatcaggagacctagtcaataccttaacaaacatggtaaagtctgtggttgatggtacaatagctgagcatcaagttgcgggaccagtttatctttcaggaggcatcttcccatattacaaaaacttggtaactggtaaccagaagtttgctaccaatgcaccaccaattcagccgatggcatcagcttcgactccagcaccacctgcgccatcatcggcaccaaggcaaataattaataatcctcgcctcttgtctagcgaacaaccgcaacatgctggtcagaatatcaatcggctgtcccgggagcaaattgcttgaatgtttttgccaactcagccaactggtggaccaattcagcagacgccgccaaggcagcagacagttcagtcgattcaacagcagacaactcagccgatacagcaacagatggtccagctgatgccgactgggttgaggacgcctgataatcggctgacgcatcaaaatgtgactcaggttgtccctgagcatctggtacacattgtacaactagatcaatcggttgcagcctaagttatccctgagcacttagtgcgtaatattcagccgaatttccataattgtcaagggggtaacttcaattatcaatatcagcctccttcgcctcatgctcagtatcaacaaggggctgcaggaat

SEQ ID NO: 3347 - DNA, 835 bp, Oryza sativa
gtgctagtcggtgttcgtcctggttcaagagaggttcgagggtgttcgagcaattagattgcaagttttaggtgattaattagcgttcaatcgttcgtccagttcatagcgcagctccctaccccccccatcttgctcaacctaagcttcggccggaggcgagctgaggcgaagcaagcggagcggcggtagcccaagcgcaaggagtgatagtggagaagaacgagagctagaggagacagagatagagatggattggggcgcatggcgcggagaggtatttatagagcatgggcatgtgccgagcggatgatggcgcattgaatatggcctccgagtgctgggctgtcgccgttgcagaggaatgttggggaggcggtggcaatgggatggcctccctgtgcagcagggcacgtggcggcgaggtgcttgaccgcgcggggacaaagcgacgcgattcacgtgacgccgtcgcccggggtagatgagccgccgtcgccaccaacctacaccggccggttgcgttgcattgatggtcgcggttgccccctctctccgtgccgttgagtggagcaccgagccgggcggtgtctttgccagagctgggtgtcacggcggcggcaagccaagaagagcttggggaagggcaagggcgagcccgccggcgagatgggcgtggtaggcgtcggaagggatggtggggctgggagcgtggcgccatgtgtgaccgcgtggcaaggcgttgcgcggagaaggggatcgagccccgtcctcttgtggtgtcggctcggctcggctgagctagggcttccaagccagcctcaaaaagagggga

SEQ ID NO: 3348 - DNA, 1727 bp, Oryza sativa
tcgtttctgaccgttttcatccctagctgccgatgatgagggagcgatgctcttgatgtctatcggggggagagtggacggagttttcccgacaagccatgccatcatgacgtgatcttgaattagcggcgctaaggcttggtttgtgatagtcttgagatcggagaggtggagaccctgactgccaaatggtgtatgaaccgaggcagagggctgccgagtgcttccctagttgactggactgaagcgggaaggaagacggagtcgtcgatgcccgaaacgaatcctattgcagtagtcggcgaaaaacttgatgtaacccctacttggcgcgccaactatcgaaacaagatttcggcaatactaaaaggggtagcaatcaagctggaaaagtggatgggtcagtagagaaaggtttatacaggttcaggccttgtcgatgagaagtaatactctactcctgtctggggaattattccgccgagtgtattattgatctaacgatctgggagaaaagttctgccgccctaggagtactcggacccctccttatatagggggaggaaccgagatttacaatgtacagcccatattacttacggactaggctaacagatatattacaattgtaactaactaggactacgggatatttccttgatatacaaattaatataattcccgagtccttttctaaacatattctacctgtataagctatcccctatacacagtcggatatacttgccatgtgggtatgtggtacccataatctccacaatttgtgtgcttaaattcctaaaaaaaatattggcaaagaagctgatccttactgttcgtatacgagcagttcctttgttgcaaagcaatgagcagtaaaactttaaatggaatttgaaatcatatgactttcctgcaaaaagttcaatccaaaggaggcttaaaaaatatcgtgaattgagatcacctacagttgctagtatcatcacgtacgaccatcgttggatctctcacatcacacaacagtattgtccattactctctctatcccataaagaagcaacacctagctacgcaatgcaaaattaaataagaggataaaggaccaaaataccccttattaatagcaaactagtattggcggatattgttgacgagaaatccatgctcagccgatggtgccagaactgtgttggtgcgaactaaatcgacgaacacaacggcttggtagatctgcttagctccagtgccggtccaaatcttggtgagatgcgggcgtgccagtcagtttgatcctacaactgacaagatatacaaagagctgatcggctatgttaacgaccaaatttggtaattcaagtatcggagatggaaccgaagcggaatccaagatagagatcgttccggaaacagagcaagagtcagctaaagtctaaatcagccgcgacaagaatcggcagagttcgagtcggataaggttagccgattgagccgattccaacaatgtgactcggtacacgttgtcaggttgagttaatgtgcttcatatggattgccacgcacggattaagtcctgaaaaggcaattgtatctattagttcggatattttatgtaatttccttatagataagtttgggtaaaagtctgccgcaaagacttatggtatcttagagtttgttagagataagagtcatgtccgataaggacattttgtatctcgggtata

SEQ ID NO: 3349 - DNA, 514 bp, Oryza sativa
tgacaccgagggatgttatattataacaatgattctggtgatgaagatgatggcggcacaatttgtactatactgatgaatttatgctgtgcttgatatttcgaacttactcctaatttcttaaaagcttttgtcaaaccttattgagcctaaaacccacaaaagttattaaaaaactttcaattctcattgactaagccaaaaaaatcaagcaaggcaatgataaatcaagtaagcaaattgaattgataaaaatcacactccattattattatagtagcccccgactgataactcaagggaaaacttgatgttagcagtcaaaatagggaaatacaaaggtaatggctaagcataaaaacgaccaagatgttcaatattccaagaattgtcgataggagtaccgtcttcatgtttaagtcggtaggaacctggccgagtgacttcggagattatgaatggtacttcctataagggggataacttgtgcttatctcgtgtagtttgaattttt

SEQ ID NO: 3350 - DNA, 12912 bp, Oryza sativa
tggatcccctttttcgaatgtgaactgctacagcggtattccgtgcgcttgcagatttatctgtggtcgtaagaaatatctacatttggtttatttactccttgactatatgtttagtttgttcaactaaccacatagttaggggctacacctattaggtgcatttagtcgatgcacctaagtttacatttaattatttttcagccctctacactcttcagatctggtaaaagtactcgggagaccatagcgaagatgattgaaacacttagctttggagtaatctagttcgagagaagattatctttttgactgtgaaggtctcaggggctactgtgtatattgtgggtaactcctacccacacggcaaggttatctgactaattataagggatagcttagatctatggaatatgtaacggatcataacttgaatattacgtttccttgtatattacggaacggcctaaagtcctggtttgataatagatttaggaaacccttaccgtatttgttaaggtttttgtcgtgtaatcctatccccccaccccggtgctatataaggcaggcaggaggccctctacggcatgatttcacaaccagatcgtcagatcaatactacaccaggtggattcaaatccccaaacaggagtagggtattacctctcattgagagggccagaacctgtctaaatctgttgtctctgcattcatccagttttaggtctcatgcgctaccccctttatattgctgaaatcttgtttcgacactaaagatactgcaattctgagtccgtgaagtagtgcttcatactcaccacattatgggaagctaaaaaatgaatctacaaaacatagctaagtcgttctccagtcggggaaatcaatacaaccccagcacctgtgcctaatattctcttcgacccatcaaaatgcatagtctagtactccaattttcgaaggcgtgtcttactagcacttggtccactcggcaacaaaatctggcaaggcttgaggcttgattgaagtgggtggcttgaatgatatgtccaaagacatcaactccaaagcgcactttgcaatacgactagtcgcctcacgattgtgaagatatctccgagtggaaaagatgtgaacaccatgactaagtgactttgaaagtaaagggccaacttcctaatggtattagaacaccatataacaacttttgtacctgaggatatcttgtcttggaatcggccaaaacttcactaacgaagtagattggtcgttaaactttttgaacatggccctcttcctctcgctcaatgacaagcaccgaactcactacctaagatgttgccgacacgtattgaacgcgctgatgaagcctgaaggggggaggggtgaataggctgtccctgaaaacttaaaaacaaatcgcagcggtaaaattcaaatagacccggaacttcctggtaaggaactccagaacttccggcctaccaggcccggaacttccggtgttcttaggacaggaactttcgggttacagaaggaagatgaaattcaaattttgaaactggagactaagttaatcttcacaagatggtgaacatgtattctaagcagaggatagatcacagaatcatccacagaaacatcatagaaagagacaagagcgatttttttcccgaagttcggatcttgcgatcctactctcctttgaggagctccaaagagctgggtctcgattaaccccttgcctcacttgtgcaaaaaccccagagaaaatccacagccttcaaccccaaatacccctaggcaaatttctagaattgaatgaccaccaagatataactcaacctatttctagaaatccgccacaagtgtgggttgctctagttggaaagcctctagaatctcagcacaagaacttaattaacttacctcgttccctttcggaggagaggagatccttcacaaacttatccgggacatcgacaatatgcaatggattctcacgggcgacacctaactgtcacgcccagaaattcccgagtaggattccaagcagaatgtgcattaaaacccccgtccaggaccggccagggtacacaaacgacaaagttgacatatagatccacgtcttacaaacatcataaagtcttacataaatgcagcggaaaattaaaagataactggagctaagccttgacttggaccgcagcgggatcaccactccacaggcatcctcgacggcacggctaagcctactcctcggagaagccaccatctgacgcatactcaaactctggggtttggggaaaatagagcaagactgagtactacccactgtactcagcaagtcataccggaataggggtatgatgcagggaattatcaagggatagctacagaggttcgtttgcataaagcgagcatttataaacagtagttggaagcagtaaaacaattgtaacaattaatcaatattaatcttccactgtccaacgctacaccatgttgcaacaggcccaaccatccacctagactactcaaattcaatagactagactagggtgaaactaatcatggtgaatctggttgaccgcccataaccgcgggcacggctattcgaatagttttactctgatcagaggtgtacaactgtacccacaagacacagccccacgacacgcttccgtgcaacgacatgccaccacgacataccggatagaggccgtgacaggacccttcgcataaccccctctaaccaagcacaccacacctcaggtttcacccccactcctcgcaaggcagcggacagtcccctctcgtgcctaggtgaatccggaagccgcataggccgtcgcagggcctggatgcgtcagctagaggaaagctacactacaagcccagccgttgcccacgttggcttgtggtaagtacgaggaattcttccagggtttcccacaaaccggtccttaagtgccatgggcgcgactagcaaaaccatccacccacaacccaccatttaacatattttaatgaagcgacaccaggatggtggctctaatccaacatcaacactagaacctgaagtctatacattaatatgatttcccccattgtgtgctagttgaactaagcatggctaagcaatccctagtccaatatctagtcatgttatatcccaagctaacaaaggaacatggaacaaaatagcatggctataatagtaggtaaacatcccacggtaacagtataaaataatgtagtatttgaaagaaaacaatagagcatttgcaatataggatcaacatgttcaagtgacaagcatgacttgccttgctctgctgctggaggaacctcggcgactatttcaaagtacaccggagcgtcgggagagccggaatctaagcggcatacaaagcaaacaatataaactggctataagactactgaaacaaagaacaaaaccctttttaatggattctatgcatttttcttgatttactgagacttgaatgggcttaaagggagctcggatgaatcagatatgaattttagaagattcactgtgtttttactataacagaaaaaatccttaattgatttattgagcaataaataaatcccgggagagagaggggcggtgccgacatgcgggccccacatggcagtggctgcgagcgctggtccaggggaaaaggggcgacgcaccacgtggtgacatgtggcgccgacgtggcacgcacgtggcggcctcgtggcagccacgcgggcggcgggatcggatggccccgatctaccgcctggtagatcggacggcggatgcagctcgcggccggcgcgcacgggcacggctcaagccggcccggcggccatggcgcgcggcggcgaacggccggcggcggaggacggcggtgtcgtggcgacgcgggcggcgatagcgacggctaagcggctaggcggtggcgcggcggctaagcggcacgggagagagggagaaaggggaggaggggcctcaccgacgacgatcgacgatggcgagcgatggagggcgatggcgacggcgagacgagctccgggaccacctaagggatcaaaagggatgagttagagagggagagggaaaccatggatggctagggcggtgaccgaaggcgccggccatggcgaagctcaccggcgcacggcgcgtgcggggttccggcggcggattactacggaggaggggtggatgggacggcccgcacgacggcgaacgcgacgacgtcgacgacgcggctcggcacggcggctagcggcggcggcggcggcggcggcggcggagaggaggtcgatgacggtagggtggtggagtgcacgggagcgggcgattgcaaaacgaaaaagagagaggaaggaacgggggtgctttatatagacacacgagggttgatcgtggccgggagaccgcgatttcgccggaggagtggggagaggtggggaggagaaagaggcgggattcaaaaattgaatcctggccgtgtcgagcgctggcgcgggttggagagagggggagtgggcgcggggacgtgggcgcgagggcgacatgggcgacgtggcccggaagacgtggttgcagggcgcggcggtgccggctggaggtgggagacgggcccgacaggtgggccccacctgttggcgacccggggagagaggaggggggctcgggcggctggctggtccgtgtcctgcggccggcccagcagggagggagagagaagagagaatgggcctgtggcccattcgaaagagaaaaagggaaaaagaaaaagaaaaagaaggaaatgaatttttcccgggattaaatattgcttgtgctcaattttaattggttaaaattatttctggagctctaaaaattccactaaaaatcttgttagcgtatttcgacatgtagaactcaagaaaaaaaattccacatgccaattctgattattatttgcattgatttattagggtttactcttgcttttacaccggtattttcttgagaccatttataacttgaatttaggcttgggaaagaacttcagggtgtgacaaacctacccccccttaaacggaatctcgaccccgagattcggaagagctggtgaagaggtgcagatgggcggcctttaactcatcttccctttcccaggttgcttcttcttctgagtggtggctccactgaaccctgcagaacctagtgaccttgtttctagtccttctttcactagtctcaaggatacaaactggcttctccacataagttagatcttcttggatgtcaatatgctccgaatcggcttgttcttcgggtaccctcaagcacttctttaactgggacatatggaacatgtcatggatgccgatcatgttggatggaagttctagctgataggcgacttctcctcttcgttccaagattttgtatggtcccacgaagcgtggtgtcaacttgcctttcgtctggaaacggtgcactccccggagtggagtaacatggaggtacacataatcccctgcttcaaaagtcgtccttgtgcttggtcttgattacaacattgtccatgtaagcttccacgttgcagctaatatggcttgaaaaacatctctgaatcatgcattgataagttgccccatcgttcttcaaaccaaacggcatagtgatatagaaataagcaccaaatggtgtgataaatgaagtcttcaagcagtcagactctttcaggctatctggtgatatcccgagtagtaaaccaaaaagctgagtagctcgcagccggctattgaatcaactacctagtcaatgtgaggcagcccaaaaggatctttagggcatgacttgttgagatccgtgaaatcaacacacatacgccattttcctgttttcttcagaactagaactgggttggccaaccagtcgggatgaaagacttctttcatgaagcctgctgctaatagcttggtcaattcttccttgattgcatccttcatgtcctgtgcgaattggcggagtcgttgcttggtatgattaccgtattatttaacatttaaggagtgctcaatcacctttctaggaataccaagcatatcagatggtttccacgtaaagaaatctttattagcttgtagaaaggtgatgagtatgctttcatatttacaatcaatctctgtgcctattacagcagttttggtaggatcagatggatcaagggggattttcattgtctttgcatcgccttctccagtcttgggtagcttggtagcaggttcttcaccctcagctgatgttgatgcaactagtcggatctcctaaggagcgagtgctgtctcacaggtttgggccatctcacagctctccttatcgaaggtgatggcttgcttgttgtcgcttcgcagagatatgactccgcgttgtactggcatcttcatcatcatgtaggtgtagtgtgggacagccataaatttagctaacgccgggtgtccaagtatagcgtgataagccgtttcgaaatcagcaacttcaaaactgacgttctctgtacggaagttttcccgagtgctgaaggtaaccggcaaagtaatctggccaagaggtgtggatgacaaccccgggatgactccatgaaagggcgcaatactcggcttcaactcagttcttgggatttgcatctcgtctagagtcttggcgaagaggatgttcagtgcatcgccaccatcaatgagagaacgcttgagcttgattgtcggcccctagttttacaacacaggaaatcggatgcattttgttgaaaccaactccctggatcggtaggttggtacacacatcatacatcacatggtacaacagagtctgcacgattaagtcttacaatacttattgatacacgggttgcccaagtgggtcccgaataggccttatatggccgagtacaataccaaaaagtagagaaggggaaaaaggtgagcgtaagagaagctgcggcggtcctacgtctccacaagcatcgactggggatcactcctatggcgcctcctggggttcactgtcttctgggatgctctcaaacagttccgcagcgtcggtcaggtctaggagggttttcagaaagcaagagtgagtaccaaccgtactcagcaagccactaccacaacatgcatttagtgcactcaggaatacaaggaaggctaggttcatttgcataaagttaatttgcacaactcttttcacaaacctatgacttagcatttttaactaaaaacaacattaggttggagttatcattcaatctacgagggttcatcccctttccccaaagcctcgcttggtccggctttaccctcgcatgcagttttccctattcccatcattatcatgaccttcccgcccatcgggcaaggtcacaccactttccttatctaagcaagattaaaaactatgaggctagtcaagcatagtacaagtcccgatgctcattaaccgcaagcacgtctattcgaatagatttgatttactcacactgtagtggatgtatgcttttaatcctgcactccgcggcttgccaaacacataagtctagtcccaacacatgagacttgccacggcccagtttttcagtcatcctagcgtttcggcacccgctccaaggactattcacccccattgcacccccggcacaaaacaacacctcgagccggcggtgaggagagtcctggcgctcccgatatctcaatgggttaaattacatataggttaggtgcgttttagttttcccgggtaccatacatcacatcccttcaccttaactcacaacatacttcagaaccaccatgacaggggtgccgccccacgaggatttcttagtccaccaggtctatacccactcgagaagtgcagtcatactcttattgtttcctgcccaacttcttgactcagtctttaattgaccagggacggcggctagccatttctaggaccaccaatattctatccatgccgccccagtcgaaaacattttgttccattaggtttttggtttttgcaaagctttttgtgctgcgggtggtgcacatgtctccacccgccttctggcaatcactctcgatgagtgaccaccaccaacacatccatatccaactactatggagtgtataatcgtctatgaataagcaatattaagcaatgtcaataattgaccacgcataaataatagactcaggcaacaaggatataataaaggtaacaatatcaaggatggttcatacacaaatttaggtacgcattttataattagcatgcaactttatttataaacaaaacatttataaaatgggttcaacatgctcaaggaggggagcgtagtgacttgccttgttcagtcagtagttcggcttcgacaaactcgtatccgtcctcacacacgtagcctgatttgatcgggaaacggagaatcacagtctattctaagactagcggaaaaaagaggaaaaacaaataaaatagcagaaaaagaaaatgctaacccaagctcattccgaagggtttgggataagaagaattttagcgaaaggttcttcaaaattcgacttgagatgaacaagtggtggcccctaaaagatttggaaaggaattacaaaccacaggagagacagaggacccacatgtcagcccatgtggtcttttaacagccctaggcccatctgtcagccttgctttagtggcgcagctaaaccggagtgaggtggtgcatgtgggtcccatggattagtattaaatcggtaattagggatgaaaggaatgggtggtccccacctatcggccgctcaggcacctcccccttcttcctccttcctcctcggccttgcgcacgcatgagcggcatcgccactagggctgaaccatgccggcaacgaggggtttggaagatagggcggacagtcagggcgggtcctatgtgtcacatcctgatttttgtttcaggatttataaattatttaataaattattattagaatttatattaaatgttcattaatttacaagtgaagttaaatgtgggaaataaaatttcctaaatataaagcatggatggatttaatttttattaaattctccatgattaattatactctctggaattttctcggatttttcggagctcaattcctaattttaatcatacaaagagcatttcagtaattacccacatattaaattaatcattaaatggtctaattataattttgttaagtactttgagtgtccaagtattttcaggatttttcttggaattatttgagcattggaagtatttttaacaattgaaaggtcatctcattggttaatttatttggaaaagtaaataaaagtcctcttcatcagcttgggccgaattcagcccattccctcccttcctctcagccggctgaaaagtctagtttgcctcccttgcactacagtgctccttcttccagctctggacagagccagagccgtgccgtgcctgttgccgccgatccccttccaaaatccaacctctccgttgctcttatttccgaattggttgcgggaatggaatcctctcaatctcctcttcctagtccccaagaaatccccaaaagtttatatggaaatcctttccaatttcgcggttcaacctttcctttttccggcgaagatctaaactttcccgagtttttcccgtcgttgtgggctcgatcccggcctcccatggctatataaaggaccccctagtcgtcctctactcatcccctcaagtcccgtcttccgccgtcgccggaaacgctctccccacgctctccctctctctccacctccggccgccgctccagccgccattcgccgtcgccccggccgtcgccggtcagcgccaccacctctccgcaaagtcgagctctaccccagccacccgttcttttgcgccgaacccctccagaagtcgccgtcaccgtgaaggccgaaccgttgccatgttttgatctccggcgaagctttgccgtcgactccgtggtcgccggacctcgccgtatccactgtcggcatcgcagcagtgaggagaaacccggcagccacctccgcgaagacgcaagccatcggagcaccgtcgtcaccgtgaagccgatctgttccatcttcagtcgcgccgtttgtcgtcgtccgtcgtcgccctctgtcgccgtcgactccattgggttcgcaggagcaaggtgaagcccggccatcggttatttcttcgccgaagattgctgaaacgtcgccgccatcgctgacccgaccccgtcgccgcctctacctcgctgccggccgtctgccgtcatcttccatcgtcgcgccacccctcagtgagctttcctctctccgatgtcgttcaccggtgtagtttatccatagggtcttgatctaatctaatctatttcgcaggttgctttaatcttttatctcggttataaattatttgtaaattgtttaattaatttagaatagtcttttctttaataggtttaattggaattaaattttgtaaaattcgtaactaattcatatgaagtcagaatgaggctgttcaagtctcataattcatctaaaatcatgatttacatgtttgtttactttatatgtattgtttatttggtttttattagtctttttcctcgttttgcgtgttagcttgtcgtttccgtcgtttcgaaggttcgtgagtgcgtcgggagtgttcagaagattaattgaagaccgattattgcaaggcaagtcacacagatcctaaacacaatcctttgagcatgttgatcctatatttaaattctctatttatttcaactgtgcatttattttcgaatgtcaccgggtggtgtgaacttattcctttcttatggccaatttgcattgcttaccctatttcttgattacctcgggttataatttgactagttggatttatatattggttcaactagatgttagatataattgcttagccatgcttagaaacattagcacactattgggataacttatgactcactattatttaatgatggcttaatgatagttcacgagggtcaatcgtgattggttaattaattaaattggtaattaaaatatgattaatggtgggttatgaggacatggttttgaaggtcgtgctcatagcaattaaggaccggttcgcgagctactgttgtgaaacattaaccatgccaaccacaagccagcgtgggcaacggctttaccttttgtatagcatggttcattgcggagcaccagactgagaagtggcggagataagcccacgggggtcgctgggtaatccatgccttgttttataagggggtgattatgatccaggaatggtgcactgtggtgagttgtgttgtgcagagggtattgtcacagcctctattcgggtactttccagtatcgcgacgcatggtagacatgatgttgaggctgtgtcttgtgggtacagtggtacacctctggccagagtaaaactattcgaatagccgtgcccgcggttatgggcgggttgagcaatgtttttcgtgattagtctcacacctctcacaataattattgatgctataactggtaataatttgtttagctcctggtttggagttagatctgtgcagccgggtatggttgttcaggatggttgggcctgtgcagcatgggtgtgctgttcagtgttgattaaaatttctgattaattactccactgttttacttctcttaaatgttttgttaaatgctgcttttgcaaatgagcctatattatgccatcctttggtatccttgtgcacttgcatatttgctgtgtggcttgttgagtatgtcatatgctcattcttgcaataatcaatcaacctcagttgaagaaaaaggattcagaaggagaagacgtttggcttataccccagttgagctgcctgtgggagtggagctgaagccatcgctagaccattattccgctgctgttttcttttcttttgtaagtatgtaatgttattattatgatggatttgtatattaaattgtcagtttgtgtacctcggctgattcctggacgaagattttatgcacaaataagttcggaaattactagtgaatttccgggcgtgacactatggaacctccgccgtgtgtgggtggcggcgtgtgggttatggtgctccgaggcgaccgcaatgcttgggtgcggcggcggcctatgcacacgcatcctggacaccaactcggcgacgatggtggggtgcgtgggtgatggtctgggggtcgggggaggtggtcagggactcgacggagtgtgccgaggttgagaggggatagcggggacgcccggaacgagctcgcaccgttctcacgctcaatgcggcggtggtggaatccggctcgtcgacgataggttgcaagggtggagaggaggtggcggggggatttgtgtgagtttggtggaggttggtggatggttatcccggggtcgggatgaccggtaatgaagagcaggtgactagccacgacagcgcgcatggccgaccggcggcatggcgagggtgccggcgaggggttacattaggtgccaaatgctgaggggtttatcgacgacgcgtggtaagtgtcctctggcacgcttacgtggttcgggacagcttggacggcggtagccgtttggtccgggccacgcatgtcacgaacagagccatggagcgcggcgcgtgcacatgcgtgtcccagtggcacggtcgaaccgacgaccagggaaacgccatgggctcagagggtaaggcgctggggacctaatgtccagccgctacggccagcaaaatggcagccattgagagttgcgggggtggcgtttcacccactagtgg

SEQ ID NO: 3351 - DNA, 591 bp, Oryza sativa
  unsure (1)..(591): unsure at all n locations
tgtcctctatgcgtcagttcagcgatctgcatgatcacccttctttttgtagcatcttgcctgtaatggttgggatgaagcctggtattcatctaaccagggctaacgtgccatctctaagaggtaacacgctagctccggctggagacgtgtgcctaaaggctctcgtcttgacgggacggggcgaggcgtgcgtcagaccaccagtcgccacctaaccgttgatccgaccggtctgtgactggtcacagaccggataaaagagcgcgctgcattgcgctgcatgcaacgtgacacgcttgaccagaccgcaataaatgcggttaggtgagccctaccgtgttcacccaacctatgtacatagtgcaaaccccacaggnngggtcggggcacccnttncgggggggcccccccccccccttttttttcccgggtcggggcaggagcaacccgaccccccctcggggaaatcaggaggaggacggacacctcaccctcgggcccgacgtccccgaaggtgccaggccacgtgggcgattccatctgcctcaagcctccgggcgcaatactcccggtcccatatcaccgaca

SEQ ID NO: 3352 - DNA, 659 bp, Oryza sativa
tcaaagtactcagctgaagatcgaaagttcatgattggtgtaggaagctgaatcgttcctatctttaacgttgctgccgcttccttctcgttattgtcggcacccgcccatggggtggagtcttgtgggcgttctgattcagatattttcccattcagtatcagtgcagcaggtgttgtagtgttgaacaacttgtagcgcgcgagggtgaggtcgatgcagcgcagcgatttggctccagggatgcggttgtccacgatcaggttcagaaaccgacgagagaggcccatcgtcgattggattgggattggatataatggtcagcttcaaaacagaaacaacaattaatctcgtcggtctccgtccccccccaaaaaaaaaaaaaaaagctatgctatgcacctggagaagtaaacgacattcaaggaaggaagagtaccgcaatagcagcagaagccggcgattctactcgatcccaagtcgactgaactctcctcctttgtctttccttgcgatcgattcagctaacagccgcccggcagcgatgcctttaaagacggaaggaagggatggcttcacaaaagccaaacaaacaagagaagaataacaaacaaaggcgatgagaaataggataataaattagcttttgatcaatgaaa

SEQ ID NO: 3353 - DNA, 741 bp, Oryza sativa
gctgccctcgacactacacggagcggcgttgcctcagccagcacaagtactcaagtctcgtatggctcgtggggtgcatcagctgctcgttcgttgggacggtctgccggcatctgcaacgtcgtgggaagacttggacgatttccgtactcgctatcccgcattccagctcgcggacgagctatttgtcgaggaggggagagatgttatgtggggcattcagtatcagcgccggaaccgacgccaacagccagagcaggcgccgtgaggttggattaagttgttaggattagtttcagtgattaagtttgttaggaagattaagttgttagttcctggttagtagctgtttggttttccattgtaagcctatataggccattcggtttaagtgattaatcaagaaagaagttaatcccagttcctgttagtttccaccacggctccggggaggcgaggcgtgcgccctcgccctcccgtcgagcacagctacgcgctacgccatttagggccagcgcctaacaccttggtcagatacattcacaaaagcgctaaaaccatgtttcagtggcacagcaatcttgaggtttctcctcactccaacatttatcctcccggtttctgaattaggaaaaaaaaaggttagttcatgtcaattgtagatccaatattaaaaaaaagggttggacaccaaggaagaacttggtgtcaatggttttaagaaaggagaggtaaatattt

SEQ ID NO: 3354 - DNA, 598 bp, Oryza sativa
tgcaaaaaaaaccttaccaaattttggtaatgccaaattttggcaattatgccaaaattttgataagatttcttatatatttatcaaattttggcagcaaactaaatgtagccacttttttggcaattttatcaaaatttggtaaggttggaaatggcatcaaagtgaacaggccctgtataaacttccgataatttggtcatcacgccacgtcgccacacaagccagctcgctccaagcatggcgatcgttgagtcatcgacggggccggccgtcgccgtcgccgccgcggtggttctggacttctggtggtcttgacgtggctgtggacggcgctggtgcagctggtgtggaggccgtacgccgtggcgagggcgttcggcggcaggggatccgcgggccggcgtaccggctcttcgtcggcagcgacgccgaggcgaacgcgatgcgcgcggcgacgtgctcgacctgcgctgccacgacatcgtcccgcgcgtgctgccgcactaccgcgcgtggatgtggcgctacggcaaggtgttcgtctcgtggagcggcgccacgcccgcgctctgcgtcggcgactaagccatggtga

SEQ ID NO: 3355 - DNA, 1598 bp, Oryza sativa
  unsure (1)..(1598): unsure at all n locations
tgcggcctctcgccggtcagattctcgcctccgttcctctgcggccgccggatcttcggctcggattggccggacttgggatggcgggagggacgcgacgggacatcgctgaagcagaagaaaaaaccagaaggcaaacaagatgggtaaggtaaaacttgcttttgggatagaagaaaagacggtcgcaaagagagcgggacgaacctgcgagggggtcggttaaatgaccaccttggaggggaaattaggtttccctgggatggttctgtctcccccatcttgcgcagccccggggccccccttattttcctttttcctttgcgctccccctcgggctgcgatgttggcgcggccccctccgggcgcctgctgctggcacgcgccgccccgccccctcggggaggagatgggggaggtgttcctcccagtttcctcttcccccgggcgtcggtagggcggttgctccccgagcccccgacgcggggcccagaagcacgaccccctccgggggtagattgatccccccggcggctcccacctgcgccgccatggcccttaggagcctgctcctctgaggccccgaccgccgtcataatggtcaagatggagacgcgatctgggtcgctgcagagggggaggataccgtgggggatgagggacgcctccacggagttgagatttagcacccgttggatcagtatcttgaagtcctcgggggcccaatcccatctgaccccctggtgggtccgcatatagtcttcgggcccgatgtactcccaggcggcccgagcgcgccgctggagcggnncgcaaatcnccggaaaccccgggaaaacacccgggggggggaggtagtcgccgtacaccatggccccggtgagcccctgggatcgcaggcccgcgaggcggtcgaggacggcgtcatagccatcccccagatctaccggcgcccgccagctggggcctgcaccgggggctggctcggaagtcggagatgcgcttcgtcggcgaggggggtgtagaaccagtcgctcttccagtcatcccactttttgcggaggaccaggggatgtagcggttcaacaccggcccccgccgcaggaaatagcagccgccgaccaccgacggcggcgacaccgactgcacggtgaagaaccaccggaacagccgaagaaaaatatttttgggggggggnggggcccngncccaccccccaatgaacatctcgcacaggtgcgcgaagatggccaaagtcatcactgcgttgggggtgaggtgcgccatctggagatcgtagaactccagaacatccataaagaaagaagaaaaaggaggaaccaacccggccattgcgaaggggagaaagaagacggaccgccccgggtagtctggcgccgggcgtccctcacccagcattactatctcacggccggtggcggattccggcatgaagcggcgcggcagcccagcctgcctctcgctcacaatgcgggaaggcggtagtacgctaccgtcgagcagagcggagccccgtgccatgtcgtcggagaaagagagggttgagaacgagtgtgtgtggcgaaggtgaggcgcag

SEQ ID NO: 3356 - DNA, 842 bp, Oryza sativa
acatgttgccagcccgtgcttcccgcctctttgcaagggcaaaagcactcggtatgatgactaaagggtatgtctggattgtcacagatagcattggtattgtccttgatgtgcttccccaacattccattgaaagcatggagggaattgttggtttccggccatatattgcagaatctacaaggatcactgatttcagctctcgatttaccaccttattcagaactaagtaccatccaaatactgatattaggatggcaaaaatactgatctaccccaaaacccactatctttcaattatgggcttatgatgtggcatgggcagtcgcaacagcaactgagaaggttcataggaccagatctttgaacccaacttttcatcctccgggaaacataggcaagaacttagtagatgatctcccagcattgcctgctggtccagaactcctcaattccattttgcaaggagagtttgatggattggctggacaattcaggcttatcgatagacatctgcaggttcccacatatgagattgtcaatgttattggagagaaaactagagttatcgggttttatagtcctgattctggactcacaatgtctgtgaactctagaattatccatggtgatgctaaatttagcacaagttcttctgatctggaaaatatcgtttggcctggagattcaacaacagtgcccaaaggctgggacttcccagtgaatgctaagatactccagattggtgtgccagtgagacgtgattttaaacttttgtgaatgttgagactaatccgaacacgaatagatcaactgtcagtggctacagcattgatatgttt

SEQ ID NO: 3357 - DNA, 691 bp, Oryza sativa
tattacattttttttaaaaaaaaatccatgctattaggcaattagagccgacgggaacccaaaattaaaccatgaaattggcttggagttgagccagaggatgagaggagtgctgctgctggactaaggtataagctttattcaagtttcaaagcacatgaattcatctctgtctcgggataggcgctacgactcgttcaagacgtggtccgggaagcttgagcggcaactcacccatctggctagcgccggggacggaggtccctgaggaggaggaggacggttgcgacggcgatgccatccgcagccaccacatcaagtccatgcctcaggttgatcgcttcttcgccgcactggagggccctaaactggacaaactccgggtaagtttcttgagctaattcttccggaactacacatcgatctatgtgctttgatttgctggaacactggagagagctcatggtgtgtgttgtgtcgcatcagtcatcggaggagctggtgcttctgtcggacaaaacgtggccattcctgctctgttcccggtgtcggcgttcggtatctgcctcggcatgagcagccaggagatcctgtggaagacagtggcgacgtcaacgccgatgagattccttcacatcactaccaaggtgaaccaggtgctctggtgcgctttctgtcgcgctcatgtgcg

SEQ ID NO: 3358 - DNA, 1129 bp, Oryza sativa
ccaacctcccgggtcagatcattacttttcggctcccagagccatttcacttgattaggcggctcccagagcctttttcatttttgcggactcccagagtccaaaagaaaagcagcaaagcaatccgcttccactcgggaagcctagtctatgatgctcgtagacattccgaatcacacaaattcgtttctgaccactcaggtcatccatctgccacataggctgaatctggttacgattcccacaccacaacaacttttcacaaagcactggcaaacaaatctacgcaaaaaaaacccccggggggggggggaaaaaaaaaaaaccaccctcaacatcccgcccttgactgtgggcacggctgttcgaacagttagttaacctctgcagaggggtacactttacccacaagacacgaacttactccagacactggctggtgtcggaggttcgtgacaaggcctttccaaagccaatcctgggtcacctcatgccacatagagggtctccctgaccaagatcgggccaactccggctttcccttaggactcccgggtgccttcctctgtttcggactcccaggatgcctctacccccacatcccggctttccacctctattggcatacaagatttcccaaaagcaactaattacttagccagggtgtcccataccaccatgtggttgcacttgttatgcttgatgaatttcccacaggaatcggtccttatatgcgaatacgggatgacgccacataggcacaacacccgcatcgcgagttttcacaattcattttattttcaaacacaccgacaccacatgtcgggttttcaaggcttctcaaacccattttccaagttttcgacaatcaacggtgtatgtgggatatttggtatacgcgcttagagagcacggataccgaggtaccacaagggtggagcgacaaggaatcagggtagtacagcctacaggaattagtgcgactactgggtaggtccgtcggtttggcacgcaaaccgaggccaagcaagttaagtgtgtgattctaataatgcaagttgcaaacaaaataataatgattttccaattataggagcaattgatcaaagggtgacttgccttgctcaag

SEQ ID NO: 3359 - DNA, 845 bp, Oryza sativa
ttgggcgtggccagcaacgaccaagaaattataaggagttgttcaatcataggcatgccatattgcggagtcacataaagagagcaattggtgttcttaagaaacggttccctattttaaaagttggaacgcatcattctattgaaaaccaagtgaagattccagttgcccagtggtgttctacaatcttatacggatgcttaatggggatgagggttggttcaatccccaaggaagcaacatatctccagaacagtttattgatgtccctgaaggtgacgacgaatatagtaatgatgtgatgtcccttaacagtcaagtagatgatggaaacacggttagagatatgatagccctaaatatgtggaatgactacagtcataacttgtcttaataaatgtgagtcttaactggtctcatgaaatattttgcttttgtatttgcatcatgatgtttttgcatgcttaaatttgataacggtttttttttattcgcagcaacaatatttggaagagggtccccaaagttcaatttaatccaagctgcagctgtccaaagaaagccatctccaaagatttcaagacatcaaaagaaaaaggcatcgccaaaaggtatgggctttttcttgtcatgttaaatgcacatatgggcttctcaagttcagtaggttgatagattaaaaacatgtaattatctgtagcttatgtgtggttctctattccaactgtacttgatcgttcaagagctagttggaatgcaggacttgaaaaagctttggttgacctactacatgatcacaacaacgactgctataggagtcagaatgggtggtccacagaagcatg

SEQ ID NO: 3360 - DNA, 709 bp, Oryza sativa
tgtcacagtactttagtaagcaagcaatatatcatacatggagcggcgagatttatgggttcggcatagctggggagttcacagagactaacgatgaagtactcaatattcctgacccatcgaagctccgaggcaaggctggaaggaggaggactctcgcatccgcaacgatatggacgagtcggaggctggcagggtgaagcgttgcagcaaatgcgatgaacatgggcacacctacaagcattgtcctaaagacaaggagaaaccaagtgcggcggaggcaggactatcaggatcagcagcagatggagctcgccctacgggtgaaggcactacctccactcgaccacgtcctaggcgtcgtcgtgccacgtctggctacgtggtgtagttcttatgttctatgtcggcatgtggatttgcttgtaattcgtttcgaacttatcgatgtgtttatgtttcgtcatgtaatgtcagacttcggcatgtcatgtctttaggtctcgtgatataacgtcggactaaggtgcctaacgtctttaggtatgctgatgtatgtcggacttcgacacgtaatgttatgttatattattgaactctacatatatgttaaattgcacgtcatcgttatgtaccattagtaacgtttgctatatttaaatagcctgtactcttgttgtacataattaatctcatgattttattacta

SEQ ID NO: 3361 - DNA, 647 bp, Oryza sativa
aggataccaaaggatggcataatataggctcatttgcgaaagcagcatttagcaaagagttaagagtagtaaaacagtagagtaattaattaaaaattttaatcaacactgaacagcacacccatgctgtacaggcccaaccatcctgaacaaccatacccggctgtacagatctaactccaaaccaggagctaggcaaattattatcaggtattaacatccataattattgtgagaggtgtgagactaatcacgaaaaacattgctcaacccgcccataaccgcgggcacggctattcgaatagttttactctggccagaggtgtaccactgtacccacaagacacaaccccacatcatgtcaccatgtgcctcaataccaccacggtacctcggaaaggagttgtgacaataccccttgcacaacataatccattacagcgcacctttcctggatcataatcacccctcaaaaaccagaggcatggactctccagcgacccccgtggacttctcgccacttctcagtctggcgcactataatgaatcacgctatacaaaagataaagccgttgcccacgctggcttgtggttggcacggtaaatgtctcacaacagtagctcgcgaaccggtccttaattgtcat

SEQ ID NO: 3362 - DNA, 767 bp, Oryza sativa
tcctgcagcccgagctccctttgcagtgaggtaagtagtgttcttttattttgaaagatggcatactactgattactaaccttcaacatctctggtttcaggtgaagtggcttgtgaaggagctgttgtagagcaattttttgcagacgctcaccgtgctcctccttgagagctgcttctcttcatgacatgcaatggagcacgaaagcatgtcaaagcaggaagtaatgaagggcgaagtaggtcagaaacttatagtactatgtactatggtgttgctacgtagttgtgtggtattccttattattcattgtaccatgaataatttatgccaatgtcgtagtagctacatgtaactatattggctttcatggacacgtctatggtactagatgtaaaactgctagatggctttagatgaacatctcagatttattttccatagaatgcacatatgaaagtacctgagcgtggcgacgctggtgctttccatgataaagatctggctggtgtagggcggtatgctgctgaagccggagacatgcacatcgcagaagcctaatcatcagactggagcctcaactgaaccatcccgtatctgatctgtttagataaagacagttatattagaaatcgccaataagtctcggacgataattcccagcatttcacaacttaagaagttcagaattctagcagctattcgtaatgcatcccattgcagtattgcataacaaattacagagatgaatatcaatctcccagct

SEQ ID NO: 3363 - DNA, 2473 bp, Oryza sativa
ttctagcaatcatccctaataactaactgatgaatcaaggaaaaactaacgatagagaaaagcaagagaggccaatttctgacctcattttctttgcatgacttcttgtctgaccagcaagtctcatctatgagcctgtctcgaggcaagctcgggttaaagcaaacagcacagatggatgagaccacgacgagtttctgaacgctcgcagcagagcaagcctcgagcacatttctggtgcctttcacagcaggagccagcatctccttctgaacaatcgtgtttagcaaacataggatcagcagaagaactgcagattgcagagaagtgtgtgtgtaaatggagtatttacctccggatcgaccgtcttgtgttccggcacgggagtggccggatggaagaccccctcgcagccggcgaacgccgccgtcagcgagccgccgtcgagcacgtcggccttgaacaggcgcaggttctccggagcgttctccagctgcttcagaaacgcgttcttgggatcatctgaaaccaggaaaaggataaagaaacccacatacaagaagatgcagcacaagaggatactaggaaagaacagaaaaaataagaactcaagaagagacctgggtcgcggagggtggcgtggacggcgtagccacgggagaggaggagcttgacgagccacgagccggtgaacccgccggcgccggtcacgcacacggggcgccgcggcggcggaggcggaggcgtcatctccggttgccaccacctccgtatccactggaccactgctgcaagcctgcaactgtgcttcgatgtgtccattaagagcaagtttaatggtacagccaagtatgaatctaaatcaggctatattcaatttaatagtcaatttatacaataattatcaataaatatattctacataattaatgtctggtcccacctatcatacactcatgtatattagagtccgtgctgcagctggctataaatttgttggccgctactcttatctctcctcttttacctcctttatagccggcttatagtttgttattgtacctgctctaagcacttgtttaatcagcagactgcttttcccccacctttccgacgatgttcctcgtgttcagcacgtactttttttaacggttaaatgatgtattttttaaaaaatgtttatatgcgaaaattgctttaaaaaatcatattaatttatttttttaaaaaaataataaattaatcataaaaaaaattgtgtcgcttcattttgcgtgggtagaaaatgagttcccaacctcacctcccgaacatagccaaaactcgcgcgtagccgccacgacgagcatattactaagagcaagtttaataggatagccaaccactggctccaaattatctatagccaatttaatagccaatttatataatagttgcctataaacatatactatacaactaatacatgtttccacatatcagagcaagtttaatagtatagcccactactagatccaattcatttatagccaatctaataatcaattcatacaatagttgcttactatactattaatatatggtcccaccagtcatacacatattgcgtcttagagtccgcgctacagctggctacagatctgtagcccgctgctcttctctctcatctttttatctcattaaaatatgtttacagctggctaatagtctgctattgtacctgctctcatacacatgtatctttgagttcgtgctgcagctggctacaaatctgtagcatgttgctcctctctttcctcttatatctcctcaaaatatgtaactgacttataggctgctattgtacttactctaattgtacttgctctaagagtgagtacaataaggtgatataagcgggctatacaagttgccacattaaatttgtgcttgtgtggaagagagatgagaggagagaagtgggctatagatttgtagccagctatgtgaaagaggtgggtggattatacattaatgatttactccctccatctacaaaagttacacctatttcacattctagtttttccaaataagttgttcctatttgtagtctttatgcattaaagacttaaatgaagagataaattaaatgttttattagaacccaagaagtcatctaaatactcattggttgcatgcttgcattcactacttgattttgtaacatccaaggtgatttaattttttcttggtcttggtgtcgaaagtaatatgtgtaacttttgtggatggagggagtagtatgtttctacagctaactattgtatgagcgagttattaaattgactatagatgatgttttaaattttggagctagtagagggctatattattaaacttgatctaataattgaagggcggctggtagaagggcggctggtagtgtgctgagtgctgaacaaatcttatattctaatgctgacagtgcttg

SEQ ID NO: 3364 - DNA, 1151 bp, Oryza sativa
atcatacatctatggccaaaagaatccactccaccagatctttgcgtgtgtcctgaatgctccatagtgacctacatatggggcagcatgacacttctcaatgatctgcatgccttcatctgccggaacgcatctccgtagtaagccatctgaacaaactctgtaaaggtaaggtgcatcccacaagtgcctacggctctcgtagatcaacttcttcttattttctcccagtggtacatgccccgcgaccatgaagttgacgatggttgcataccatgggtcagagtctgtgactttcaacagcatgtcgtctcgcggatagtcatttatcggtagctcctgcatgttagtgacttgcatacgcgacaaatgatctgcaacagaattctctactccctttttatccttaatttcaatgtcaaattcttggagtagaagaatccacctaatcagccgaggttttgcatcttttttagtgagcaggtattttagtgcagcatgatcagagtaaacaattaccttagctcccactaaatatgacatgaacttatcaatggcaaacactacggctaggagctctttttcagttgtggcataattaagctgagctctagtcaacgttttactagcatatgctatagcatggtgttttctatccttagtttgtccaagaacagctcccacggcaaaatcactagcatcgcacatgatttcaaacggcagcgatcaatcaggaggttggatgattggtgctgagatgagtgaatccttaaggattttaaaggactttaaacactcatcatcaaagtcgaacggaacatccttagctagcaaggcagttaagggtctagcgatttttgaaaaatcctttatgaaacgcctatagaaccccgcatgacccaagaagctacggactcccttgacattgacaggaggtggaagctgtcgaattacttcaatttttgctctgtccacctcaattcccctttcggagatttgatgtcccaggactattccttcacgaaccatgaagtggcacttttcccaattaagtatcaagtccttttcttgacatctttgtaagaccttgtttaagttctccaaacaatgatcgaaggatttaccatagactgaaaaagggctgcaggaat

SEQ ID NO: 3365 - DNA, 689 bp, Oryza sativa
tcaaaatgtataaaagttcagaggcatactaacaagaattatgtcaaaattatgctaacttcagcctaaacctgacataaatataacatgaaaatcatgtcaaaattataaaagtatgaacgggtacctggaaagacaatatccttttggtccaaaggtcattcttacatggtctgcattgttacacaatcgcatcataaacaaagtgcaacgtggctaaaaaaatgcacctatttaagtgtagaagaattgaatttcagaattgcacaaattaagattatgctagtaacaatagtaattcaaacttaccagcatcgttcttaaccatataagacgagtcataggccctgcactcatgaagatctccctattctgcgcgtccttgaatactccaaaagatttgaccttttcttcatttgagagctcctccatcgattccacaacagtgatgcagttccttattgagcaatcatcaaccttgcttgcctcctccctcttctttgcttcctcctcctcagattgtctttttctcatctccaagtaactttccatcatatcaacaacatcattcctcttattcctcttcggtgtcttttctactctctctctctctcagtagatttggtcttcttgacattcttttctccattagctcttgaggtgatagtaatatggcttccctgattttc

SEQ ID NO: 3366 - DNA, 11804 bp, Oryza sativa
ctaatctactggctctggcagttgcctgaaagattttcagcggatggccatcgatgatatcatgccgtcatctatagaaaacttgagtacgtaccggagatggatcttgaacactattcaattaattagatctttgagcttaaaattatttggaacatgatatgacctttagaggagaggtgaggtcgtggggagagagcttgagatgaatggactaggtgagttcctatattcctttaatagatttcaatagtgatggtgaacagtaaatccgtcgataccatgtgggttccccaaacagtatggtagatgaacttttgttttctcaattcaaagccatcagtttttaggtgaagtacgaaatgatggtaaacatgattcggagattttataatggaaatgattttgatttaatttttgaggctttatttttttatagaagcacaatacaaatgcagacgctcacaacgagtgtatacttatccctacgaatacattcacatacaccctacccctataaatattttcgaaacaccggatccctatgaaattctcttttctaaaattccgttgcaatgctagtgtgctgaaacctgaaatggtcggaggtaggattacacatggaccatggggcagcaacacatgctaatgacagcaatcttaaagctgcggtcactcacctagttagctggtggcctgacctgtactgtacatatctagcctccccccctgcaggtggtgccaaactgccaaatccagcctggtggcatcatgtatctattcaagtgctctcgtgctcatggatcttgggagataatagcctctgatcgacaagtatagcagcattgctgtacctggatttgtttgttaaggtaggtcgtcattgccatcctgttgaggagtgaagtgccgtcaggagttaagccagaaagttagctttgaatggttgagggctaatggaccggctaattagttgtggctaatatgacaaaaaaagtttagtgttgttcgtactcagttataattgatgctctattaaagactactctagctttggatcggcgtgtaaaccatcgacctaaatggatagcgacatatagaatcaaagtaaggtaaatatttttcagaacaacgtgtagcaaagtatgggcatttaattagtatattataactgtctacaagttatatttagtttaggtttctttttaaactatgcatataagttattggtggacaaagttttaaaactttaataaaatcttattctaaatatcaaatatttattttcagagggagtatataagttaagatagggattaaaaagaattatctatttgttttgaggacttcaaattgccatgttatttcaaaaaaggaaaagcaatattgttatattgaaagttttcgcatgaaacataccgtttagcagtttaaaaagtgtgccacaaaaactttatcttcatccaactctttgataaatgaacgggaccatagtctcgtgcaattattacgcaagaaatccgactagagctatgtttagttcgtgtgacaaatttttttaagtatacaaacacacatttgaagtattaaatgtagactaataacaaaataaattatagattccgcctgtaaactgggagacgaatttattaagcctaattaattcgtcattagtaaatgtttactgtaatattacattgtcaaatcatggcgtaattagactcaaaagattcgtctcgcaatttatatgtaaactgtgcaattggttttttttccacatttaatggtacctgcatgtgtccaaacatttgatgtgacgaaatttttgaaagtttgaagggaagtaaacactgcgtacctatactagttgctgagtatgaattgaatgcccctgccatgtgtgcagtgacgaaaaatattccattatctaaaaatatgtgcagtgacgaaattgaggtaacaaatttcaaatgaaattgaagcttagctctgaatctgatggacggccgcttgggcgtagcctcttagcaaatgctgggtatgggccaaatttttgtgcttcgtctggcagtttgggctggggctgttgggccgttgtgctccccaggcttctctggtcagattttctttttgaaagcacaatgcaaaagcggacactcatactgacgtgcgaatgctcacctcatatgagcgcatacaatacatcccatccctaaaagattagattaacatattttgagattgataaagtcatctcagatactttgttttcgagaggcacatagcctaccactgattgaaaatacaagcgctagcgtgagtgggagaccccctacgtttagattgctctttctttagattatattcctcctcctattttcttaaaaatgaaatgtcattaagtttttcttcaatcatttaattcaacctcctatgatttatttggtgtctccaaattttattttcaggttttaaccttctacctataacattgtagttggtgccacaccatgacatccaaattccaaaggcagaccacggcggatgcgatggccaccgaagaagaagagggaacaatcggatcgatgatggcatggagtacatggaactcaagaagtacatcatgatgttcaaaggcataaacccttattttcatatttatgtaaggatatattcaaaaataattttactataaccatagggcaaaagatatcttaaacctcgtacgaacacagtccggttaaccgtacctaagcagccgcctgggctcgacgacgaaaattcaattaaattttaatattgatgagtaaattaatggtgaaatttctataataaatagtactagttagttatattgaagtttcccgggctcaaaatttttttttggctccgccactgcatttagatatgtcttaatggctagataagttttgatttttttatatacttatgtaatttgtaattttttatattgctagaaaaaataccggtgcgttgtaatgagatgaaggctattttaatcgtattgttgttagatttttttctaaagtatatatagaatttttattttgatcgtattgatatctaattcggaatccttatttggatgatgatcatatcatgcacgttgttttcttatggtatggagagaattataaatatattaggaatccgactttcgcctcaagttagcatgcgaggtttttaaaaggatttcttatacgattccttatgtatttttaaaagcgaacgaacttaaaaacaaattcaaatacggatgacgtatcaaagtattggcgaaaacatcttttaatttttataatagtagagatatagatttatatttatacactgtagagtctcccctacagttcactttttttttaaaaaaaaaagcaaacaaacggagacatcgctgatgatatacgacgtggattcgacgtcgtcgttctttaaactggatgtcacggtgtccggcgaccggcggcccgggggtggtgtgatacagtcttatgcaatcgcgcaggaaaaatctgataactcttactagtaggctattagcgagtatgattaaggccgggtttagggtttagttcccaacttttttttcaaactttcaactttttcatcgcatcaaaattttcctacagatataaactttcaacttttcttttcaaactttcaattttagtcaaacttccaattttagcatggaaataaacacatctaaattgagacagctccacccaactccacttccagttttggtggagctgaaactgtttggctgaactccagctccaggaggggtggagctggagctggagctgtgccaaacaggccctgagtaccttttgtgcagtactgcagtgacgaaatgatagtaacaaaatacatgtatccaatatcaatttcatcattttaaaatattgcacagtcaaaatattatgtgcgaagtgagcacaacttaagtgattaggttccttgtgctataaccagtttatctaggtttacgtactagacttgacacggatactcgaatctactgctaattattattttagtgatagataatgtacccgttgaaagtgaggtgcctcaatttcaaaatatacaagtctagtgttttaaaggtgatcgtactcattgattgatataaggtgtacgtgtgtccattgatagggtgaggtaaatgtacgtgtattataagcgtatgtgtttgtatcatgttttattactgcatgcccacacaaggaggaaaaaatgatcaggccccagaaatcatcgatgagtttagagtctattactctcttgccgagggcttactctgattctgatggatggccgcctgggcggctgggccgggtgctgatagtcgagcagggatgcgggaggccagccggtcgtggaaaatgttgttgggtatatggtccaaatttctgtgcttcttctgttagtttaatttggagatgattgctcagcttgggctgaggctgttgggccgatttgctcccgggcttctatggtcaggttatctagaaaaacaagcgtactcacccttataaattcacacatttttattctactactataagcatcttcgagacactaaaccgatatattctaaaattgatggagtcaccgcctcactgtcgagggagataaaaaaataattagttataaatacgaacacccatactgagtcaaaaatctatacttagttatgttctaccacaggaatttaaccagctaagctataagttactaaacattcctcctatttgatacaaggaaaaagaaatgccgacattgtttttctcttttaaacctcttatatatttttttttcaaaaagatgtctccaaattttaatttttagatttaaactttctaactacaacactaggactgttaggggtgataaaattcccattcggtaggggtaggtccaaaatttgacatgcgcacccatcaaggtgggccgtgggtcccagagaaaatatagtgctgggatggagagctgttcctactaacgggtcacccacgggtttcagcggaatgtggcctacctaacttggctaccaagtttatataaaaagacccacctcgtccttcaacccagcaggatctaggtataaaaaaggagggtattaacgcaaaaccctagacacctcctagtcatcaatgcctatgtagtgagtcgcatagctagcatagtcctacactgtcgcttaggcacactgtctccctgactgatctggccgttggcacatcgttcccttctctctggccacctcccgacactgtatcttctctccctctcactgctagtgccccacaccgttcttcgctgcccacatcgtcgcccgtagttgttttatttctcccgttttcttcttccagaggagggcggcatgggaggaaataagggattggggccagagcttctgtttttcaacccaatctcaatttgccctgttgccaaccctagtgatgagatatagaaagatatttctatatcacggtgggaacaaaagttttatatgcaaagaaaagttttccctgaaactgtaatttaagtattaatgaaaagatatattatatctttgcaccatagaatggacaaaaattgctcacagagatcactatttatgttaagggtgaagtatgacgctggcatatccctaggctacccccatgcatcatcatcatcatcatcatcctcctctttgacccgctaaacgtcaagacatctcttgctgctcctctacgactatccaagtatccatcacacgtctctcctttccacctcgtcaaaaccgtcgacacgcgcgcgaccattcgatcactccacgacgacgacatccatccacagccagagcgcggcggatgcgatggccaccgaagaagaaaacttcgtcgatgatgatgccgacgtgaagtcgatgtcgtcctcgtcgtcgttgtcgtcgctctttgacctcgacctcactgcgttcggcgaccggtgggtggtgtcgggaggaaaggaggaggttgattttgctggtgccgatgatggtggtggcggggcggtgaacgtggcgtccgacgaggacgaagatggtcgcggcggcggcgtggcggcggcgctcgggccggctgctaggctccgcgagcttcttcttcgcaagctgaggaagccgaaggcggccggcggcggtggcgcggtgtcgccggagggacagagcggccgattcttggcgaaggtccgggcggactcgatgccgcggctggaggcgcgcgcgatcgccggcggcgaggaggagcggcgcgccgccactactactaacccgaaggaggccgcacggaagtacctgaacaagatcgcgacgagcctcgcgcgccgccgcggaggtccagacccagcagcaatggtggtcgctgccccgacgacgaccggcaagacgaagacgagccgctcctccatggcggcgccgccgccgccgcgccgcggtatagacggctcggcccagcacttgcaggacggcatcgagagcgccattgcgcactgcaagctctcgctgcgcacggcgacggcagagccgagctaaggaggagtgcaaatgttgagtcgttgatgcatgcatgaagcatgatgatgtgttcctcgcagtgagatttgataaaggctttgttcttggcatagacgagttgccaaataatcgcattcgtttttcattaaatccctttgagatgatcgcgtctaaatttttagataatagaatttattccgacctttgcttcaaataagctatagacaaataatcgcgtctaattattgtttaattagtcttatgccaattggttttttttatccttaaggggatttttcttaagaaccgatactaaatatgtcattttcattgagtatagtaagggaaaaatttgcatattagaaaaagaaacaacaataaaacaggatgagagagctaaggtattagctttgggaggtgctttgctgctcctaagggcatgtacaacggtttttattagtggtctctatattactatgcaagtaaatttgataacatggaagaaagataaaagagaaagtacaaacatggttgttatgcatgacaatggtttagagtcaactcttagcatttattagatcaaattttgttacatgatgttgaaagaaaggaaagaagagtaagaaaaaaaaatattttgatacattaatggtagagaccatattgtctctaactgttctatgacattagtctctagatagtatagagcttatacctatctctatctttgtacatggccagtatttggcctccttaatttttgggcccaaagctattgtggataattcccttttctagaacactctagttactgcttctagatttcctacactgttaataggatgagcgtgtagttcccctttatatggcaggcctgggctagggctcgtggctagtgttgttcaccatttatggactgtcgtctccttcatcttgatggcttaagttgttctcgtactgtccatgcaaataatatatccaagattctcctcatgtatttgcatttcattaggagatggaaggatgttttgtgggtgtgtcaagaaagcagataaatggtgtagttatttggttagtcgtagactacaagtctgccgaacatctacactttgttttgcaagaatatctaggtaaagagcttgcattttgttagagcccaaggattccaaatcatcatctcataatttgtgttgttagatctagctatgtaaaggggtggaggcaggcctagggcagctagggcttgagccctaggtctgcctccaaaatgaaatctaacaccttattaggtgagccttatcttagccctagtctttaccaatttttggctctagcacttcacgtgtatactccatggcttgtgtgctttcaagtaatttcatttcctttattggcagtgagatgcacccctatattgtattctatagggtcactagttggcctaggagttcgaccaatgatgctcgcatcaggtgagaaattgaggtcttgtatctatgtgttactttcgatggattggctgagagtcttatttttctttttggagattgcgtaaatttgtggtgttacatccttaaggtgtcttccgtgtatccaaattgagtcacacaagtgtattgtctcccctttgcctattgttattgtcgtagttgccaaaagtaggaatttatctatattttcgcatgggtttctatccctacccatatcttctctagcaccttctattcatgacaaagtcatctcacccacaacacccttgcaaacgtttccaggttgagcactcactactacaaaaggcatctttggtgacagccaagaagctattttgagatggctgggtgctctgccatcaactaaagctcacaagcagtaacagaactgcttgcgcgtaccgcttatgaggaccgctagcgaaaattgatttttacaagtgcatcccttaagcgaaccacctgtgaagatgttctctggtgtaaaaaaaatcacattcaaaccaattcagatgcaattcgacaatcacaaattcaagcatcaatttggatatgctggcctcaatgcaattccagatttccaaaatgacatatgagaaaagatagattgctaagaagtacctgatcccgtagaaaatagaaatcctcagatatgttctaatcccaacttccattgctgcctctccagccgccaagatccaaaacattcacaccgcaacaagaacaacagcggctgcctccaccaccagcaccaccacagcgtgctcaccattgaaacaagccacgtctcactgtcggctttgagcttcacaacagtggatcggcagcgaacgaagagcttcacagtggcagctcgacatagatgaaggactccacggtggtggctcgacgaggaggaaggaggctatctgactccgccacatctggactgaagaggaaggaggccaagggtcggcctccgccacggcagcggctagacgaggaggaaggaggaaggagacctgcctccttcagattttgagggcacggggaggcccacaccgatcccacggccatatctgctgcacgcatcgctatcaccgtggctgccatggccaccgagagggaggggaggggagggggggggggtgagagggtgtgaggaggataggatgaggagatggagtctatctgtgtacggtggagataagatggagtccatgccatccgtgtgaaattttagtataatgaaaaaaaatttgcagtcggtgctccttagcagcttccagctattttcgatggttacttaagaggtccgcttgcaaaacagtcagtgaaaattgattttcactgatggatggtgaccgcaatccctctcaagtatttttacaagcgtgtattcactaaactcgccagtaaaaataaaatggtgatgctatgaaaattgttttcgtagtagtgctcctagctcactatgtgccattggcatgcttgtttttctttcccagttggtcttgtattttccacccgtgagttctcccgatcccacccgtagcagccatttttctttcccacattgtcaggaacctccagaaattccttggagacttttaacgccataaggaggtagacaggctgcaacgttaggaccaatccgaccaacgttgttcgtttcgctattcccatgtttcttccgtaccagtaggctatacatccaactggtttatcaaaaaggggttgaaggccgcgttgtatagtcttgtgatggctagtggtataagttgaggtattttatagggaatgatgccctttgtcgagggatggtccgcttgattaatttatgtattcaaatagtcatgaattttttgttgacaagattggtaaatataagatatatcactccacgaacatttaagtttaaataccacctatttaagttgaaacaaacagattgtgcctactacatttttttttctttctttatataattttatgtgttgaattgtttgcatagtaataatttgtattgattgaaaaaaaattcaaatttgtatagattcaatttaaatgtgtagtaataagttgtgaagtaatatatcatagtatagatctatcttgtaatttttctaatgacattttacctttttagatgttatgaaaaacgaggcaccatgccttaagattgaatttagtttcccgttttgttgggctgattgatccatgccacccaatagaatagagcgacatagagatgggccatttggcatggtacatggattcgcgtccttttctgcaagatctctaacccaacccaactacagtactaagtagtttttccttgtttgcagccggtagattggcctaatgcaactctgcaagcccatttcacttcccacagaccacatgccgaaatgctggcaagctgcaaaatttccttcaattttgtaaataacgagattaccgggagcaatgcaagcaatggtggtgacaaattaggggttatgcctccgttaaaactgggcttcgtcaaaatatcatctcgtaaatatgatttctcaaaataccaaacccaactgatgtgttaacacttataaatgccttttcatcacttactaattgatttacttacttttgtcatcttttacaacatgaaccgaccgatatgctcttcattgggctatgttagagagtgcaagttgcaaactaattccccatgcatacaagacgaactaattcctcatgtatgcaaaacgaaactgctcattagcacataattagttaagtattagcttgaaaaatattaaaaatagattagacatgattttgtaaagtaatttttgtaactagaaacataatagtacatgagtttgttgacatcctccattggggaaaataacagattatccttaagtaggacagctagcagagtaacagatgagtgttgttgtggtaaaagtgttctaactcttggagtacttactgttgctgtagtcctaacttttcttgatagataatcatccattttgtttgcctctccttttatccctcttatatatgttggttacttctctttgtgttaaaatctgcaatggaagagaagaggccgaagactccagtgtagtgcataatgtgcaaagtgttgttgtttgtagcatggagagcagggattggttatctgaaatgaagattggatgttgtatttgaagtctggaacacaccttgtatgctactatgctagtattatacctgcaagttcagcttagagagaggaggtatattttgaagaggtagcttgaacagggccgtcccatgaattttggaggccccgtgcaaaaatattatccaaatactaaacataatctataaaataaaataataaaaactttggctacttgcagcacaaagagagaaatcctctctcattttacgcgcacatatttcccgcaatgctatagatggtgcgttttttatgaaatagatattgaaaagttgctttaaaaataatattaatccattttcaagtttgaaattattaatactcaattaattatacactaatggccgacgtatcttgtcaatttctcttttccatcctctcaaacgcacacccttataccccatgatatattttgcagcaatataaattggagtggaacaaaaagtgtatatgcgcgtaatcttcaattgaaaagcataattcttttattgtttcccgaaataaaattttcaatgatttgcagaagatggttgaaacttgaaag

SEQ ID NO: 3367 - DNA, 534 bp, Oryza sativa
tgtgtgattcatcgtggcaccctcattattgcagcagtccacttctcttcccccaacccatggctactatgtacataaccgtgcagccagcaatggttcccaaagtggtttcccaaaatttcatgtttgatgctcgtttctcctcctcatttgtaggatcagcataaagcgatataccgatattcatcccaaaaagaccaacaacggccactccagcagtaatgacaacagttgcagtggagagcatgacccccatctgtagaagttgattttgcttgtcatccaacatgatgttgatataatcttctgtatcatcaacatactctctcagctgcaagcatagagaagaaacgtcaaatctcaactgcacataaaacaacatgaatttggtttataaaccctcaactgcacaactccctggaccagtttcccacagttgcatgcgatgctcatataggagaatcaaaataaatcattgtaaagaacctcccatgaaatcaggaaaaaaacagagcaaatgccaatggatccatg

SEQ ID NO: 3368 - DNA, 586 bp, Oryza sativa
cagcacgtcacatgacatatcgccgtcaccggctcaccgccgcaggtccccctccaaaacggagggcaataacggaacagccctcacaccccgcacgtcgccgttgaagattgaagaacccatcatcaaatgatcaacaaaatcccaaatccaactgcttcgctaacctctccagatgaccacagatccgaacacacaccacacgttcgacaccacgacacacctccacgtggcggcatcccgcacgagcgccgcgctgtccggtgtccggactccggacgcgagcaccggccgagagccgcgcgggaaaaaggcatccgaggtcaggagcacgagggtacggggagaccccccgccacgtcggaccggacgggcccagggccccacccgtcagagaggacgacgtggctgcacgcggtggtgggccccacctgccgcccgcgtcagcatctcgtccttctccatccatcgcggccgcggggagcagtaaaaaaaaaaatgggtctcgccgggaggaagacgacgacgaggccgtgcgcccgtgtcgacgcaacgcacgcagcgctatgacttgggctgcaggaat

SEQ ID NO: 3369 - DNA, 668 bp, Oryza sativa
aatggagaaatattagtgtaacatagttgcgaggcagcttgccataaatctcaacaaaatatatccaacagatgcatatttctgcatactgcactgtttctagtgttttgaatatttcaatgctctaaaaaattactcacatactttttgatattccgtctttaattatgcattggctaccattgcatagaaactgcaaaacattagtgcaatgtagttgccgggcagcctgctgttaatcttgaaaaactcaatattaaaactccaatagaactcttgtttttatgtgcaccgagacaggagaggggcatgcatagtgtgctagaaagttggatgtaacaaaaatttaattacatctcctgtgttctgcactaattttctctgcttcgcagcttttgttcttaattttgacacctgaggcagttgttagaaatttgtaatttgcaatggacttagctctgagcaatcttattattactgtctagtgtgttctcaagatagatagccactgatgactaatgtattcaaattcatttgtctctattctgtagcatccgggtgatggaatttcccctgcacagaatgcaattctgcatgtgcagcgtaaaattgtaccgacctccaacaccaaggagggtcctgcgatatgtaggctgattgtttcaccg

SEQ ID NO: 3370 - DNA, 1029 bp, Oryza sativa
aaagtttgcagagctcagtgaatatacaaccataaaagcacctagtgatggcatcaaggttattaacaaaataaaaacaaaaataagatcccgaatgtcaactatatcaaaaacatagttccataataaataaaacaaaaaagcagatgcattatgcatacaaaatagaagcgcatatctgcaagctacatttcagtctaaaatgaataaatacaggtagatagcaaaataacattctcctttcaagggtacacagggaattttctcttttcatttccatgtgcatacttcactggttcactagatacaagtatacaaccccacgcataccacataaacagattcattgacccatgcacatatgcgtgagccagtactatttgcagcatgtcatgcatcgctcctacaaaattgagaaaacagtggtgtgccacaaacccattccttgacctaatcaaaccgtgttcttagtaactatgttcctgcactagccaggactaaattgtcatgtattggaagcaaacattaattcatgcgtttaatgtggcaatagtagagtgggaaatatgtcagaaagagtgggacataaaaggaagagaaatatgagctcaaatactagtcataccaccaaggctttttgctgcattttttaggcttcctgagaaatattgctgaagaacatctaagctgattgttttttcagcttttcctcgtctcctttcagggggtttattacttttgtgaagcgaatcagaagcaccactaccatttggcctgccaacagatgccccattgttttgagagttgtcatcagctagcaaatgtctctctgacatgattgaaactttgttgccatcattatcaacctcgtggactctttggcttccattactttcaggcgattcacgaaagcaaccttcagaattctcaaagtgcacatttgtcttcaaatcttcagtctcaattattagccattacttatttgcagacaaacttcattggtgtctccgttgccaactacctttaggg

SEQ ID NO: 3371 - DNA, 2332 bp, Oryza sativa
ccaatactcttttgccatctagcatcaaaagataggactgatcaccatattctgttttatgtggacagttcatgcaagcatccctgagtgctcgtgcacaacttattggcatgcaagattggggaaacggtggtccagccggcacagatggctcacgacagaaccctgaagaaactagttttttccgtgctgatggtggatgctggaatactccttatggtcggtttttccttgagtggtattcaggaatgctgcttcttcatggagagagattatgtatggttgctgatgctgtcttctctggttccggtgtgaccatcgccggaaaggtttctggaatacattggcactactatacatgttcgcacccatcggaactgactgctggttactacaacacattgttgaggaacggttatcttcctatcacccaaatgtttgctagatacaaggctgccttgtgctgcagttgctttgacctgagggatgaggagagaaataactccaagagcagcccagaaggtactctccggcaacttatggtcgccgccaagatgtgcaatctacctctgaacggcgaaaactccgtgacaaggctcgacgatacgtcgctgaatcaagtcatcagaagctcaaggctctactcaggtggcacctcagggacatctttctccttcaactatgtcagaatgaacaagagcctgtttgagtttcacaactggaacaggttcaccaagttcgtcaggcagatgtcggatgccaggacatttctagccaggctcgagttcaggagagggcagcattacctctcctcgatgtcggttgtctgggtcgtcagccgggcctgtgcatagacatgaatcagaattggcaaagtgactgctagaaatgtagtgttgttcgtgtatctgtaacttggatcatgaatgtgattcgacagaattggaagagaactttgtgctcagccataccgtgatgatctggtttctacatgtgtgcttgtgatctgttgttagcttaacagctgttcaaggtcgagcagctgggctgggctgggctggatgtaaaatccacccacaaggccacaaggccacaggtcggatggcccagccataacccgagatgcgaagcccaacaggaaaaggataagggtgtggcatgtggcccatccaaattgggttgggagagggttccggcctacgtgcggcccgtataggttgggctggaactgtagagcgggccctggaagtgatgagactaacagctgccatttgttccaatgtgaaattccctgatgcaatcatgcaacaatggaactgccgctcgtaaatctaaatgaactgagatgtttgcatttgattgcttgtctagctgtaccgaaaattctgtatttgcagtattgcacagcatatgtgaactccttgggctgatacatcatacatgtagttgataggttacacaactacggttgagtgctagtagtacccaataagtatggccgtatgcatcaatgtacgacttaacatttccaccagatcccaaaccttttttaaagaaattggtccaaggttccatagcgcttacagggtagatcattataattcacatgcggcattagcattgggccacagatgatgccactgctaccgatatcttagttcctcatggtggtacaaaacattgtctggcccaagcaatttttggtagatgaatatggtgaatactgaagctctttttttttccacgaatactgaagctcattgatcgtacatataccggtaatctactcttcaatattcctatcttttttcttaccagacatgtgggcgacttgcatttatgcaaaagatgtcaaaaccatgatggttatttgagatggttaacgatgacaggcttatcatcgagggaaagataccaatgaagaaactagagattcatctcactagagttttatcagtaatatggctgaacatccaaaaaaaaaaaactattctactggagaagtcattcatctctactctgtatccctgaatgtgactaaatattttaccggataatgtacaactgtaattgaattttggacggcaactactctctgacaatagtttaaaaattgggggaaaaagttcatataatgctcttagttttttcctagagaaaatgcagctgcaaataaaatgaataacccaactgagcctccaaaatcttaaaaacttgggaaattaaaactgaaaaagaaataatgtgcctccaaactaatcgacttctggacagcgaagatattagtattacaccaattaacctttgtaacttgaacatcagaattttccag

SEQ ID NO: 3372 - DNA, 910 bp, Oryza sativa
acagtggtgcatgggtccagacacatcagttcaggttgtgcttcacatgacattcatgttgggttattgatgtcactgctttggtatctttgatcttttgtcagtcaaacgaagtacttttactgtctggtccaagccattgtgagtcaatcaccatgcgtgatacctatgaatacatgactgcagtaaatcaattgttgccagttgcctgattgatgtaatttgtaaaagcgaaacttagctgaaatatgtggttttcttaacctctgggccacattttgccaagaattttgatcaacagttgatttggatgcttagttcgcacacttggtggtaatattgaactcagaactagtatatattgtctactaagacaaaagctattacatatagactgtgaagccaccgtgatcatgtcagaattttgttacatgttcgcttcataattgttttcaaatctttccatgttagccttttgcatttgctatgtagtatatacagccaagctactcatcgttccttgttcccagatagttatatacaagtgtgggcttgatggctattgtattcatgcaaaagatcttcccattgctcattgttgaaatttcacttcacctgctttcaggatccctctacctcaatgggtacttgaggagatggataagttgccagacttgtcatatatggatagataccaacgaagaaataaagaatacatctcactcgggtgtgatattcttccgattctgaagggaagatcaccaatgcaggcttattcagacttcatgaggagctttcgagatgcttttaaagagtaccttggggctatagtgacagtttgtgctctttcttggtatttaagcatgtcatgttaaatttacagcaccagtaggttgtaagccttatataa

SEQ ID NO: 3373 - DNA, 1129 bp, Oryza sativa
  unsure (1)..(1129): unsure at all n locations
ataagtcatgcttaaagttccttaacggtaaaataggtcacagcaaaataaacgatatttacaaaaatgttttgaatacgacgaatggtcaaacgtcatgtcaaaagtcaaaggtgtcttctattaaaaaacggagggagtatgtgtttaccttgctttgtttgacaatttggctgggaaccaaatttggttacccatgagtgtgacattccacaagatctgttcttgccttcttggttttcggtgccatatgtgtcacccctttttctgagaataagtaatttaaagttggtgtcagaagtgttttatagtcaccactagagtaggaaaattgttgatggttgaagatatgtcatgatgcattggtattgtaacatggtaaacaagtatgattgggaagaaaatagcttgtatactactatatacaagttttatgattttccttaccattgtggtctttactttgtagggcatgcaggttgttggtgatccaatttcattgcctgatatcccaggaatggcgcatagaggaatgggtggatttcctgggtttgtttcttgtcttggcttgaatatgtttatctgttgatcaacagcaatgaaaacatcatgtttttgattgtattgcaggcctggtcagccatctatcgtatcaaccataactgcagatgtcatggtcccaaaattagttttaccttctctatgtggggaagatggaggctgtttaaacagaattcgtgaggtttgtattcggctagtgcattttgtagcatatccagtaaatggttggatgtatcatctgacataattaaggccatgtgcagttttcaggggctaagataactgtcgncagnaaatcccgnaantgggtanantngnccanantggngggnaaaccnaactgctattttgatatccggcacaccagaccagatgcatgcagcccgaagtcttattcaagcatttgtcctaagtgaaccactanccccctgatnttnnnnnntncctgggnggnnngggggggnagctggnngagnnnctnntgatnatnattgtntctgcaatcaaactagtgaccttatgtgttcatatttatgaatatgcgtgccctgtttgcagacttgcatat

SEQ ID NO: 3374 - DNA, 560 bp, Oryza sativa
ggtacccctcttgcattgtatcctagattcagaggtcaaggagttggacaaattagttgatttcattaaagtggatatcgggaatggtggaaagatgatggcttctgatgaagatccggtgagtgaggtgaacagcaagctccgagatgcagccgtgtctttgaaccagatgcaggaccttatttttgctattagaagacaatcggcaaactttgtgaatgtcatagacccttctcaggacaactctggtatgctcatgttagtctggtgtcttttttggtgtggaagaggtttgtttcccccggaaaacatgaacattgtggaggataccccgagaatattgccagcgtaggcatgtgccatcctggtggaactttgctgtaatttttttgcccttgttggctgaatgccttgctctggcgtaggaaatggtatatggcgtgggagtatattgtcatcggtcatcaccctttgttaggtcgggttacaaaaaatattgcgaaccttgattggagctcgcgatcctgctgccatatgctctgttttttgaatgcattgag

SEQ ID NO: 3375 - DNA, 614 bp, Oryza sativa
ttggggttgagcatgtagctcagtggtacagcacctgtagagatgccacacacccagggctcgaatcctggttaccgcatttgtgccctgcataaggttttggtgggccccttctttaaagcaaagtcaggggggacgtccttcccccttgatgggagttcttttagatcttatatgttcagattctactttgttattatgtatcttgacttgcctgtgctcctttttttttctatgttttttttccttgtatgagtatatgatacttctttttttcttttggataattgatttgcaaaattggtattctttcagattagtggggcctctgaagctattcaggaagctctaatgcagataactgcaagactgcggaaccatcttttccgggacagaatggcttcaacagtccctaatgtgcagccaccttttggtttggtggatcctcagtttggttcatatgcgggaaaccatgattctatatctcctaggatttttcctaatgtgcctcagtttcataaagattttataggacgaccattggatgagatgtctgctccttggaccatgaaggtatcaatctatgtatttttttttcactttaagatgtcatg

SEQ ID NO: 3376 - DNA, 757 bp, Oryza sativa
cccacccgccgccttccctgaaaaaaaaaataattaaccgcacgtggtaaatacggatatactcatcatacacaatcgattaatgttgttcttgtaataacaaagacgaataaaaacttgacctaaaatatcttatattttagtacagagagagtcgtgagcgatttaccggcggtgatggtggaggcgacgccgatgaagacgaagaggaaggtgaagaggagctcgccggcgacggcgcggaggcagccgggctcccacgcctcgccgcggtggccgagctccagcttcgtcatcggcagcaacggcatagaccgatcaccgatcgatcaatctgatatagtatttgacaacaatataaatccaaatatatatggctagctagcagcaaagttaggcgatagatcgaacgatatgccgaaatggttggtctctgatcgacaataagatgaatagatgatcgatcgagacaagccactaaagctagctagctaagctaagcgatcggtggaaagttgggaaccattttttccatggacaaaaaggaaaaaggctaacaagctttatatatagtgagagcattgagaggagatgatcagatatgtttttcatacaagtcaagaaagctcataatggcgagcttgaaatttctgcatcgacgcactggattactgcaaaggaggagctgtacatgcacgtacacgcatcgatcagctgcggcctgcacgaacatgtgcacactgtcacaccaaattgt

SEQ ID NO: 3377 - DNA, 592 bp, Oryza sativa
gagtcacacgtcgacatcgtctcgtcaaccgaaactgaatctcctgaatgcataggggagacgaagctgctgcagggtacagtgacaggtgccagtgcagcagtcggcacaatgctaggcactttaggaggaagaacagactccttctgtgtggcgctctcatggcgggatatggccggagccggcttggcggaagccgatttcaccgccgaggcccgattcgtgcccacattgcggccactggccaaagatcccttcttcactggtgcagctgaggcagctaaattcaacttttgcaggaggatgggacaagagaaatcaatttataatttatttcaatctgttcatttgggatttcacagaccacaagcatgaaaaggaataaaaatttaaaaacattagcagcacgcaagtatcatattaccaattgaagattccaaagcaagcaaacgtacaaaacacttcacaaataccaagaaagcttgatttttgaacttttgaaggtgccaataaactttatgcctgttgaccatggatgctcccaagaaatcattaatcaattaccatgaaaagaggcctaaaatcagcaagg

SEQ ID NO: 3378 - DNA, 2079 bp, Oryza sativa
ccgccattggtggtggtgagctttgcttctcctccgctgttctctcagctctgctgctgaattactactttctctgaattgagaaaaatggacggtcacaagcttctctgaactcgcgtagcagtgtcaccgtccatcgcagaaaactcagttggatgtacgcgcagcagcagggattcaccggccccatctttacgctaattcttatacatatcagccaaaattttaatttttaatttttaatttagagctgattttaggtttttttaatcaaagtttattttccagcttttacttttagagtaataaaaacatgtatattttttttagataatagaaatgtgttacatctccggcctctgcccgtaggcacgtgaatagaaaagagcttaaaaaaaggcgagatgggacaaacccccaacttctgccaataatatgatctactaaaatcatgtttttttaaaatcatatagattctatcacgaaattctgtagttactacaccatccaaactggagtaaaaattccttggctaccaattccaagtgtgtagcaccattgcgcgtagtatcctgttattccggtgaaagcatcatacaccaagagtggagccaattggaacacatgaagataacctgcatgatgttaggcatttttttatggttaaaaaccatatcattacggcaacgccaaattgaccaacatagagcactagctccaaataaaatcattttttttgtgggtctaggcactccccttagccagttaccaaaaatatcttttgcattgtggggagggggaatattgaaggcaaagaagacacatcgccaagcaaaacgtgcaacatgacagtcaaagaaaagatgttggatgatctcttgtgtattacaaaaacaatattgcttgtttcccctctattttctctttatgaggtcatctttcatcaagattactttttttgaagaaaccacataaatacttttatttttagtagtacctttacctcccataagatcctcttgtggattcttacattggaattgatgatcgcattatacatggatttgaccgaaaaatagccatttttatgtagcgaccaaataaagcaatctttttcatttgacagggttatattagctagtcgagaaatcaaatcattccactcaactaactttggtcctacaattgatcatcggaatgaaacatttaacggtgttgtgctcataacctctgccaaagtagaatgtctctttcgaaccacattgtacagagaaggatattgatatttgagtggttgcaagcctaaccatgtgtcttcccaaaatcttatttccatcccattaccaggtttaaaagatccatactgaaaaaattgatcttttcctttcattaagccagcccaaatttggaatgttcctggtttgtgtgacatgtgggagaggggtttaccttttaagtacttgttgcgtaaaaggttttgccatatgccatcaccattaagaagcttgaatagccatttgctcaacatacatctattcatgatatcaagatttaggatacccagtccaccttgatcttttggccggcatatataatcccattttgttaacctatatttctttttctggctatcacttctccataaaaagctcgatcggtagtaatccagtctttgaagtacacctcgaggtatttcaaaaaaaggataacatgaacatgggaaggctcgaaagaatcgagtaagaagaaccaatctcccaccataggagtatgtatataaagttttattcataaattaatttccattcgagaatatgccgtttggcttattccaccaaacaaccaaacgatggggctgcacgttttccgaccaaaaccagctgaaaaccatgagatttcgaggttctgatgcggaacgaatttaaatgtatgataaaaccactctgtaccgagttaggggataattcgtttgggttgaagggtctgatgtttaaaatatctggctttatagtttatgggtgtaattagtactgttacagtaatttagagagataattcacacttttgggctgcaggaat

SEQ ID NO: 3379 - DNA, 849 bp, Oryza sativa
cccacaaacatggtttgaaacagcaggagcatgatctcaaatggaacaaacatggtagaatacctccttaagatataagtatccataaatcaaagcaaacatggtaatttgtgaatactagatatcactcaatcttaataaacaccctacccaacatttacatctaaacatgttatggatcacaacctccatgacacaaattttggtcctgtgaacatatatttttcctccttttttcctaatagagtcaaaatgccacgtttcaatctggaaagctccactcctacatccaccacacaaacggttcacagtccataaaagaagtttctaatctggtggcagtgctggaaacttgcatatgatgccaatcttatgatctgcattgtgctgtacttcatactcgataacccctatctacattcatcgccgtccagaaagctaacctatggcgcaaaactgtggcacttttttgtacaattgtgccgagagaaattgaacaaccattaaagcacattatgcacatacaaacatctattcctaatttaagagggttgtggtatccaggagtttcacattttgcagcgcaatgctcattccacaaaccttaaaacctaacatcagagcaacaaatataaagcggaagtgagacacagggcaaaggcgagacgcaccatggagggtcgtgcgggccggcgccgcactggtggaaggcgaggatggcgcgcacgcggaggccgtagcggcgcgccatggcggcgagctcgaggtaccccgcccagtcgtacaccccgggcccctgccgctccacgaccccccaccacagctcgaccgccaccccggccacccctg

SEQ ID NO: 3380 - DNA, 663 bp, Oryza sativa
ttcatcatattgtagtgacgttatggaccaatagccttaaaccatgagttaatacttctggtttatcaggcgttatcagagtcatagaactctggtggttgtatatccgtccctattactagtaagttacatatattttggacattaacatcctgttagaaagttgcagatcttttgggcatcaacattttcgaaatatagtatcgaccaacaatttatatcatagtatacaatttttatacaatcctattggaagaaagcttaatcgaagccatgtcccaaaacacaagtacatttagtggaagaaaaacccgaagaattttctttttgtactacaaatttgttgatttttgtgtactacacgaaatgatttatatacaatactaggccttgtttagttccctaattttttttccaaaacatcacatcgaatctttgtccatatgtatggagcattaaatatagataaaaataaaaaataattgcacagttagggagaaaatcacgagacaaatttttttgagcataattagtctatgattagtcataagtgctacagtaacctacatgtgttaatgatggattaattaggctcaacagattcgtctcgccgtttccagacgagttatgaaattagttttttcattcgtattcaaaaacccc

SEQ ID NO: 3381 - DNA, 584 bp, Oryza sativa
tttcattctgctccagtggaagaatgctagtagcacagtgaataatccacggggaaagaagaaccttgttttatcctcatggggggatgagtcagtgcttactgaagattatgttaatcctcattatacaactgattgctatcagtcatacagcgaaaggaccaaccaaaatctggtaagtttcatgccccaaaccaaaaattttgcgctcttttttaaaatataactctggcggactaaagattttctgttgctacctcagaaacgcttaaatgaagatgtgattgattttgatctgttggaagacttgatatgctatattgatgagaactgcccccctggcgctgttcttgtttttcttcctgtaagttcagggtgtcacgccagcttaatgcttcatttcttaataaacaccttgcaatattgatgattgatcaccatttttcgtctgtgatgctgctcagggagtcgcagagattgatatgttgattgatagattatctgcttctgttagatttggaagggaatcatctgattggattcttcctttgcattcactgcttgcacccactgatcaaaggaag

SEQ ID NO: 3382 - DNA, 591 bp, Oryza sativa
tcgagtaagtgaagataaaatgttggctgttttcacacgaaatggctgatatagtatgcatgtaccaaacatatttattaattaattttaattgattcttcatttcaggctaggtcatcaatgttaatgtttattagcaccatgctaaccttaatggcaattggagggttcccatccttcgtggaggatatgaaggtatttatgaattgatatgtcataccagaaagagcaaacatgtttactctatataatttgttaaaatcgactgaacacacatatagaccaacgggcataaatagtaaaattaagtcagtgaacttggatacgatgtctggaattgattattcaaattcatactactgtaccaaaagattcaacaaagttatcaacacgaataaaaattttccatcaaggacatgggatagtgctatttaattaaaaaagagtaatggaaataaattcattttcaatttaggatattaagaaatcatgtgaagcatcgcatagaaaaccctaaaataatctctcttatgcatcctaataaaattcacaaatacttgcaatgtcttttgactctggataaaaatattt

SEQ ID NO: 3383 - DNA, 820 bp, Oryza sativa
tattttttttgaaaggacatatacacaaaatattagtagtagttattgaagtataagtattcattcgaataataatgtgcatccagaaattagtgtcctaacctctgaagttgattctgctatgtttccgttgttataggtataccataatccactgacctaatggaaacaaaacacagaaattaagctgctgcattgaagaaagctaccaataccaagccaactatagttacttcatacttacaataactgctacaagtgatcaagcaaaatgctaatcatgcgactattgttacaggtctatttttatggcaggagttccatgcaaaactcgaagaaactaatttccatgcaaattctaatgctccacaaatagccaagttgtgactactgtatctgtgagataatatttgacactgatctttcagttacgttacaagaaaaaacttaatatgaagagattaccataatttcatgcttgttgggccttttcttcttctaacagtaaatgaataatggatctgaccacttcattgtcaacaaaagttgccatctggaagcagaccatacaaacaagataattagaaaatacaagttgcagcatattgactgtaaactatcccgcgtgtattgtatcaagcctttccacaaagctatacaagtgaaccagccttttattacagtgagccaatgaggtcagggagagaaattatatgatgagatgtgcaggagacactacagctgcacaatatctcatttcatgagtaggtgttattccttgtacgttaaaacaaggggagacaccatacctctggctttc

SEQ ID NO: 3384 - DNA, 662 bp, Oryza sativa
cccagaggtcttcttactctaccttgcagttcccggtgttcctctagccaaaatgcaagtacttgagtctgattcggttgccgcagtgaagcttcggatccaaaacagcaaaggatttgtggcgagaaaccaaaggttggttttcgaaggcagagagctctctcgcaatgatagccatatccgtgactatggggtgaggtatggaagtgtgcttcatctcgtgatccgactatcagatccacgacgaaccgctgtgaggactgtttatggaaggaagtttaaattccaagtggaccaacgtcgaaatgctagatatatgaagcaagagatttcaagaaatgttgaaagtcccaatggtattggagagagcatgactttggtcaatggtgaaaagcttgatgaaagcacattaatctccaccatttgtgagaccaacacttctgataccgattttcttgcaaacaagtcagaaaattttaatggaaatgaaatagaagaatcttttgagcaattatccatttcttctgacattggaaacaatttacaatttgatgatgccaaggagaaatatcccctgattgaaccagttcttgtcaacccaagtgttacccttactccaaaaattacgggtatgatcgaagctacacttgctgggctagaaa

SEQ ID NO: 3385 - DNA, 603 bp, Oryza sativa
cattcatttgcttagccttaccatcaaagccttctcttctcccactggtcacatcactcgccttcgccctagcatcaaacccatccctcctcctaccaatctcatcagcacgaggcacgctgcttgctctcctcgcatccgggaccctacccccaacgccacccaccgacctcctcgctctctccggggcagcggccctgatcccgccgctcacgctccgccgcaagcccgcctccgcctccatttccttcccgacagatgccctccccggcatcaccgaggacgccctgagggtggagacgagcttggaggactccacggagctcgggatcctgctggccctcgggatcgacgacgtggaccaccgcaccgcggcggtgggcttggagggcttggacgccgagttctccttcccggcagcggcggcggcgggggtgcggcgagcggacgacgaggcggagaaggccttgggggtgagcgggcgggatcccgcggcggcgggtgcggccttgccgcggtccttgatgcgggaggccatggcgatggtagggttagggtttggggggatctgggggaagacgagagggagagggagatggtttg

SEQ ID NO: 3386 - DNA, 524 bp, Oryza sativa
gtacacttctgtacgagtaccgaaaagataatgacgccaaatcttcaatgcatgaacgactgcagctaactcaatatcatgagtagggtagttcttctcatgcggacgtaactgtcgagaggcataggcaaccaccttcccatcttgcatcagaacacaacctaacccaagtttggatgcatcgcaatacacctggaaacccttctttggatcaggcaaaatcaaaataggagctgatattaagcgacttttcaactcttgaaaactctgttcacattcttccgaccacttgtacttcacatctttctgaagcagtcgtgtcatgggcttagcaatcttggaaaaattctctataaacctccgataatatcctgcaaggcctaggaaactgcggatctctgaaactgtctttggttgtttccagttggttacggattccacgttactaggatcgacggcaactcctccggctgagatgacgtgaccaaggaatttcacttcggacaaccaaaattcacacttgc

SEQ ID NO: 3387 - DNA, 4769 bp, Oryza sativa
cagggagaaataatatcttcccattaaataaaatgacaaggaggccaaattttcgtgccactgttcaagaataacatttacagatatataataaatatacatattttaatagtgaacattacagagccacataaatttcagaaaaactttcctcttcctctgtagttagcttgtaggcaaacaaatggatacatatgcacatgaaatttccacagatcaacacaacggcagagtcacattctccataatatccagcctcagcacgcaacatgatcacatttcttgctgcataatacaatgtaggcaacttcaatcatctcatgtgagcaaacagaaagatagaaaaacacaaaaatgcttttctttacagaacagcatcacagcctggttgcatttctgtcaggaatctcccaacctccatatatgattccaggagaactttagatcctctttaatcaaacaaaaaaatgtaggtaaaatatatacgtataaactttgtaaagagcaacacaacaatggaatcacattttcctatacacacaatatacttacacactacgccatccagtcatccaaaggatatagtgtcacacctcacaacttcttttgaatacttcctagaaaagttttcatcctaagacgctaacgcaaagagaagcaaatcacttctgtcaaaagggcaaaatgccacaatgatcttatttcttccacggttcaggctcatcaaagaacatggtcaaatctcctgtcttgctgttgcatactgccagaaaactttctatccttccatgtagagaacaaaaaacacaagaccttttgtgagcaaaggtaacaagagtcacattccctctgggacaatcctagtcacaaaatggatcctttttctttgccgcaagctttcattgcatccacccgtgcaaggaaacaacaagaagaagatatcaacaatttataccatacggcaaactcttctcaagcgtgatcctagctaccaactatttttattgtatattgcatcacaaaggttatcacaaggccacgtcaagactataggcatgtcatgctggctcgttttgttttgttcctttttttcaccgacatctacttcgtgacgaaatgtctctctctaatataccaccatgcccctaaacttggctttaatattgtgaaatgccactcaccttcgttgattctcccctcacatgtttcctatatttactgaactgccacttgctttctaagcttctatggggatcctctgtgacccacagatttgaatatttatgtggcataataacgtttgcaccaaaccaaaattactaagagcatatttaatgttaattttaccactttacatatgtcccattaatttacttttttagcattggatactatgggaggagtacagtgtatcaaaaatggaaggcccatattcggaagttcaagcaaatacaaaccgtcaagttgacatgtggatacgaccatcctttttttggcgttgctcagtgtggtacctcgacaagcattccaacaagttcctttcacgttttgtaatctcgccaaccagctctgaagaggaagggggtgtgggtgttctactcaacacatttctctcctccccctcccctcacccccgtctcctctcaactcttgttctttttctacttgctcccttgagactaatggctttccttagtagatgatacgattattttcctgtttttgcattttcctttggctcatggttgcaggagtcgattgttgatggtggcaagcaccatcggtcaaaccgtcgtgcttctcatcagtaaatgatctaaccactagaagaattatgtcggaatttgacagtatgacatatgatcttcatcatccaaggggtttcaatgttgtttctgagtttttttgttttacatggaggataaggaaaagaacctgtgtaagtatagtcacaatatctttttagaaaattattaagttctctataaggacctgtgtagtggattccctttcctatatattctatttttttatataaaaacattatcagtactatcaaattataatgtttcatgatatttttatatgaaaacacttagcatagtttggtagaatgggaaaatattgttttttataatgagcacaaatcatattttaatacttaaattaagaaagtatttgtaaggatattttttgaaacttgcatgttaaaaaatctcatatctattattctcttgtataagtgaaattgtttttgctattacaagaaacacacatgcctacacaccaccacgcatgcacaccatcacacacatgcgaagcccccccccctccacctccctcccaaaggccctaacacacgcttaaagagacggacacaaaagaaaaatccctgacctcactatttgattcaataaaaaaaataatgtttagcaaaacatttcaccaattcgcaagaaaacagaaaaaaatacttaaaatatgacataaaaatataaataaacacatctcctctctgtgttttggagtaattgactctattgattactgccttattgccatctcacttcgataaatgaaagttgtatgattataatttttgacgctgcacgcttcgatgacataacatattttcagctgtttatgatattttgctaaataaagtggtttgaaattaaatattttcagtgtcaattatttaagaaggcaggtactatcattttagagcatgcatgccatcatcgaagctcaaagttctagcaacaattaatagttgcactcttaataatcatatccatggagtatcataatgcataatatgctgcagagacaaatccaagctcatattctgcagaaacaaacaaaaaagatttggtgcaaatgatctggggacatagcaggaaaagtgatttaacgaatcctacttctcgcaggggcaatcttgtactcacaaaaaattaaatcctatgtcaacaattaatgttaaactcacctttattcctagttttaagctatataaacaagactagccactttgttatcattgccctctctcagctcccaaaaatctcactcatgtttgattgctttagttattctccatcaagaggttgaaggctaaactactcttagttcaatgtttaactaaacatatccatacccatcactttggtaagtatcatttatgtgccacactatatatgtatatgcacgtcatttattttattggccacttttctagaaatcttaacccccttttcttacaaattcatgtgttgatgggtatattctgtggatttttattattatttggcatttattatggaggatggattcgaaggtaacatgtagagtaaaatacattgttggtccttaaagttgttgtgtgatgtcatactagtccctaaactttgaaactttgaagatggagtttgagaggagggggggggggggagagagagagagagagagagagagagagagagagagatggtaaccacaccagtatccgaaggagtatttggtattttaataagattaggatgtgtacttttttctcaaagttaagggatcaacatggcaccatgcaacaagtttagggagcacttctagtgtattttaatctttacttaaatgtgggaaaattatgtcttttaagtacactgtaggtcttgtgggagctacttttatggatgtgcctttttgtgtggcaacactatgttcaatttatttaggatattgtgcttatgtagtgtgattaaaatgatcaaatcaaaattgtgattgatgtcctaacacatactcctttgtcccaaaaaaaccccccaatcctagggatgtatctggacaacgtgtatgtctagatatatatctaggattggattttttttttttggacggatggagtactactttaattaatttcacaataactatatttggaattcgaaatgcaaagttcctttatctatgttcttacaactatttctcttcatgtacttgatttctggagatggcttccaagatattgtaattaaaaacacatccctcacagcttccatagacgctactaaagtttgtggtgcatatcaaagaaactattgttgacaagagcatggcatcaacaggcattgcagtgagcccaagcaacaacgatgctttggacctagctgttgcacaattagatggtgatcaatcttcatatcatcatacaccagaggtcttcttactctaccttgcagttcccggtgttcctctagccaaaatgcaagtacttgagtctgattcggttgccgcagtgaagcttcggatccaaaacagcaaaggatttgtggcgagaaaccaaaggttggttttcgaaggcagagagctctctcgcaatgatagccatatccgtgactatggggtgaggtatggaagtgtgcttcatctcgtgatccgactatcagatccacgacgaaccgctgtgaggactgtttatggaaggaagtttaaattccaagtggaccaacgtcgaaatgctagatatatgaagcaagagatttcaagaaatgttgaaagtcccaatggtattggagagagcatgactttggtcaatggtgaaaagcttgatgaaagcacattaatctccaccatttgtgagaccaacacttctgataccgattttcttgcaaacaagtcagaaaattttaatggaaatgaaatagaagaatcttttgagcaattatccatttcttctgacattggaaacaatttacaatttgatgatg

SEQ ID NO: 3388 - DNA, 1197 bp, Oryza sativa
ttttcattgctgttgatcaacagataaacatattcaagccaagacaagaaacaaacccaggaaatccacccattcctctatgcgccattcctgggatatcaggcaatgaaattggatcaccaacaacctgcatgccctacaaagtaaagaccacaatggtaaggaaaatcataaaacttgtatatagtagtatacaagctattttcttcccaatcatacttgtttaccatgttacaataccaatgcatcatgacatatcttcaaccatcaacaattttcctactctagtggtgactataaaacacttctgacaccaactttaaattacttattctcagaaaaaggggtgacacatatggcaccgaaaaccaagaaggcaagaacagatcttgtggaatgtcacactcatgggtaaccaaatttggttcccagccaaattgtcaaacaaagcaaggtaaacacatactccctccgttttttaatagaagacacctttgacttttgacatgacgtttgaccattcgtcgtattcaaaacatttttgtaaatatcgtttattttgctgtgacctattttaccgttaaggaactttaagcatgacttatatttttgcatgatcgcactatttttttttatataacaaatggtcaaacaacatgtcaaaagtcaacggcgtcatctaaaaaacagagatagtaccatttcaatttgtatcctaagagacactcatagggacttcagcttaatattgcaaacacaacaaaggaactccaggctgaaggcaataccaccagaactttgtaacaaggtaggaacacatctggtgccaaatatacataaaacaggaaattgtgctggtctttgagagcattgcaagcatctcaacaaagggagaatggagaaaaaagattcaagcaactcgcattctcatgcatggtccatgacatcttaaagtgaaaaaaaaatacatagattgataccttcatggtccaaggagcagacatctcatccaatggtcgtcctataaaatctttatgaaactgaggcacattaggaaaaatcctaggagatatagaatcatggtttcccgcatatgaaccaaactgaggatccaccaaaccaaaaggtggctgcacattagggactgttgaagccattctgtcccggaaaagatggttccgcagtcttgcagttatc

SEQ ID NO: 3389 - DNA, 1618 bp, Oryza sativa
tgatcctggcaagctcctgcaattctttatttgtttttgtagccttttttacttcccctcaaggacataaacaaatgatttgggttgtttcacacaatgcatgaattgaaacgaatcattaatcataacatatcaattaaattggacatgactaaaaaggactggtgcgtaaacaagttaaagtttctctcctaaatgcataaatgaagtagatgttctattgtatatttaaataattttagaaactagcacatatatgtaaaatcaacatacttctatggttctaccatctaaattgttgcaaaattgttgagttcactactcagaaaaattatgtcaatacagcaggggaggacctaccagtacagcttctgcaaatgataaaagtagaaatatgtgtctcaaacttcacaaaataatgcctgatagatataagaattgagaagaaatcaccaatctacataccgcagccagtcacaaaaggcccacggacgtacacagggaggaccccatggaccatatgcatcaccaaacctaccttcagctaataagagcacaatgagcttcctgcaatagacaacaagacaacagtactcgggcaatcgcctcagtgacgagctttaaggaagacggactaggccttgatcttcatcttctctccttcagtcttccctactgccaatatctcttccagcaatcttcttccatctagcagggtaaggtccagcttatcactgttcttcttctactatcattctgttacgagtcctggatctatcataagcactgagcagcctcactcccacacattgttatgcatcttatcatttggaaaattacttatatatatcataaaataaactgaggcttgtaggtgccatatacttaattcatatcagggtactggaatagagacatgaagctgtataacattctctcaccaatgtacatatcaaacaaaaatgcaataattaggctagtttccttaatataagtttagaaaatcaacatgatgggctcatcatacaaaaaaaagtttgaagctttcaagctccaagcatatagcttgcatgaaaagagaactgtgcagctaaccatagcatttctatctcacaatgaaaagactgggatattttccaaagaacctagcaaagatccatcatgttgaaatttagtcactattcagcataattagcctcttcgaccatatgcaagtctgcaaacagggcacgcatattcataaatatgaacacataaggtcactagcttcattgcccacacaatcatcatcaccagcaactcaaccagtccatggtcactaccttcaggtatttgaaatatcagggggctagtggttcacttaggacaaatgcttgaataagacttcgggctgcatgcatctggtctggtgtgccggatatcaaaatagcagtgtccattgcattacccatcggatctgcgacagttatcttagcccctgaaaactgcacatggcttaattatgtcagatgatacatccaaccatttactggatatgctacaaaatgcactagccgaatacaaacctcacgaattctgtttaaacagcctccatcttccccacatagagaaggtaaaa

SEQ ID NO: 3390 - DNA, 530 bp, Oryza sativa
gatgccactgtactaatacatgaggtaagatgaacataaatcttttggacaactaattccattattaccaacttgatatccactgccatttccatggtggctatgattctatattcctcccttttgagtgcttgccatcactgcttatgctccaaggtggtttccaaaagttcaatatattatttgagttatcagttctgttttttctgtctgtcctagtgtcctgtagtaaaatatttcactctccaattgatgtggacgacaactggccaagtgcatcaccaactaaccttgcatgtttttgtatactgttagctgcagaatgttctcttctaattattgatgatattaatcactagttaatggcaataatggtattgcgtgtctaaactgtgcaatactcgtttctccaggcaacatttgaggacagtatgaaggatgaggcgatcgctaggaaccatagtacaacaaaggaggccatagcagtaggcacatcagccggagcataccgtataatcttgacccacttt

SEQ ID NO: 3391 - DNA, 5404 bp, Oryza sativa
  unsure (1)..(5404): unsure at all n locations
attgaaaaggtaaaaaaccgagccgaacaaaccgagtttgtttggtttggttgttcggtttcaccgaacaaaccgggagaacatcttccatgaattccgaagcacacgataatcaaatgaatcgctagatggttcataaaaatcgagaggggagaagttgctttctgccctcgcacatggtaggagtcataaaacttgcaatctgagcaaactgccagctatgagtgatgtgtgcatgtggcagctatgcagctgcccgaggcaatcgtccacgcatgcagtggcagcggcagcatcgttaaggtagccatccaatccagccatgcgcgtgcaaagatcgatgtcgagatgtcgatgaataggcttgaccgcttgagaagatacgagtagtgttaaactaatgggctctgtgccttgtttaggagatgttgggcctttcatgttaccaggctgggttgctgggatatgatgtgaacgtgtggtttcggttttctcgggttgtttggttcgtgaggattggaaaccgcagaaaaaaccatacaccgaacaaatgcagaataaaaaccgaaggataaaccgaagcctgaaaaacccgacacttcggttcggttcggctcgggtcggttcggctttcagtcttcgggattttactgcccacgcctaatatagatacatgcacagagtatcaggaaataataagccattgcagcagtgcaccacatgcgtgcaagtatgaagatcgcttgtgtttgtagttcgctgcggcatgatatttgttgttgtgccgcttttcttttgtaataatcgtaagtcgtgtgcatcttaatcatgcagaggctgggactggtcttagagtaattgtattgtcttgatgtaattgtttaagatcaataaagcttcctttatcttaaaaaaagtgcatcacgtgtacctcttcaagaacctttgcaattttctctgaagcctttctaatatcttcagtagttttagcttcaagaactgaaaataatcaatatagcacaaacattagcttccaaagttaccaacagcttatttcatcaagcatatttgaaaaataaacagtatatctttaccaacacatgtttcctccttagaagatggaaatataattttgaccccagtttcatcttcaatctgcttctgcatggttccactgcatgccaaagaatacgattgattctcagtcacagagagagacaggccagcattatcctcaactgaggatagttgaggataatgcatatctgaaacaggttcaagagaccaatacccttttcctttcacaaagcgcatcagaggagcatctacctagaaaagaacagaattcatgaatatttgaaaagaatacaagtaaatatcactcatacattgagctttttacagggaaaagatacattaattgtcatacatatccaccgagcatacctgaacagaagaggaacacttttcagatagattggacctatctatgtccttattgaagctagcatcctccatagtatcttctgtggctaatttattttctggcaaggatgcgttgtaggtggaaacttcaataacaacattagttgttccatctgaggctgaattctcttccacttgtttgcttacaggacctgacatctcattaaggtcagctgcatcatgtggaatataggatgattcagaagtgccacccaatgctatacacaaacaagttaaggaaaggaaatttagagatagatggatattatctttacagcatcatagattagcagcgtccaatcatgactagggcatatccaggtttgaatgcactatgatcttgagtcaaggtattagcagtagcaagtagcaaatggggcttaccttttggagcagcggcttctgtggagattggcctccatctctgcacagcagactttcttttcttgtgttttgccgaattatttgaggctccttgtgcacctttcattacaagtgagtgaatactattttgattaacagatccctgtcacggtcaaagtactatcatgtaaaacaccatattgactattgaggtgatgtatcacagaagctctgatgaaggcaaacgcattaaaagaactagtagaagcagataacaaggtgctgaaaattttggtaccgtgcagagttagacaattttcaggcctgcaaggttggcattcgatctcaaggccaggccaagtgctacacacaactcattaagttaaacatggaccggcacagcataccgcagcagatgaacacgatacagagggtagaacacaaagtattagctacggaatttctcaagagagacatggcaattgcatagctgttcaaaaccatacttgattcaatcaattgatagcataagcccctcaaggcataaacttttctcaacaaaatcccccaaaaaaagatccccattactagctccaattgacacactgcggttcaattagactaaacaaattctatcggttcctaaaaccctagctcagatatttatccatccgtatcaataatgtatgtacgaaccaaaacaaaacaaaaataaaacaaccggaagcttcttgtgggggagaacaccgtggggaggcagaggaatcggacctggaggaagcgcggcgcggaacccgcggcgcatagagggcgagcgagccgactaaacctagcaaagacgacaggagaaataaattactccattggtaagagagagagacagaggagctgcaacccccccgacgatccgggcgcttcgatcgaggaaaagattggaatttctactggcttccttcgatcgaggttgttgcggggagagggataacgaaccttgcgagggaagcgcaagccaacatgggtggtgtggaggccgcgcggctcagagacggcggcggcggcggcggcggcggcttccggtttagcctgcctgctcggctgcccgactgcccgtgcccgctagtggtgaggtgagcgacagcgactccacggcgccataattaactgaagtatttgctactcttacgggcggttctaaaggatttaccactgcgtccacgtatcatagacacataaagatctatatgtggcaaataattaaatgtcccactgctttggggttattttggtttgtgctttgataaattttatggtccttgaaagagtacctcacggtatcttaaattttacactattttttttatatggaacgatatttagtatctggatatatcaaaatttacactagaaaggtggtgtttgaatgtctgaagataaagatgaggatgaagattaagtattccacgtaaaaagggtgttaataacgtgtgattaattgagttttaattattacaaacttgaaaaatggattaatctgatattttagaacaactttcatatagaaaattttcacacgaaacacgccgtttagccgtttgaaaagcgtgccattttaatccaaaagtttatctcccactttcataagaaacgaacaggccaaattgtgcacatctcggtattttttcaagaatagtaaaattgaccttgtgcttatcatcaatgacaaattttataatagcaggtttaagtagttttaggagtgccaaaaaacctacgcaaacttttatagtttcaattttttaatcacttgtgcattatcgatgaattttgatatgaaactaattattacccctgccatcctaaaatataagagatgtatgtgtcttatccaataaaaaaaatcttatattttagaacatgagagtgctattttatctattagagtccgcagcctggtccactaaccgtgggccacccaggtcacattgggcctgctctaccacaggcccaactggagccacaactttagatcctgggcctacacacccaaaagactagtttgataggtgaggactacactcacattttaagtcgtgctccctcatcatcaattatcgatgtaggactaaacctaacattaccaatgattttgcagggtgcattttgacttcaaattagaatgccttaggttctctcaggtaccgatatctgttactgatggcaaactgtagacaagaaaaactagtgaccgtatacctttatagacctttgtgctttgtagagtaaatctatgtaattgttagcctatagccttaggttctctcattctttctatcagctcattctttctatcagctacgaaaaattgttcttgccgtgatcatctcatactaattattctacaatctaatattttcctttttgaaattcttccttgtcatcagcttagctaccgacctttttgtaattgtatagtgcgcgctaatttactccgatccaacttgaaccggtgctattgttgattggccattctaataagttcaacattgccaacttttttcttatatacatgattctctcatcacatactctggccactcttgtgctaagtgatagtatgtttttgcactgttgacatctgctttgatgcaggaaaaaaaaagataattcctggtgacaaattaacaagatacagctgcaaccctgtctttttctctgcacttctgcatacatatgcaaattttggttcgtaggcaggtgatgtcttttctctgtcagacatcacaccacaaggcagcatcacgtagaagtgatngaagctctaaagagtcnagggctttctaagggggagatcacatttcatttttgcggttcaatgctcccactgacatgcaggacaagggcccacctgcaagtgagaaagccagccgcgaaaacactctcaaaatgatggattgagttttgaaaagaatttcaagaacgctgaacatgcaatagcacggctacctccagcccagaacagcagcaaaacggcacatgggagctaagatgattgatgagttcaaactgaagatatattagtaaaaacaacagagaaataaacttgcagtagtgtgattgtacaaggtccagaccaacaacaggtttacaacaccatacaggattatttttgaggtactaaacctcataaaggagtgcaggtagctcctgcttcatattaagaaggaaaaaaaaccgaagagttgccacacaggattatgcatggctgcttattccactatcaaaagaaaagacctatatgaactcactcactcaagaatgccacaccaacaatggcacattattggttcagtaatagtaaaccgcagtttcatccttgggggatgaaatggttattccgaggctcgctccgcttgcatattcccgggcaagggaagcgaagagcagcagtagtagtgtccactttcatcaaacctgcgtgtctgacaaagatgaatctcgggaatgagatattcgccccattcatgttccgcgtatttttcgaatatcttccgagcat

SEQ ID NO: 3392 - DNA, 2008 bp, Oryza sativa
  unsure (1)..(2008): unsure at all n locations
gcttagctagctactagctgcagcctcgttgtaggttaactactgaactttaatttgcttgtgctgccaaatgcaaatcagcatcggattactacaaattaagcaagtgtgtccgggaaactaattcaactggtaatctcgctggtattatggcagagatcttcgctgatctcaaactgatatgcgacgatttttctaattaagcaacgacgacgactgggtggatgatcgaatggttttgatcgagacgtgatcttcctaggacacgggagggagatcgatgtgatctgctagctacctcgcacgtttaccgctgtctgaatttgttaattaaccacttaacatgcatctcgcagcactgttcagatatcaagaaccctttgttaattgcgtgctgggatagttcaggatgtttacaggttggggcgccgatttttggaagatctctggtagatcgatccaactcagagatgacaacgatatatttatgtatagtgtggtttttgctggtgtgtgtatgtagtatttgctctctgacctgataattcagttcgtttcgcctttttcttttcattcaagttgtttgattagcccatgcgatcagtacagtgccttatataggcttatagccaactggggcggaacacgtacattatcccccaagaatatactccaactagatgaagggtgtgtttggttgcaagccacactttgccacagtttgccacgcctaaggttaggcaaatttgacaggtgtttggttgtagccacagttgtggcaagattcccctccaacaaattgggtcccacgtgtcaatggctcaaaaaagtgtggcaagattcccttaggcttagtaagttgtggctaacaatttgatcacctcaccttaggcaaggtgtggcaacttttattggcaagtaatggtaaagtgtggctgggaaccaaacagccccgaacccaacgacatatatataagggtattgctaaatcacattccatataaaactggacaaaataactttatttttcacccatctcacatataccaatgcaaaagcaaaaataatatcttttggtttatcgaactttaataaaactaattttttaccttatttagttccaatgtatttaatttgttctcactttcacaaactctaataaaaaggttacgttaacttattttgggacaaataagatggtgataaatatagttactttggaataactagagtgggcaaatgacgggcttttcctgctttctttcgcgtgggaaatgatgggcttcttggccgaactagcaacgaaaccacaggaagatagctacacatttggcccacgtagtggaatttgcatcgaacaagtccagttaccttccctcaacttacatcgaagttaatcagcatccttaaacctcttatcttttcaaatccgtccgtattgcgattagggatgccaatnaagttcgatgtgaagatgagggacggtcagtggacttattccttctgcatcatgcaaaacagcccgattccggatacatctcatcacgttttgtctagtcgcctcgaatagggcttaagatctctcattttgtgaggaaaaggaaaaaaaaacgagagagagagaggaagcttcagccaggcgccagttgaggtctagtggacagtagaatgtgtgggccccacacaggtcagattcgatcgccaaggcagaggaacaagtttacacgtcggcatcgctggggcccacgttcagttcaatccaccccgctgttcccgccgaaccaggtgtactactactccgtacttcctgagctactgatgagtagggcccacctgcaggtgtaccccgcccattttcgcccttacgtggggcccacaaacagtggtgcgcgtggttagtctaagcatgggtacgtgcaactggggggctgacgtacgggaccggagttctgtcgggcccactgtcagtgacgcgtgggtggggccatggcgtgtgcgtgggggtagg

SEQ ID NO: 3393 - DNA, 1729 bp, Oryza sativa
cagctactacaatctcagctccaaatccagctcctccgacgagctcccggcgctgctccggccgccggagtagccgtcgtagctggagctcatccaggagtagtactggggctgcctctgctgctccgacgagccatactggccgtggtgatgatcacccttcacttcatacgccacgaacgccggcgacgccgccgccagccggccggagccgtacggcagcatgccctcgtagtacggctgcacgccgccgccggcggcgatcctccggtgatccgccgcctcgtagcaatcctgctgcaacggcggcaagtggaagggcggcgaggcgaacggctgtggctgcggcggcggcggagagtacggcgcgtcgccgccggcggcggagcggagggcggccaccatctggttgtggaggcggatcttctccagctgcgcgacgccgagcccgcgctgcggctgcttggcgaccttgtgctgctgctccgccgcagccgccgccgccgccttcttcccctccgcgcgcctcgccctgccgccgccgccgccttccatgcacatctcgccgccggcgtggctgctgcccatcaaccagctgcaacaacctctacgttctcgtcttctctcttcgagcaatgcaaggtgtagtagctgcagcgatggcgaccagctgcctatttatacagagcttagcttagcttagctgaagccacatgggaggaagagctggacgtcgtcagagcaaattaagctgagattaatggatcctaagaaagattcaggccgatctgctccagcgattttctatggctcgctatctcccaaagttctacttccaagaacgatccctacctagctagctagctaacccattctgccattgcaatgcaagttggtgacttttgcgacatgatgtgcaaatataatactacaacaccgggagctcatcaaatcatgcatatttctatatcatttttgctactccatccgtccaaaatataagcattttttattacacagtcttcaagatactactttaactaacaataagtataaaaataagatattttaattaaaaatagttgcatattacgatagtttgtttaacaataaatctagttacatcaattttacattattgatttttttgattttttttttgctattaatagtcaaagttaaaaatagttgacttgacactataataaaagtgcttatatttcgagacagagggagtagatcagtaatgttgccgtcgttagcctgacctacatatcagtgactaccagttcgcgagatctccgtagcaggcgagattgggggttttgcatataatttatagtttggatatcaatatgatagtcgccatgcgaccggtaaggcacattttcaaggaggccacgcatgtcgcgggaatgcaaattgcagccccaactgcgtataaatccagcacggattggatctctcgatctaacgatcgatcaaattaaactggatcatcaatttggtgatatcgatcgatccaatcaatcatgcgtgtgtgtgtgcgtgcctctctcatgtcttggcctttttcagactgctaatcacacaggcattaaacaattggcaactcgtgtagttgacgcaacaactgcgtaatatatatagtacactgctctgaaccagaaataattaatgggaatatatgaagcaaatgaaatcgtatctagatccttacagggcatgc

SEQ ID NO: 3394 - DNA, 5835 bp, Oryza sativa
tgaatgttgtcacactcagtagtcagtacctgatttgctttccgaccgaggcccatcagaaagttgtcaggctttatatctctgtgcaagtatcctttggaatgcataaactcaattctagtaatctgttataattatttacagaaaaagtcttaaattaatcattcacagtgctcaactcatgcatgcagagaagagaaaaagaaaaggattgagttggtacaaggacaactgcaggtgataagttgtaaaactaagttttgcatgtcaaaagagagatacacttccttttgttcttttttggtgaatcagcatggcgattgggaaactttataatgaaatatttcagataactgttagaaatgaactttggtgttcaatgactattgtgagagaacaagacaacatggaactatccaagaaatttaaaaactctcaccaataaaccttttgtttctgtgagactgatcatccaaaatgaaaattgttgcataagtaaaattcacagtttcactagtattcaaacttctgaaaagaatgttgccattctccaagtttttccacgctatcaataatgagttggaataaaatgaattaagcaatgcaaaatattagttaccatctggtctgctaacattagaactgtcttcagagtgaatttcctgccgcaatagacaaacagatcctctaagctcggcccaagcaaatcgatgacgaggacattttcctctccatctacaccacaccacttaacattcgcaatgccacctggatgccataattttttttccaatcaactcatgatctcatcaaaacagagtgcacaattgcactatgcagaactgtattcagggcctacttcctccttggagagcgttgtagagcttcgcctcataaaacagctggggatgcttcgtcttgctactctcctgataataaaacgagcaatcaaattaatcttctactacatacaaacatagcatgcaactgtgtggtataagccatcaaagaagcatatgaggattgaacaggacaaaagcacaaacaacttgtactcatcaaagaaggaatctgattcaagcaacactaacttttggctctctctctctctctcacacacacacacccctgtgttcctcgtcagcagctcttgcttaaagcactaccaatgcaactccactacgccaagcgtaatcatggcctacccagtcaagtagtcaacctccatccacgctcatcaatcatcatgacgtaagagaataggccaagtagctagccgtacaactaaactaagaaaaagtaaatgcagcggttacacatcctcgatcgttcaaagttgttaaccgcataattatcatcacagcattttcaatcttatcatcagcaacctacaaaggctaaaacaaccaactagtaactggaaattttcatcaaaatcaatcggaacactaattcgtatcgcacggcagaataaacagcaaccgaatcgaaaaaaaaatcgaacagaagttcagtggactcacaatcttcaccgccgcgatctcgtaggtgtccacgtgcgtggctgcagtaacaacaacaacaataacatcatcagatgattcagatgacacgcagtaaaaaaccccaaccgccgccgcaaccctagccgcgccacggaaacgaatcaatcgagcggcggccgccgcttcttaccgaggtagatctccccgaaggagccgcacccgatcttccggccgagcttgaacttgccgccgacgatgcggtccatgcccctcccactccccggccgcgccgcgtgaaccaaacccccgaggaattccggcttggggattgggctaagtaggaagacgacgaggagggggagggggaagcgcaggcgtcgcgcggttgttgcttggtgcggacgtcgcagcggagcggggcgatcgagcagagagcaggtggaggcggcgcgcgcgcatgcgtgcttttgcttccgcctcctgcctttatttctggtggagggtgagcgacgcggcaggcgccgggtcggaaactcggaagaggacgagaaggaaatggtgccgattttatttcctcggcggttggatattataaagggcgtcgtatattcggacattaataaaaaaactaattacaaaatacgttaatagagacatagagacaaatttattaagcctaattaacctatcattagcaaatatttactgccacattatcaaattatagagcaattaggtttaaaagattcgtctcgcaaattagtcgcaatatgtgcaattagttattttttagtttatatttaatactttatactccctccgtcccccaataaatcaaaccctagcttccccaggtagaattagggagaaggataatggaccaaaatatccctaattagtagataagttatattggtctatggttaagtaatgggtattgaaggaataaaatttctcgatctacggaccgatggtaggtaggaagttaagagttgatttattttgagataaatttaaaatctagaagttgatttattttggaacagagggagtataggggtttaaacgttcgatgtgataggatgtaaagctttaagataagatctaaacagggctaaattattatattgtacttctcgtagtattatatttttgggtgcgtggcggcgtggcgcttctcgtatcctgacgtggcgcttcgcctctgtgggtgggggttgaaacgtggcaggtgccacctggacgcgggcagatttttaggcggtgtcggtggtggcgcggctggccacgtcattgtgactggaagtgaagcccagtgggcctcctttgtgtcaggcctgcgcgtagttgggactttggtagtgggcttgcagcggaaaaagtgtaccgaaggtccctcaacttgttagcgggataaaaaacggcctcaaaccgcaaaatcagatatgcagattccttaactatacaagaccggtcacccgaggtctttgatggttttgacaccggttttgttctaagtggcggctgggtcagcgtggggggtagaacggaacaggcggcggcgagcggtgctgagcagcggccggcgaagcagagtggagcaaaggcgcggagcgccggtggcggcaggcgggtgagcacggtggccggtgtcctcctcctccaccgccgcatcgacggtgtgtgccctgcttctcccggtggtcgtcggcgtcctcctcctcctccgccgccgcatccgccgagtcaccggcaccggcatcctctggccggcggagctcgccgctccgttcaactcgcacgcgatgctcagctcctccacgagctactccgccgtttgccccatgagcgccacgatgctttccgccgccggctgcgcgcggtcgacgagcacggagaggagcagtgaaaggttctgcttcagcgtgcggagcgccgggcggatgcgggcgtcggcatggacagctcgaggagctgctcgtccattgcgccgtcgcggaagcactcgtcctccacgccgccgcactcactcggctcgccattgtagtcgtagcaaaacaaatctgtttcagacaaaagcaaactccaaatctttgatcgaacaatgatcttagccacaattcagtgtgatcttgatctgaatcttgattgttcttaccccggtactgcatattgttgatcaccagcgtcggcaagatggtcacatcccctctagcgccatgtccaacctgcatcaagaacagcactggcgaaggtgttcgccagtcacacaccgaaaatcctgcatttttcagcatcaagctggtcagttggtctaacaacctgaacaatctgctccgtcttgagcacgtcgttctcgatgtagtcgtagcacccgacgccgctgcactcgggctccgtgtcccagcggcagaagaagtagcggtcctcgtcgccgtagaacccgggcgtgtccggtacggcaggggcgatgcaggggatgaggcggagcacccgcgccgacgacgtctcctcgatctagtactccggctcgccgtaccgcaggcgctcgctgcggccgccgccgccgacgacgccgaggcccacgccggcgcgccgcaggttgctgaacaggcagaggctgtgcaccgcgctgcccttcctcgcccagagcaccgccaggcgcagcagtcgccacgctcgtctcccgatcgacgccttctgctgcttctgattcgccgctgctgccgccaccaacgccattgccgcaaataccagattcagcggaagaaaacggtcgcgaaatgctcccctgctcccgcgtcgccgccgccgccgcggcgtcgccggccaccggacctcctctcccgcctcgccccgtcagtctcctccccacccgccggttgcccagcccagagccccagagagaaaattgagagagagagagagagagagaggaggaagggagagaagagggggaagagagaggaggctgaggtggacatactgacatgtggggtccgcgtgggtcctgactcagcagccacgtagaataaaaccggaattaaaaccgccgacggatctattgtgaccggtttttattagttaagagacgccggatatctggtattgtggtttgaggacgattttgtatcccgctgacaagttgagggaccttcggtgtactttttctgcttgcagctggtgcgagcaattggatggcccattctagcggcatggaccaaattggtttgagttttaaggcaggaatgtttagttgtagggaataagttcacttgaaggttccttaacttgtcaacgaatccgattttcgttcttcaacccaaaaatcaaatacaacagatccctcaactatcaaaacccgtacaaagcaggtctctcagcagttttaatgatgattttggctgatgtggcgtctacatggccggttttacttatcctcgtcctacgtaacggtgatgcgacactagaagcaaaatataaaaaattaaaataaaaacaaaacatagtgcccatatgtcagtgagacaaaagaaaaaagtagtgggacccacctatcagtaggttccaccatcctttctatccacggacgatgggagaggagcaaccagcgtctcctctctccctcctggccatcctttctcgcagccgagcgcacgcgaagagggaaaaaggcgacggccggcgagagggccggagataccaattaaccagagatatacatgcacttgtgtgaaagtaaatttacaatagtttcaactactagttgattagctaccctgactgtttcgttgtttcgttggagacctgaaattaagcgaaaacatcggcattgaaaatacgcttttctgagggagaaacacaaagagttgtgttcgaattacatgacgaacagtatagttcttccggatgtgtttgaggagaggagataaaggagattggaaagatacgtaaaataaggtgagccattagcacatgattaattgactattaactattttaaacttcaaaaatagattaatatgattttttaaagcaatttttctatagaaattttttacaaaaaaacacaccgtttagtagtttgggaagtgtacacgcggaaaacgaaacaaactcactcagatcaccccaggaaagaacacagtcttaatcaagattaatttatagcgcagtacattaccacgtccagtagtaatccagatgaacatgctagcatcattaacagagtaccaatgtaacagcgcctctaatcaaatcagaagcaactaataagaacatctccaacaacctctctaagccaaattttagccattatagctaaaaaaac

SEQ ID NO: 3395 - DNA, 605 bp, Oryza sativa
tttcatttacaaaaatccggtcaaatacaagcaaaatggccttcacggctaatggcattcccttctccagctccagctgcgcctctggctcagaatttgtatcttttgcaacagaggaatcatctgctttcttatcattgtctttccctgactcatccctgtcctccttatcatgatctttttctaaatcatccttttcttccttaccaaggcctttctctgaatcatccatttctttgttactttcatccttttcttccttagtgtggtccttctccattccatggttgccatcaacagaacaagccacacctccgtcgttttccttagtttgcacatgactaacttctctgtccttatcaatggcagttatcacaataaccctctcgtcacaaccagggacaacttcatcaaccctgatttttactccagtctcttgccttatctttgcaatgatgcctccacccttgccaatgacattcccagattttgaagtagggcagagaatgcggaaaataggaacaccaggttgcactatcagttgaggctgctgcaaagaattgtgctttgttttctgccacttgccccgaccattttgctctgaa

SEQ ID NO: 3396 - DNA, 565 bp, Oryza sativa
cccattaagataataattggatgtaacttatttgaatcaaagatagctagtaatgaattctattatcaagaaaaaatatacacaccaagattagggactaattactactcctatcaactatatattaacggacatgattaaccaaaatgagagcgttcattagttaattattatattaattaaccgctcatccacatcatgcgtgcatgtatatatggtgtttatttttaatcagtaactgaagttatcatgacttttaactttttgcctagaaagaagtcggttaattactttacttacatggacaagtacgtatgtactgtactgccgtacacgtacgtattttggaatataagatacagggagtacgtattcttgtacgcacacaacacaagactcgcatgtatatatatattgcattggcgttgagtgcacgaacacgcagttggagcacaaaaatggcgtgagtgcaatggtcttcttgtaagaaaaataaaagggtccaaatcctggaaaaaagagaaactgatttccaaaaaactttaaccgttgttgaactgaactg

SEQ ID NO: 3397 - DNA, 779 bp, Oryza sativa
tagctcatgttcgtaagcaaactcatttttttatatgttacagatactaaaatatggaatctctggtgcagaatttgaatttagtatctttttgtaactagagaacctgaaatgggcgcatcattttttcaaaacgatggcgagtatacaagcagaaacacaacccaggcttcacacgaccagcccgtcctcgtctctgttttgcatttgcacgagaaatccaatcttctactatgcttgacattttctgcaaacaaaatatgacaaaacagcttctattagatatgttttgagatgatttatcatatcaacacatgcataaaaaagttgataggctgagctcatggccaacttatgaatttcatgtgattattactccggtaaacatgggttaaagaagtccaacccatgagctcacaatgtagcctaatagaaccccacaacaaataatgccaagttgccaagcatcaagcatttttattttgactttcaaaagcattttttgtttatatagaatccaagcatgttacttcaatcagaatttaacttccaagattttaaataactaaatagtcaattttagtgcaaaggcatccagtagatagaattttgtaaagaaaaccacacattactaaatattaataaaaaaaacttgaagttttgatgacaacggacctaagggtaaatctttatggtagcagtgctatgttagatggaccagctgatgcaattttcacaagatccattaacagacaaagacaagaccagagtccaaaagt

SEQ ID NO: 3398 - DNA, 8189 bp, Oryza sativa
atcaaacattttcgcaagacatgctttctcaactagagctggcagccatggtattactcgcatccagtataataacagcaaatccatggctatctaggattttagcccagcaatgttccagagcatatttgcctcactttatttttagaacgaggggaaaaccctaatgaaaatggaaaaaatattaagagagttttactgtttttataaaaccttggaaacatttataactttacaaaaaagaaacacaaggaaactagtgctcaccgattaatgtttttctgcttaaaatatttaagccttactagaacatcttaagtccaaccaagggttattttcgagagtaaaattttctggtctaaagctttggcacaaataatggaacaagccttagttgagaacagcctaaagacagaaagaaagtaaaaaaatgaaatgataaaaaataattaactccctaagagcaagggaggaaatctacatagcaatttgaacttaccaagtccaattgcatctgagcctttcatgattctgagcctccggcaagagtcggtgaacatcctgtgattgcaccaaaagtaagacaacagataaatgataaattcagtgagaagagcaacactaacaatcatattcacagccagaattgctattttagttagatggtacaggtgtacttactcccatggaacatcaccaaccagcatccagtcaccatccttgtcttcgtaggttaacacatattcaccatctttctggttctcagcaccttccttacctggtatcacattagaccaactactacctgtcagtccaaataaacaaatagcacaaaggctccttcatgctaaaatccaccaaaacctacatagcgttgttatttacctgcatattcatgatttgtgatggtatgatacaactgctcatgcagaatttaccattaataaactgagataatgttttacccttcattgatgattatgctgaaaatacaggtaatgcatcctatgcacctcagtactttttattctgtgaggaaatgcactttgtataactctaagatagataagttaaacgagaaatctaacagcaagtatcatattaataaaacaggttgtctgcatcaagatctgatcagcttatggtacatgaatccagatacaaactctagtctacaatatcacagaaaaacaaaataaatcatgaaaactagaatagaagcatatctgcgtaagtatttcgtctacaaaatatgcagaattagtactccggtggttagtttgcaccacctgatcactagaaaagatcctaaaagggccacattatacgtaatatgctacaaatctcatgcaaattatattcgtagataactagcaaggtcaaactttggagggattccctacataatgggtggctggttgctttaataaacaaaatcaggttcagtcaaatgtttggcatgccactgaaaacaatcctcatgtgctctaataaacctgaaatttactcgaaatatactaacgaaagccccactgttttttccatctaacatgatgtgtggaggtgagtttcagcccatcaagattaaattatgttgcagcttaaacaaaatagcacccgagaaacctcaccggtgctgaagccaatgaacattttctcgagacccaaagacatgtccttgtagttcttgtaagttttgaggtccaccttcctcagatatggtgcaccatccatgctaaccttgacgtacaggaaaccctgaccctgcttagcatcaacatcctccttgttgctctttatctggttggttgccatcgtgttcttgcggtagctgcggattggtggccatcccaccacctgagccctgcacaagcacatcattgcaaagtaataattcagtataaatgtataagaacaagagaaaaaaatcaataccagaaagaagaatcagcaataattgttcaacggtgggtcgacaaaaaaaactgaaaacgaccacacaactgatttttctgtgaactttgatctaataggggaggaagaaatttgaccatttcaaaggtagccagctcaaactttcaaatatcaggttatcgcaagtattttaatccttcaaatgagaaaaaaaaagagaggaagagcacgcactcacaattaatctttgggggcaaaggagtataaatttagagggaactagaaaaggaactacgcaaagctgaaaaaaaaaacttttgaacggttctaaacacaagagatcaagctaaatccaaaacgcgccacaaagttaaaaaagaaacaaatgaaaaaagcaaaaaaaaatgcgaattttgccacccaatttccacggaaaaagtctcttttgcgaatccacaaaagagctgcctcaaataaacatggcacagattgcaaatttcaccttctcgcaggcaggcctaactaaatcccccacaaaaaaaatctctttatgtaaggaaaaaaaatccttcaaactcatcacccattcgcgctccaaccacaccgaccagcagcaaggcagcatccaccaccaccaccaccaccaccaccaagaacacgacatggcaccaagaaaaaacacatgaagaatcgacggaatccgcaggagcaaagggcacctacttcgcagccggctgcggcggcgcggcgaccttcttgtcctcctcctcagcccccacctcctccccctccctcgccgccttgcccttcccggcggcggcagtgggcggcgtcagcgcggcctcgtcggggaacacgcgcttggcacccttggcgggcagcagctcaagggtggtggcagtggcagcggcagcggcaatagccgcagggcggcggtccggcgactcggagccagggaggccgaggcggagctcggtgcccttcaggtcgacgtcgtccgcgcgggcggcggcggcggaggaggaggagggcggcggcggcggaggcgagaggcctatgtagtcgagctcgaggggcggcgacatggggagcggcaggacatgaaccgggatgcggcgggtttggattcctataggagggaaggagggagatgagatgagcaaagtgtgtagtggtggtggtggtggtggtggtggaagaggctagagtagagtggacagtggagaggttgctgctgctgtgctgcctacttgatgcttctgttgctcgttgttcactgttgtttaatcttttaccagtgtacatccttccagtgtcttttgaatcgtacaaataaaaaaaaataaaagaattaaaaaaacacatgattctgatagaaatgtaagtgtaaaacaaaatattgaaaaagagaggagaaatatatgaatgatcgttagattaggtcataggaaaaacacaagaattgaatgagagttagactcaactaaatttttcaagatgttgaacctcttcctaaactctctcctacatgcaatgaaccatttcgttggaattctataggatttagaaaactctaatcttttgaatcaaaggtccaaatagaaaaagatcatatatgatttaatttaatcctatgaaattccttcgttaatcctttgttgatttaaaagggtcccttactatttttatgtgtccaatttacttatctcaatacctttgctttgatacatatgaattactctctaatatagcaatttctaattatgtatctggacatatcgttgtccaaataaatatgattagataaattcttttacgcttccttaaaaaattatatacatatacatagctaaaatttgttatattttacaatagagggagaataatgtttgaaaagaaataattgtgaggtttttaatcaatccgtctatgtagatatgtctttacataataagctgtattttagtgatgaaataataaagaaaggactgttttataatattaaaataaataaagaattagtaaatgaaaatgtatttataatacagttctttaggtgaaagattcatcgtcatcacaattactcattctgtttcaggttgtaagactttctagtattactcacattcatatagatgttaatgaatctagacacacatatatgtctagattaattaacatatatataaatatgaacaatgctaaaaagttttataatatgaaacggaggaagtataagatatcttttcgaaatgatggtgtgcaagataggtgtggcatgtttataattgtttctagaacattattataagatactctttgacagcttgctattttataaaactaatttatgtggccagtgaggcagtgacccgaccgcaaggcaaactggtagtactcttttaatataggcgtgggtaaatatatgtcgtgacattaactaatcatgccaagcgtggcaatgctagttcaattatgctacccacatttcttgacaatctttttttttaaagaaaaatagagcacttgttggatgcttaattctaaatcatcgaaacatgatcaaataaataaacctaagtgtgatattaattattaaatgatccacggtggtcgggaaactagatatattttgaggattttagatttattacttagaagttgtttaattaaggacttgttcggcggccagttgctggaatgtactccatccgcctccataaaagtgaatttaagactggatgtgacacattacaacgactctggacagatgtatgtccagattcgtaggttggttttttataggatggagggagtagcttctaagcagcactagctgtgaaacagcgctgcaatataatcaacagccgaacacccctaattaagttaacaaaataaaatgttcgtttaattttatagtttttttccctgcatcatctcttgtttaacaagtttatatcaaaggttgtttgaaaatatgaattacattcctatataccagagatcagaactcacggtatggagacccatttctttttggtatcaatagatccgcaactgtctggacaacatacaaaatatgttaatatagtttcatttattgggttttaagatatgatcgacaggaattaatttcatgacaaaagatattatttatcttttccccatcttttgctacatactttctccttttaaatgtttaacatcttgattattagtcttattaaaaatttatctaagtattatttattgtgttgtgatttgttttctcatcatgagtactttgagcatgacttacaaatatataaaagttttaaacaaaatgaatgatcaaatatatgtcgaaaggtcaactgtgttaaacatagaaaaacggatagagcatgttcacatgatgctctctagctactactggtactggttttccagcctcaattaaatgcatgtagatgtaaccaagacaggtaggcttccaatttccctttatatgaccatatgaatgcatgttgcaggctggtttggtcgaaacaagcaacaaggccaatgcaaaattcagctttggccccattcggcttgacaacttgtaaagcccccagcctacattgtttggtactgaaagtactgaagatttggtagatgaatgcgactgggcattgtccatttgataagaattcacaaggagggggacattggatcgaccctctcgccaacaataggacatatgtgcagcttcttgatcaggccttgatgaacttgatttcgttgcagtacaactagctagtagacaacaaagggatatatatatatatatatatatatatatatatatatatatatatatatatatagccccactactgaaggccatactgacaaaatagccccactactgaataggcgtaacggtatcaggatacgaatgaagcaaccaaagataatttatacgtacaatattttttttaaatagatatattaaataattgtttgaaagctcgggttgaagaataaagcaatgaacgaaaaaaattcccaaactcaaattaaaaaaaataagttttaaatttaaatttttggtagtcattgataagctaactagcaaacaaaagacactgcagaggcttttcgtagctaacacaactgtgtgtgtgggctggctttccaagttccaacagagatgacacacctagaatatatcaactgaaatttagtggtgatcgatcgaccagtgtctattcgaattgcgatcaggtacagtcactgtacattagcaactgcacacaacgtggagcgtctatttttatgatcaacggtccagatctaagctacagtagctatgtgaatagtacctgcgctacagtgttactgctacagtaaccatgaacagtgctatgctcgatccaagccgtccgatatgtatccgacgatgaaactgctactgcttaggttgcagtcgcaactattgcgactgcacccgatccaaatcctgtctattcatggctggaatgagatgatctaactcgacaatgttcattccctttttttttttgtcacggtacagtatacgtggcatcagaaatacagagtcacgtacgtgtaataacgtatataattaatcgatcgcgtatagaagacgaaggacacgcgctggtagggatgggcaggcaatgtcgtccctcaccggccggagaagatcacaacgacgcaccgactgacggcgacgttatggccggtcggtcgcgcgacagtccatccgctatctctctttttttttttgaaaaagtacggattacccatctaagtatcgtggtcagccaaatttcccccctgaacccagaaaccagacataactcaccatgaactttcaataccggacgaattacccccctcgacccaatcaagagcggttttatcctatgtggcgtacgcgtggcaacccagtcagcattttcttttcttaaaagatgctggggcccacctgtcatatactctctcttctcttccccttctcgcgctctctctctccctctctcggcgaggacacagcgcggcggctacaggtcgtcgtcgtcgcgctggacacggaggccgcggcggcggcggtggcgtgggaagagccggcggcggcgagggacgcggaggccgcggcggtgctggacacggaggctgcgtcgacggcggcccctccatgtgccccccgcgagatggtcgtagcctgcgtccacggcggccccccgccatgtgcccgcccgcctgcacgaccacggcactggcagccacgccaccataccgtggagcgctagcaagagagaaggaagaaaacgagcagaagtagaagaaagaagaaaaggaggaaaaaaacgaaagaaccaatgagcagcagcacaagccgtcattttggtccgctacatcgacatgaccgctgtgcatgccgtccggctgccgcaccgcatgccgtcctggctgcgtctcgccgtcgctcaaccacgcctcgccgatgcacggccgtgccaagcgccatccggcggcaccaccaccgtcaagccgggggaggaaaggaacaagaaccagaaaaagaatatgaaataaaaaggggaaaagcggggaggcagtcagtgcccgtcgccgtgcgtccgcgcctagcgccacaggagcccagccgtctgccgcgtcgaccgacacaaggtcgtccgtcgccagccaccgcaccatccgccgtgcatcgccaccgccgactgcaccgacgcccgggcgcgccacgcgacgctcgccttccaccgctgcacggccgagcgacgccctttcgcactaggaccgcgcccgcgccgtcttcccgcgtcccctcacgaccacccgctgccgcttgacctgcgtcgcgtgccgctgcagtgggccgagcgccgccgcccaccacccgccccagcacgccgccgtgtgcgccgagagagaggaagtggggaaaaggggaaagtggagatgagagagtatacatgacaggtgggccctaccattaaaaaaaagaaaatgctgactggattggcacgcgtacgccacataggccaaaaccgctctggattggatcgaggggggtaattcgtctggtattgaaagcttagggtaaataatgtctgatttttaggtttagggggtaattcggccgaccgcgatagttcagggggttaattcgtactttttttttctttttttttttcccatggaacaaagatgtttgtcaatttaagtatttttttctcataggttaattggatccataccat

SEQ ID NO: 3399 - DNA, 707 bp, Oryza sativa
ggaaataaaatataacataacaatattgtgcaaaatgtgcattctagactcatccaatagtcgaactagactacagttttattgacaataagatgttatctgccatttcaatatgattttggtagacaatacagctttcagaacaactattagcttcagagaaaaactattccttctgtttctaaatatttgacaccgttgactttttagcacatgtttgaccgttcgtcttattcaaaaacttttgtgaaatatgtaaaactatatgtatacatataagtatatttaacaaggaatcaaatgatagaaaaagaattaataattacttaatttttttgaataagatgaacgatcaaacatatttaaaaaaatcaacggcgtcaaatatttagaaacggagggagtacatgttgatgtcatggaaacgaaagagagaaatgcttatatatatatatatatatatatatatatatatatatatatatatatatatatatatactccaccgttctttttgtatgatgttggttagttaaaaatatactaaccaacgtcatacatttttggttggaggcagtatttactaaccttcagttctcgcttctcatcacttgtaggtgctaggtttgagctggtaaaggcatcaattataatgtctgattaagtaaaaggaagtgaaggaacaacattttgcataaaaaagattg

SEQ ID NO: 3400 - DNA, 7105 bp, Oryza sativa
aacgacaatgataatatagtggttatgttttgtgaacccttactgtatatgatcagtatttggtagtttgtagttgtgggcagtatactgtaactgaaagcgaaatattaatgaaagttatatatttttaggaaatacagtacaaatacatacgctcacaacacgtgcacactcacttctatcaatacacatatgcatactctacttcaatgaaccctcgaaagactgggccgatatatatcctgagattacgaaggtatcatgagtacctcgttgttaacgggtgtgtcgtctatcactgaaagaataataagtttagaacttgaacttagggtgtttagatcacaattttttttttgccaaaaatgtcacatcaaatgtttggacacatgcatagggtattaaatgtggatgaaaaaaaacctattacacaatttgcatgtaaattgcgagacgaatcttttgagcctaattgcgtcatgatttaacaatgtgatgctatagtaaacatttactaatgatagattaattagatttaataaattcatctcgcagtttacaggcggaatctgtaatttattttattattaatctatatttaatatttcaaatatgtgcacgtatactttaaaacaattttggccaaataactaaacacggccctataggtggaatggttccaccgcatgtagaatctaactagttaaagattaaaattttgaaagcacggaaccgctaattaccacggcgttaagggcgctaaatggtggatctatttaattaaaatcgtttataccaaaaataaaaatgctgatcagtactggagacttgagtaaatccaaatcaaagaaccttgaccggataaggtagtaaggctcttgctggtaactgtcaccaaccaatacttaattaattgtagttgagttatcataagaaccaattaactaatgccaaccctccataaactgctcccttttgcccagaaattgtgtgtcgcacatagctttcccgatttctgttgataaagcaaaagtagagagagagagagagaggaggcttggaaaaaaaatggacatcacaaaagcaggagaagaattgcaggggaaagttcagaaatgaaaggagtgaagcaaaaggaagataaaacaaacaaaacaaaagcccagattcctctccaaacatgccatgcccatttcccctccaatctctctcatctcctctctctctctctctctcttggttctctctctctttctctctctcactagacccatctctagaaagataaaggagctatgaaagaaagctctaaaaaaaggccatgagagaccttaaagattgacctgagatttgcacaggaaatttgcaacaacaacaacacaacgagatatatcaccttgatatatatatctgttgcaattgcaagaaaaattcttttctccccttgcaattattctgtgctcatctcaatcaagctagcatgctgagtagtggaggggagttgaagagctcctccttggtgcagcagatggtgtgggttggcacgggcaacagcagcagcagcagcatcatgggcagcttgaggcagctgccttgttctgaggagcaagatgcagcttcgtcttcagcctccatgctctttctcccccagcagctgctgcttcatgcatcttctaattcatcgccatgtctgaacattcctgaggtgaatctcagcactggtcttcatcctcttgggagcttccatggcgatgtgcagcagcaggagatcatcagcggcatgccagatcagtcatggagacaactgcttctgtaattaattaccctctctccatgcatctctgaattaattctctgtggtctagtcatgaaattgtaggtgcactagctaatttgattgttaaagtaattgtaggttaattacttcaggcgaggaaagtagttaaagcagttgtctgctgcttttattccgcttttgggtgctttgctaatcagcaattaatcacatgtacatctcacacatgcatggcactaacttgacactaattgtttcttcctgcatatgtgtgtatacatgtactcctacttgccttgggaaactacaaatcataagcagtggtggattagttggagatcacgagaaatacagtgtggccacagctctcctgtccaaagggctagatgatgaggcctctatgcctcacgaggcatcagctgctgcttatgatttctatggacatggcggcggcgccggcgatgggatcctgcaggcatcgccggaggccagcagctgcaagtcgcagctgagccagatgctcctgcaggcggcggcatcctctcctaggtcatgcgtcaccaccagcggcctcggcagcagcatgatggatttctccaacaccgcggcggtggcgccggcggcggagccggagttgacgaggaaacaccatgcaggccagtcagataactcgtcggaggtgagaaaaaaaaactaatcaagactgtactgtgaaaattcattttgtaaatttgtatggaaatttcttctttctttctacattctcacagatgtgatctccttggtaattgtgcagaatgactcaattgagctttgctataatttccctcctttggtgaaaagctactacattttccatgtcccttagggaaaaaaatcactttttgtttgctgcttatgcatgtacatgtgccaaacctgatcccatgtttcaaacttttcatttgggatcttgctttcatgatgatcccttgctaaggttgtagagagatggatacactttaattgcatcatgccacacgggcaaagttatttatttttacatccataaagtcagtgtgtactgagctagctaagctatatatattttcgaccttattagctagctatatatagttgctcatcttgggacaaggatggaatggcctcatgatggttcttgcttttgcattggcttgtttaatttgttgtttctctgctgctgcagtgtaacagcacagagacaggttcagctcttaagaaggctagggttcaagcctcttcttcagcgcaatctaccctaaaggtttcttcacgcactccttttcatatctcactttatcatctttggagtatatgttcatcttgtgcctagctaaccgcattttggaatctgtctcgtatatacaatctagcctgtaaaacaaaagatgtaagggaaattaacattaacactttaagattctctggtttctgatggatttaattttgtcgtaggtcttgtgtatgtggtcacgtttacatttagaaagtgtacgtgtcctcgcagaacaaatacatcaatggaattgaagatcgtagcttgctacattgcatgcattacaatacataatttgtatctcttctataccaaacattttatttcaggtcaggaaggagaggcttggggacagaataacagctcttcaccagatagtttccccatttggcaaggtactacagcaacttaattaaccacaaatcactagttaatgtaatactacctctgtcccacaatataattatattcaaatttgtcttaaaataattgtcactgtacattactaattgttccatatcattttttattcagatttattcctattttatcctcaactaccttcccactcttacctatacatcatttaatgagaagtaccatagtctttcatcttaaaccttaatatatgctaaataaattagaattacaattattttgaaatggatgtagtagtgcactgcattatatttgtaaactgcacacaaagaggctagcctagctagcaccaaatatatctactaccagtagattttatactttgcatgtgcatgcatatattctagtacctaggtagttctagttcatgcacaacatgtcaaaaatattcttacgcatggttgtttgtacatctgaatctcttgtgcatgtataggctttgaactctggccttttcctttttgcaactgttgttaacacacacacaatgacacaaatgtactgctaacaccgtaacacgtagtacaaattaacaaatgtactactggagtagcatagtgtagtttctgcccatctcctcgcttttgagctgcatgcagcagcttctttcactttataggagtcgtgtgagtgaaagtaaagcaagtctctgacatgtatacgtgttccttcttttgcagactgacactgcatccgtactgcaagagaccattggttacattagattcctcctgggtcaaattgaggtccaaccccttctctcaccctggctaatcaattagccactccatttctatcatttccatccatatatatacatagagagagttctaattaacttcagagtgcatgtgtgtgtctgtctctgatctataaagctatatatgcatatgttaataatttctgataattgattatatcaagtatgaatgattatatatcgcagtaccaagctatccactaattaatgcatatgcatgttttctgtcttgataaaaaaggaaagctcaaaactttctgtttcagttttgatttgtctctttgaatcattcgtttgtgcaattaattaacttctgaagcaatgcaagcatatttggatatatatatatatatatatatatataattaccaaatgtgaggttagcagcaggatgtggggcttacacgtatacatgtgacagaaattattatgtaaataggtgaacccccctaaaaaagaggacttatattgaagggtactgcatgtgtggggctgggtgtaagagcacgctgttaaagctcgtttgcatatgcatggcatggctgggtcatcgtagcagctgcagcctgcgcatcaggctgaagccacagcagcaagttgcacacatgcatgtacccttcagtagtacatgcaacatgtgtgatgtcttgttctatagctagtaattcagatacatcagtaattcagtagttctaaaaaaaaatcagtaattcagtaatactgtagattccctcttgttgattgcatgcattgacatctgccctctctctctctctcttaaattaaggaggagaaacttgatgtcgaataataataataataaaagtatgattgtacgtgttaagaattgaacacaaaattgatcttggtgttggaaccaaacatccttcatcgttattatttcagtggcaaatgcatctccataatatataagcaagtacatgactagtactcgttgtctaatttgtaggctctcagctacccatacttggggcaatgctgctctgcgaaccccatgcaacagcaaactgtaagtctctctctcagtgatgcaagtataatatatatagacgcacaatacttaggtacgtgaaagtgtacttgcagttaattaagaagcttagttgggcacgtgcaactaaaggttatgtgccttagaaataagggaaaattggttccacgccaccgaaagttgtccagttttgctttgtaccactaaaagatgccagtgcactttaataccatccaaaatttgctccgttagctttcataccatttccgtgtaagtcagagtttctcccgttaagcatatctaaaatgcccttgtttctggtcaacaaggtcaagcctcaagcgcaaccaatccatacatggcgttggcctgtatgtatgtccgccgccgcgcatgatgcaaccggagcacgaagctgtgcttgcgccgaagccgctcatcgtcctggccacagcgtgcgcctgtagctacgcgcctcctgccggagtcgctggtcctccctggccgccgaagccgtgcagccgctcgtcgtgctatatttttatataaatttagcaaaacttaaaagaagtttaacttcaaaaaaaactaattaaaataacttatagagggtgtagaaactgaaaacttggcaggaaagcactagcagtggtggtgacctggtgggtgcacttaacatgtcgggaaattaaaatggaatagtgtggtctagcttatcagtccaaatctggacaaacactgacagttacttatgacggagacgatgagctaatccttccatggacagtcatcaagaaatgtctaaaaaaataaagcagtggtttatctcgaccgagcaatttttttcccacagattactagcgatcgacatgtcacgcagatgcatatcatcctcagggagaaatcggggtgggaagtgtttatcgatcgtgcagtggtggcaaagctaagatgaataggacatacatatatttggtcacgtttattttcttcaagggttctatgatcaagttcagtgtactttggcgccattggttgtcaacgtacgtgttgggggtttgcacatcagtttctgatgttgcatcaagtgaaattaacttgtcttaaaaaaagagaggtggaattaacttggatcgtgcatgcataccggctgtagagattagagagggtggcttggctgtggcctgtggactgctacggtgctaccacatgttgggaaggactggcagatgctgtaatccttctctacaaatttctctccgtcctataataaatcaatctatcatctctatctaaaatataagatttttttagattaaacatgttaattaaaaagtatgtagaattaaatatatgaatgttataatgggatgagaaatgaaggtaggtacgaaaaatgaataatgcatggttataatttattggaaagaaaatgttggtggaaaagttacttatatttttgaacaaatcctgaagaccgaaaaaattattatattttagaaagaaatgagtaatacaaaaatgtaacaaagagcttaaaatgtactcacatctcatatagaggagtgtttggattcagggtgtaaagttttggcgtgttacatcagatattatatatatggtgtcgcatggggtgttcgggcactaataaaaaaactaattacaaaatctatgagtaaaccgcgaaacaaatttattaaacctaattaatccgtcattagcaaatgattattgtagcaccacattgtcaaatcatagagcaattaggcttaaaagattcatctcgcaaattagtcacaatct

SEQ ID NO: 3401 - DNA, 1121 bp, Oryza sativa
tttggccacctttccggccagagccaactcggcctgctgtttgttgccccagaggaggacaacatggagacgatcgtcgtgcaggatgcgcttgtaatcacgtggaactcgtcgccagacaccgcagatcttgcccgtggcattctgatagacactgagagtgcccgccaaggtggtctccagttgatgctcctccaggattacacccgcatcatcaacgaattgaatggcacgcggacgaccgattcgcgatgaggtgtagaaggagtagtatagattcttcttgtggaacaggaaacgggcggtggccaccacattctgcggattgtaggtggtgtacatggacttcatttcctcacccttgaggaaataggaggtgcggcccgttagcaacgcagcgtaatctataaatagggatcaaatgaaaggtggagataatccaggtgttagataaatacaatagttctcttgttaattaaatgtagaagctggtgaatgggattacaatttcccgcaggatttggcggattctattgggatctgggtgggtgtccggtacttttgtacttacgtttcatgttgcgctcttcctcttcattgggcacgggcacatccaaggctacatccgtatctgaaagatggagggaatacaaatagagaataagatgatgctgggcgataaggtacgaccttaaatggaatttagatagcaacaaatgcttcaaagcaaccgaaccgccgccagccattcaccatccatccagccagccatccagccagccatccagccagccaaccaactatccatccacaatttgtggacacaattccggcattcaaccaaaattccagttgaatgggtgaatggtgaatggctgaatggacgaatgccaggggatcatcatgaatggcaatgcaactatcaggtagagatcccacctccgaactaagaccttccatttccacctctcgcttccacccaggtggcattcattaatcgtgcataaattgagggcaggtagaaggtagagtttctcgaacgggaagtctaacctacatctaactagggaagtgctttgtatttgaggatgtgcggactctggggttctgaattcatgggt

SEQ ID NO: 3402 - DNA, 7118 bp, Oryza sativa
  unsure (1)..(7118): unsure at all n locations
gcaacattgtcgccgttatccatgtatgccggcaaggacgtcttttggcggtgaacatcgtgatctggcagatttgagcaagcaaagccattcgatctgtataaattgcaggggaatcgatcaggttgcgtgtcgctgatagagttggttacaccctctcctctactagtagtagaactgaatttcttgtgaatatgcaactctggagccaatcttcaggacagaatgcagaggtgactacatgacatatgacaccttagtggacctcactgtgatttgtctccgagcaaataaactgattacgatgaccaggtaaacttgccatctgtcgaaccaggattgctcaaatcgattgatcttttcctttccttctactgatccaaggccaggagagcagacagacagatgcaaataatctcaattttctctccaaagattgaaaggaagaaaagggaatacgaaaatgaaaatgaaaatggaaagggacaagaaatattctgacgttttgcttccactctgttgagttctctgaatctgaatccagtgagtcgcgctcctcgtactcaagcttgctcgcacgtctctgcttccactcagttgaattctttcgatctcgacgtcggtctagtgacgttctcgatcgtaatctcgttgtcaggcactaattaacctgttccaacttgtcggaagctgatatacagtaacatagtagtactatagactacagtgtatcttgttgagatatcagtctttgattgtttcggagctcggcgagatcgaccaatcgatgcaagatggagtagtagtaatagctgcacgaatgaataagcttcaatgttcaaaaaaaaaaaaagaatatgcttcgagtactggtgatcgtcgtgtcactctccactggagctagattactgctgacagcaaccggataggccaatttggctgcatgggcttcatgtcttgtccttctgctgttaagtgcctggatttttcacattttggttcttctgaaaaacttattttataaatggacccttaaaaaaacttatcctagaagtggtcctttttgaggccgctgcatgtgcttcatgtcctgtccttctgctgttaagtgcctggatttttcacattttggtccttttaaaaaacttatttcgcaaatagacccctgaaaaaacttatcccagaagtggtcctttttgaggcgccagagtggctggcgccgtcattcaacgggacggcgcccgttctcctgccaccgtggcacacgcgaaccgacgtggcaggacgagggcgccagcatggctggcgccccccacccctcgccttcattcctgtttctctgtatggagttgcaacagtatcatttttgttttattttttcggatgttttctcacacttaggatcacgatacaaccaaccacaaaaaaaatttaaactcgaactaccacttagctaagtctgaaaatagctagcataccacttagtctactttgcacattcactaaaattagaccataactcctttagtaaaaccctttgatcaacatgttacacataattcactctatcactatatgaaattacttaatttaattcaaaatataaccacatgaaatgatagccataagttaaacaatatacagagatgcaattttttttatttttatttcatttttttgatatttttttcacacttaggataacatagaaaccaaccatataaaaaataaactcaaacggacaaaatatgtgacttgtagaatttttcaaaactctaccgaaatggacaaaatatgtcattcattaaaatatgcgtaactttctcatacggactcggaatcaggaaaataatatatccactgacatacatatccgggttcgacgatattaaaacctccgaattccgcttgcaagattgtgttttcgaggagagaagtttttcggtagagctttggaaaattccacaggccacatatttcgtccgtttgagtttattttttatatggttggttcttgtgagttcgtaagtgtgaaaaaaatatcaaaaaaaaaataaaataaaaataaaaaagttgcacatctctctcctttgcactagttcggagagaggagaggagaggaaaaattctacaggtcacatattgcgtccatttgagttcattttttctatggttggttcttatgtgtccctaagagtgaaaaaatataaaaaaaataaaagaaaaataaaaaatatcgggggaggggggaggggcgccagccactctggcgcgctccccctagccacctcagcatcgccccgccacgtcggcagggagacggcgccagagaagctgacgccgtccagttggacgacggcgccagccactctggcgccccaaaaaggaccatttctaggataactttttccaggggtctatttgcgaaataagttttttaaaaggaccaaaatatgaaaaatccaggttaagtgcagtagcaatgtttcgttcttatctaattaagatgtacccctctgtcaaaaaaacctaatcctaacaacgagtctggatacatgcgtgttcagattgattgctaagattagttttttttggacggagtagtatattttggtttccgttagaatttttttaaaccgctaaacgattcattttcttcgaaattttttatagaagttgctttaaatcagcatataatttctttttaaaaataatataacaactaaaaatcaattaatcatgtattaacgttttgttttccatgttttaactttatctccagtataaacgaatgctatctacgaaaatcgagtggtggaccgtctccgtttagctcagctgttggatcagcccgtgcgtcggtgcgtgcggacaaatcgatatgaggaattctcctttttcactgacacggtgtcacggtgacacctctatagctcgtcaatgttcttcagggactatcaagaccgattccgattgctcaactatatatacggccttcattaaatgtttccaccgttttacgcgaaatgaaattatagtattgaagaaatagcatataggcttatagctgcagttctttctttttaaaaaatggcatctttttgaaaaaaaaaatcaaatggcacaacattggttcatactagtagtacaggaaactcaaatagagagtgataaagacggcccaatttcacagtccaagccggacctgcccttttaagcattcttagcccaaccaatggaaggcttgacccagaaccaaatctagcccaaatgctaattatttaacctaaaattcttattcaataatccaaacgagtagaaattacatgcacctaaaaaccaatcacttctcatacattcattatttttactagctcgagatcaaagttattattaaggcctaattaacttagaagtcgccgtcattcctaggaagcggctcatggccgggcgggcccatgaagaggccctcataaaccagcccagccaaaggcccacctataagaggcccaacccaatagatccagtggtcggcccattcgccggcggcgagggccgggccgaaggagcgggccgggttcatggaggcgccggagtagggcccgccggcgaggatgttggcgccgacgacgaggccgacgaggagcgggccgagcgcgccgacggcgcggcgccggtcgacgacggtggcgtagacggcgaagaggagggagaaggtgagcacggcctccatggccacggcgcgcgccgcgccgacgccgggcgccggcgcgtgcaccgggacggcctcctcgccgccggtgagggcggcgaggaggaggcaggcgagggaggagccgagcagctgggcggcggcgtagagcgcggagcggaagagggtgatgtggccgccggcggcgaggccgagcgtgacggccgggttgatgtggccgccggagacgtgcagccccgcggagaccatgacggcgaccaccagcgcgtgcgccgccgccaccgccgtcagccccattatcgtgtcgccgccgccgcccagcttggctgcaccgacgcaaggacgacaatgtcgatcttgattgagatgagaagaaaaactaggagaagaaatgaagtaggcaggttaccggcggccatggcggagccgacgccggagaagacgaagaggaaggtgaggaggagctcggcgacgacggcgcggaggcagccggggtcggtggcctcgcggtggtggccgagcgcgagcttcgccatgtccgcgccgtacgtgcgtgcgtgcgtgtgggtgacgtgtcactcgcaagctagctaggtgaggtgattcccgcgagggaggacaggaggagatggtgagttggatgctggagtgtatcaattgacgcctagatatatagtgctagcaaggttggtgactagagaaactaaacatggtgaggcgatgagaaaaatagaacgtgcttttcgtcgatcggtagccaaacgttagattcaaaacatattatcttagggacgttttaatcccacgaatgaaaaaaaacgaaggaataaagaattctgatagaaatacaaatgttaaacagaggattgcaaaacgcatgaaatacatatgaatgttcgtttgattagactgtatgaaaagattgacgctcaatgaaaatttttcgagattgacgctcttaataagttttctctaaaatctctacagaattatctattccatattaattttaaaggataaggcacgattcaatcctctgtatcaaagacgttcatagaaaattttttcataggattaaagtcctccataatgttattcctacaaattaaagaagcccttaaattgaaacacacaagtagtttatctgtgctaacactacggtaacatttgataatacaactcaaacaagcaatggtatatgttttagcgagcatagaatgaggtgatggaataaattgatacataaaattattatattcagtaagcctagctaatatttatcaacctacagcttacatacagatttgtgtccaggttacaacgaacatattttatagcatcctcgagttgtccagccaaatgccaagagaaactggaattattgcaataagaaataatatgtaatacaataatcagacagcatgtcctatggatatcacaggcgtgcttgcaaactaaagaccgtagtgggcaccatcaaacagaacaccatgcgcactgtgttcacatgtaaagaggaaaaaacggaattttcgtatgcgatggtgtcacccgcatgaaaaaatcgttatttccatgcaagacagttgcatgaaaaaaaatagtttttaccgtacgtaaanatgctttttaatagtgcgacggggcaattaatttacaggaccgatcgggctagcactagcagatcgacgtcgtccaagaaccatgcgtcactccgctcaatctcggcgatctctacccgcagttcgtgcgaaccatgtattatccgattgggtttcatcgttcacgaacggattgctcgatatattgtgtggtgagatcgaaagaacaccggagaaaacaccaatgtctccggtcattttcgaggcagaaaacgagagaccacactgacagcagcatgcatatatattgtggatttgtggtggcatacaaagacggagaaggcatttgctgtgtacgtgcgcgcactagcagctctgcgtgaggagataagttttcaatggatcaggagtaagtaggtggtatgtgatatttttattatttaaacccttttgttttaatattttttttaaaaaaaaggtccccctcaaactttattttaaaatctgaatctttttgttggcgtggccaattaaccatgttatacaacaacaacatgcaccggcgttacagaagacatgtagccacgtcagcatgctaccacgccacttatattggagtaactatacttctaaaagtgcaagaggtgtttgtgtgattaaatgtttaaaatgcctctcatctccacaacccttcacctggcatgcttcctatcgaccggaacaattaataaagaacaatatatttagttaacccctctccttaatatttatgaaagctactaaaaactcaagaaatagctatattttggtacatagctcagcctcccaagttgtcaaagctactcttcctgaaactacaatacaactacacataataatcgtatggctaggcagtctctctcaagtcagagaccatattggcaacaaatggatcagaccctgtttagatgagactagaacttttaagtccctatcacatcggatgtttggatactaattataaatattaaaaatagattattaataaaacccatccataatcttggactaattcacgagacgaatctattgagcctaattaatccatgattagcctatgtgatgttacagtaaacattctctaattatactcctagattaattaggcttaaaaaatttgtctcgtaaattagctttcatttttgtaattagttttgtaagtagtctatatttaatactctaaattagtatctaaatacatagactaaagttaagtccctgaatccaaacaccacctgtcaattaactatcacgaagctgccattatattgcgccatggtcagtgaggctgacattgaccggacatgcaccgcaggagggtgaagctgcgatggatggcgtcgtccatccaaatcctcaccgttgtgtggcgcacacactctccgtttcgccccgtctacttagggcagccacaatgtgaacataagagtagaccttaagcctctaaagtgaccttatatattgtgagagtagttcttataggtggcatttgcttgagctagccatatgtataaaaaccacccacaaggaataaaaaattatattactccttcctctctcatggcagtgttactttctctccctctctcaatggctaatcttgggtttgtagggtccaccttaatatccactcttgacatatacattgtggacatgataacatgttttagtggatcccaccataatactaaggtagtctatattcattaagtatgctcttagtgaaatagttctcgtctacgattcgtgaaatgaatctcgtctgt

SEQ ID NO: 3403 - DNA, 552 bp, Oryza sativa
accgttaagttggggccatggtacagtacactgtacactgatcagaacactatgtatacatgtcttcagtaagaccctgtttagatgagactaaaacttttaagttcctatcacatcggatgtttggacactaattataaatattaaacgtagactattaataaaacatatccataatcttggactaattcgcgagacgaatctattgagcctaattaatctatgattagcctatgtgatactacagtaaacattctctaattatggattaattaggcttaaaaattgtctcacaaattagcttttatttatgtaattattttttaagtagtctatatttaatactctaaattagtgtctaaatatagagactaaagtaaagtccccggatccaaacaccacctaagcgagtcttaataggaagaagaagaagaaaggaagtaacagattaaacatgcgcactgtgcaggtagccgacacaattatattatgcattggcgtcatggcggagcagagaagcaaccctaaagttttggattatgtcctcgttcc

SEQ ID NO: 3404 - DNA, 7758 bp, Oryza sativa
taagggtcagtttggattaagggatttggatccggatatatttacaaaatccaaaactagaccatttatttgagaacaaatgtccatttaaggtggatatattattcacaattgcgtactccctcagtccaaaaaaaaaagacaccctggtttccgtgtccaacgtttgaccgtccgtcttatttgaaaaaattatgaaaaaattaaaaagataagtcacgcataaagtattaatcatgttttatcatctaacaacaatgaaaatactaattataaaaaaatttcatataagacggacagtcaaacgttggcacgggagcccacggtttgcctttttttgggacggagagagtatgttttatagagtcatcctaaccatgttcacgccctattgcacaagcccattgggtaaaagaaatcatttggtgggggcaaagtcctgaaagtgcaaagtgtgcaactctaaccaccattgtacatctttgtattaatgtatttgcaaagccctaacaacattactacaataatgaagaacatatataaacattcaacaaaattgataatctcattctgactccttcctctctttttttcccaactgaatggataattagttatcttctcttgcaaagattgcaagagtctttacaggaattaatcaactgctataaaataacaaaatgcttgttttcaaggagcatttgcaatagaagaacgtccacaataggttcaatccgcatctcttcttttcttttttctatcattaaagaagatccacagtaggttctcttcattcgatgagcaaaatgcttcgtgtgatcgagctgcggaaaacccggattgcaagtgaataatttttgccttacaaattggaataaatttctctgattaagaagacagataagaaaaagaagacctgaatcattatctttctttttgaactaaggaatcattatctttccgtaagcataccaatcatgaaccatctttgtatcacaactcctggggttgaagcagacaagaccgtgtgatctgattaaacgcgaaattatctctagtttataagctagttggagaatcatcataaggctggctaattaaactgtaatgcgcttattgcatgtcttggggcttgtccatttctcttttctttctttctgatgttctagatgatattggctcatatcatgggcactgcactttattctagtatcttgttgctaccaatgattcagattatgcttgcgcacgtaagagcatcatcacccaattatatacagtagccgtatatacttagtatctgtaattaaagtattacaccatgcatttgatcctgagtgaaaaaggcccagtatatggaatgctttctttcatttattctgttttctcatcaagaatgatcattcagtaacttgggttcagtctttcagaattcaaagaatattttaactgaattctgtgaattctgtgaattctgaaagagttctaactgaaatcttgaagacagacagaaatccacgttggacttgctatgctaattgagttgctaaccaaaatggtcacaactacatgtcttgctcagctattcctgtgataattataataaaacaagaccgcatttctcaaaccaaaaggcacaagacaccaaggtctccacagaagagcacactagaaacagtccgttcttccaaaggcaaactttgagctcttttgtagagatgccatggaaatgcaaaaaaaaaaaaaaagtgacacttgattagaacccactaactattgcatgatcccataagcacaattaatagcactgcctaccccctcttgtctttctcctagctcccataaattggacaacctgacagtgtcctccccctgtacttgtctgaacttttgatttgagttacttctgaaagtgagcttataatttgatgctaatctccatcctacattcctacctccaaactcagtcctaatcctatcaaatctactcatctaccatcaatttctaagtgtgtgtaagtttgctaaaatctatattctgattctcctccttaatttgttcttgatatgatacacttttagctgcagttcattctgcataaaggctactaattaacttgttgacatgtagatttaagctataatcaccaaacacaatcaaatggttcttgctaatttcctcttcactcttcaggcaatggagcaatgccatcatcatcagcagcagagcaatggccagcagctgcagaggctggagggcattgaggaagaaggcggcgccgccgagaagtggccgccgccgacgactgtccggccgccggagacgccgacggagacgatggagttcttggcgaggtcgtggagcctgtcggccgccgagatctccaaggccctcagggtcctcagcggcaagggcgtctccgacgacgtccacgacgccgccgccgccgtcgccggcgacaggaaggagcggaggtcaccggtgaccatggacggccgccgccatgaacaggcaagcgaggagaacgaggcagcatctatggtgaaagaattatgaatcatcaggtgacgtgacgtgctgtgtggtgcatggcatgcagagagcggacgcgtcgtcaatggcggcggcggcgcagggcggcgcgatgagcccgcccatctctccccgtgccaacctggacgtgaagcttctccgggcgacggctacggcggcggcggcggcgggagggagaggcgggggcggcaagacgacgatgggcacgtggatcaaggagcagaaggagcggaagcgcgccgaggcgaggtcgcgcaacgcgcaggcctacgcggcgacgtccgtggccggcgtcgccgccgcggtggccgcgctggtcgccggcgcggtgttctcccctcctccggaccaccccaagaacggcggcgccgccgcaccagcaccggcacccgcacacgccgccggagcggcaggcgcgaagacggcggcggccatcgcgtccgccgccgcgctggtggcgtcgcactgcgtggagatggcgcaggcgatcggcgccagccacgaccagatcctcggcgccatccagtccgccgtgaacgcgcagaccagcggcgacatcatggcgctcaccgccggcgccgccacggccctgcgcggggcggcgatgctgcgggcgaggctccacaaggagatccaggccgccgccctccccggcggcggcgccggcgccggcgacatcagcggcagggagcccgagagggacacgtcgccattcgccttcgtctccagaggcggcgagcttctcaagcgcacaagacaaggcacgataacagtacaaattctcccaaaaaagagcttaaactttcagagatttttcaccaaaatccaatccaaataacactcccatacgcgtcaaattgcaggcatactacactggaaattggtcaccgtctacatgaactccaacctgcaggtgatcatcaagatgaggagcgcgcatatggccggcaccttcatcaagaccaagaaatgtaagatcaaactaaacaccatgatcggaaatggattttaatcaatcgaggaaatatttattcctccatgttgcatgttatccaaatatatcataaaaaatttaaaaaattgataagatatattaatatgtaataatatataatataactttacaaacatgctttaaaaaataacaaatttaacagtaatttatatacatgtgcacatagtcatatttgttttgttttttaaaatttaaactcaaatgtttgttgagtgatatatcacatactaatttatctgttattttttttacttatttgaataacatgtaaataaacgatgggatctttcttcgagagattagaagtgtttgcgatcatatcctcatttgctctcaccaagattgatacgatgattcatgtgtgtttgcaaattatttgcagttgttgtgcttgacatctgctcggagatcccggcgtgggcggggagggaggtggaggaggggagccacaggaggggatacttcgggatcaagacggtggagaggatgatcgagttcgagtgcaggagcaaatacgagcagcacaagtgggttcaagggatcaccgagatgctcaaccgccgtcacaccatgaaaaattagttaaaatgtttccaatgtaaatgtcaaaggaaacaatcggtagtagtaacattttgtgtggtttgtgtgaggattgggagtgaagatttccatgttctctgttataactgacattgttgttattactgcaaatccatcatcaagaaaaaaaaatgttcccaggatcttcgataagcataagaattctttccctaagatcaaaccagacgagtaggggggattccatctcaatcaagcgatcaaacagcaaatcactgaactggtactccaccggaatcatgaagtaaagaactaccgtgatctctcatggctctgaaagatcatcagtgcacggtcgatggagaagttatcagagtgatgtacagcagtattatcagcgcaagttacctcgtgttaatggccacataatttttcaattttcatcaacttcgtgtctttatcagcggcgtagttgcatgttaatagaggacgcattgcatgtacaacacccattaacattacttgattacgtcaagtcatcaagtctctaatttagcatcctacctcagtatgcacatcaccgctaaaactccctcatcatatcagcttacaaagaacaccgtttttcagaccaatcactgcttgaatatctagaagttggtactccatttttttttaaaaaaaaaaggattttccatgttctgattttcgcatcacttccgacatctgcagttgttgctaaatataaatcaaacaaaaaaaaaggagttttcatgttctgattcttgtgtttgactctgattacttacgttgatgctaaatgtcacatataaccaaaatctcaacataaactgcaagtcacacagatatagccaacattcatgaccacaaattatcttatcatacttagcaggttcacaaggccttctggttcatgagcatcaaacaccaaaactactgcaagagcatgagcatcaaacaccaaaactactgcaagagcatgagcatcaaacaccaaaactactgcaagaggaccatgacaaatttgctggatatatgaaagcaaaatctaatcaaagagggagaatccaaggtcgtcttcactttcttccttctcctcttccttcttctcctcggctttgggggcctcggcggcagctccaccagcagcggcaccgccagcagcagcacctccaatggcagcaccaccaccaacagcaccgatgatcacctgcgaaaagtcgaggtcagcactacataaaaatcggttacatataaatggtatgaccatatgttgagtgtcaatgcactccacaaaacaaaggcacacaaacctaccaatggctacttcgcatatttatagattacttcctggcataaattgtcaactaacagcaagagaattgacaatcgtaaaaatataagatcacagagccacaggctgtaatgctaagaaacacaataaatatctgtagataccaatttctatgtcatagctagtagttaggccagatagataattggcacaaccaatgccaacaacccgtttatctatttcaaatgtgaactagcagtaatctggaaacgagcacgatgtctatagatgaaatttgggctagcaggcaataccccaaaatatttcttttgcacacacgaattgaaaaactagaaacattgttatctgctaaattccagttgcaatgagatgtgcacttgacgcctaactatcgaggccacaacagcaccaaacatcaatcaaacatggtacaacaaattacccatcaacaccacatatctgacactaaagcagcttaattattgcctatttagatctaaacagaacaatataaacagtcaacacacatggattacaatagatggatttatacagaatatcgagaactaaagtaatcaacgcatctgacgaaatagcgccgtggcgacgtagatcagcaggacaatggcgaatcgaacagcagcagcagcagcagcgatggggatgtggtgggggggggaagcagacctggaagacggcggagctgggggagaccatggcgaaggaggactggaccccggcggccgagtcggcggcggacgcggcggcgacgaggcggcgctgcagctcgtagggggtggcggcggaggcctcgagctcgcccttgagctgcttggccgtccactcctcgccggagctccggcacacgaaggtgtagacgcccatgacgcggcggcggcggcggcggcggcggcggagatggaggaggcttcgggaaggcttgcgaggcgagtggagatcgaagccctaatcgcggggtctcccgaggttatgtagtcttctgctgctgggcctacttgggccggcctaggaaaagcccatgatgagaaaccgttacaactcggcccggcccatataactatgggccataattttcctttttttttctttggatttgtcatctggatgatcagcttctctcccaggattattagtgacgccgtgcttagttctaaagtttttccttaaacttttaactttttcatcacatcaaaactttcctatatacacaaacttttaacttttctgtcacatcataccaattttaaccaaacttccaatttcggtgggtcctaaacacagcctgaacactgatggtttgaggacgaaccaaaaaaaattgcatctgttgggattactaaacactgttgtgctaccaaaatgtgaactagaaatgctatgcctcgtgaacccaaaatcatcgaacaagccctgaaaatacataaaccttatcgttcacttcgtttatgggcatgtttggtacagctccaactcctaaatttagcttcagaagttaggtctggaggagagttgtggagctgcctaaacccagctccgcaactctagttcattttgtgagagagctccacccagctccactctcagttttggtaaagctgaacctcctgtatgactgaactccagctcagaaggggtggagctagagctgtgccaaatatgccctatgtatttcttttagttaagatatacattatcctgttctttaattaaggtttttatcttggcattgaaagtgcaagcaagcagatatatttttctacagaagacctcaacaacttcatgcaataatcatgaaaaaggaaatatattaagggcctgttggtaaatacacaataaatcctgctaaaattttgataatattaccatcctactaagatttattttgactataatctaaacaggccctaatatcacaaaacatttagacgatcagtcaccatcccaaacaagaggtgcttagaaagagagaaaaacaagatctgtccacgtgattaagcatccgtgtttctccgatgcatgagaactcttgagaaagttttaccatgactgacaagagcttcagttctacgatcgatttcctaatcaaggctgtatttagtttgtgtgccaaaattttttaagtatataaacacacatttaaagtattaaatatagactaataacataacaaattacagatttcgcctgtaaactgtgagacaaatttattaaatctaattaatccgtcattagtaaatgtttatggtagtacaacattgtcaaatcatgacg

SEQ ID NO: 3405 - DNA, 4810 bp, Oryza sativa
  unsure (1)..(4810): unsure at all n locations
atatatatatatatatatatatatatactccctccgtcatataagggatttcgacattttgcttgcactatttgaccattcgttttattaaaaaaatatgtataattatttattttatttgacttactttattatctaaagtattttaagcataacttttcgctttttatatttgcacaaattttttgaataagacgagtaatcaaacgtgacgagaaaatagtgaatatctcttatgttaggggacggaggtagtatattaattggacataatgatatgagtccatatgtgactgtaataatgacagcattaaaagtctaattgcttgacgtacggttgataagtcgtaagaaaaaaaacgaatcaatacaaaataatttataggtacattttttatatctatattatatattatttatgatttaaaagtcagtgttgaaaatagactaagataaaaaaattcttagaattaagttttaaaatttaaattttagttgtagctgataagctaataagtaaaggatgagctgtgcacccagtgttgatatacactcatcctttcctaaatactgggtaccagacattattcatatgcaatttttttgtcactcttattttagcaacaaatttacaaatatttgaaatataacatattgtcaaatgatatcatgtgttaaatatataaccatataatttctcgcttagaaaacagggatataatccagaaatactgatgatcatagttgaaacaaagttggcgagcgacagatatcacgagaagaaccgcataaattgaagaggagtttctttgagagattgcgaagaaaattattgggacaattgcatccatgcccccagttttaaacccaattactgttttacccccactttttagggtttgtagttttaccctcaccttttgaatctgaatcatccgtctatcctcacttgtaacggccgtttggtgggtcccatgttttgtgttaaagaaatacaaaaggaaataaaaaaaggttttagaaaatatgaatttacctttatgcccctgagggaatggataaggtcctcccaccccgtgcatgaatcgaaatcgaaaggggacgcggcgagggcgggggtcggcgagggcgcccggcggcggcgtacgcggcgagggcgtgcgcgctatggcggcagccgcagcgagggtgtgcgcccggcggcggccgccgcggcgagggcgggccggcggtagctaggcgccgcggccagtgggtagccagccggcgagccattcacgtgatgcctttcccaggcttccacgcggtggcggccactcccaggtgcggcaggcgacgaggcaggcgacggccacaggatgcgacgaggtaggtggtggctggatgcgaactagtaactaccatttccttcctaactcctccaattaactatattagcatcacttgaatggagtacatagacccaacaatatgtatttgataattgacgtttattgagaaagtagctaatgtactatatttgtatggggacactttgtaatgcttgctgttctgttaatcacacaagctaaaatcatacaatgggggcaaaatcacaccagctgaaaaaaataggagcaaaaattacaataaccaccaaggatataaatgtccttttgctctacaactaacaccgtcaaaccgactgatacaagtaggggcataaggctggttcggatttaaaaagtgggggggtaaaactgcaaaccctaaaaagtaagggtaaacaattaattgtgtttgaaagtggggtaatgaatgtaattgtccaaaaattattagtgtagccactagtgggcttcgagttcgatcgacaggatttgctgcaattcatgccagcttccactttggcactttgagaatggaaatactccctcgtctctaaatattagacgccattaactttttccttatttaaaaaataagtaatcattatatcttttcctataatttgattgattgttaaatatacttttatgtatatacatagtttcacatatttcacaaaagtttttgtataagatgaccggtcaaacatttttaaaaaaagtcaacggcgtcaatttattttataactttcctcaaaaaataactctctcgctgaaaacaacttgtccagaaaaagaccaagtggtgtcatagcctgtccagaaaacgaccaactggtgtaaaagctcaactgtccctacactgactcacttatctgggttcgatcctcactacagtcccttatttcgaaacgaggatagggctctcgcggaacgaggtgtagattaagaagaaaaatgagcggactgaaacatgccactaaaagactccatgagacaaaaagatgggctgtcaaagaggtaaagaaggtaggattttccattttcatttctatcgtccgtgcaaggtactaaaataagaaggggatcacttcactcgctagcaagcaaatgtgttaactcatgagacaaggccaacgatatatatgtctatagcgaggtttgagtacctaatcacaaggatcctccagaatcttttcgagtgcttgttcgagaactaccttcccttcccctggtcagagtgttgaatcaatggctcttgcaacggctgtcttctttcttttccactttgaacgtatccctacatactgtcgtgctaaggtaatcgggatctcagatcatactcaatgaggggtggctagtatcccccttcaggggtatcatcccagtaagctcgtgtctttcataggaagggagctgactcccgctcccttccgtccatcagagacttcttcaagttttacaggaaaaataaccgctccgttctgtgggcttctttcgctgctctctaggatttaaccaaagcgacataattgaaagctctcgtctcagtcgctcgcctaagaaaaggtaccaggttactccgtgatgacgaataagcagcccagaaatgaggggaggcccgaggtagagcactcaatgggctagggtggcccccatttcgctttaccaaccccaggggaaactcaaaatacaggctatcatccttagtacagacagactgattannnnnnnnnnnnnnnnnnnnnnnnnnnnnnnnnnnnnnnnnnnnnnnnnnnnnnnnnnnnnnnnnnnnnnnnnnnnnnnnnnnnnnnnnnnnnnnnnnnnnnnnnnnnnnnnnnnnnnnnnnnnnnnnnnnnnnnnnnnnnnnnnnnnnnnnnnnnntagctccatggcaccgaaaatgtctcagggctcaagtgattcaccgaagcgcagtcaaatgtttaggacagagggggtatatatgtgcagcgtgttccagagtactgcagaaacgaaatcactactacgacagaagatgaatgaatgattgctgtaatcgctcaagattcatcgatggatcagaagagtagtgtttcgctcgaccatcaccggcagcacactaaatatacacaaattaagttagcatgggctcgttatagatgtgctggttcacaaatgggctcaaccatggtccatttagaaggcccagtcttcacgtgaactggactgtaattccgaaagaattgggccgccgaatcatgcgccgacgtgggtctcccgtaaacatgggccgaaaaagcacaggtgctctctcctgcttcgtctacctatgctatgaaccttctccgagaattgatctgacctatacaaactacaaaagtcctaaaaatgaaagaagtaaagggataaacactcacttgcaacaagtagtgcttatcagttaagccaaacgatcattaatttggtcaaattaatcaagattagctcccacctgatcaatcgatgtgtccggccggcccgtacataattaacaaaagtataatgccaactacgagagtagctagccatgcatgttttttttaagggtatttttttacccggcttttatatccaatcgcatatatgcaacatttgtttttttttaaaaaaaaaggaatttagcctatggaatatgcaaccactaggttagccatgcatgtaggagtatgcatcatctacaggggattagtaggttgcttcttcttttgggcaattagctagccaattatgcatccatgctccatgtacacgcgaccgcccgatgcatgggccaccacacaaaatacatagattcgattcgattcgatcgatcgagagaattactaatgtcgttctccaagagtccgaagacgtacgcagggagcaatcaagcaactaacagaggaatctcacccgtacaaatcattcctggtttgaccatcgtttgctcgagatcagcttatagctgtagctaaacgtgagattaaaattttaatcatatagttgattttgattttttatcgtaattttatttgtcagctttcgacttttaaagaactaaaatatacgagtatttacagaaattttatctacaattttgttttgttttgttcgcaatcaatccatcaatcacgcatgcacatacatatgcttctcgaggcagcaagatcgccacgtgtgcgtgtgtccatccatcgacggccacgatcgatagcgatatactcctatatcgatattgatcaatcgatcgagatcgatcactgcagcctgagtgtgtctcagtgctgaattgtcggtagatgtagctaattaagctaagctagcgtctacctcaagtaaatctatcacacattgcatggatggaataattgatccaaagggccggggtacgtcgtcgtcggtaagtgtgtaattaacgcaagctaaattagctataatat

SEQ ID NO: 3406 - DNA, 4391 bp, Oryza sativa
ttttgtggagcaacgtcttttaagaagaaaatgttgctgcagagacatcaccgtcgagtcgaaacgatgaaggctagattcggggaaatatactactaccttcgttttataatatataagttgatttgacttttttctaataaaaaatttctaagattcacctaatatgtaaaaaattttagcaacgtctataacaacaacttagttttattaaaaccaatgtttactatattttgacaatatatatttgatttgtgttaaaaatattgctatactcttttttttacaaatttagacaaacttaaaaatgtctgattaggaaaaaagtcaaaacaaccggactgacgtacactactacacaaataattttctaatacaagcacctcaataggttgcatacggatcacatgtgaccgcgtctgcaaaaatcgaactctattttcgcatatgacttcttaagagactcgcacaagaaaatctattttcgcagtcggccctcttaagaagtcgtatgcaaaaatagggctatttttccagacgggcctcttaagtggctggagggaaaaatatttttttcacatacgggtatcttaaaggtctacccaaaagtctgagttacctcctctttccctccttaacacttcaagatttttcaactcacagcatctctccttacctcatctttatctcctctcctctcctcatactcccccctctctctcaaactctctcccggtcgaccgagtggcggcggccggcgggcgtggggcgaaggtggctaggggcgatggcggcagcggcggccctcccccgcccaaatctgcgcggattcggtggcggtggcgagcgggcgggcgggtggcagtggatccagcgtggcgcggcaggagtcaaaagcggcggggctggggtgcgcggtggtgggcgagtggcgcgatggccgtcccctgcgcagatccgacggtggcggccgtcctccacccagaggccggtggcggtaggagcatagcggaggtggtggcgagaggagtttggcgatggcgggaggaggcggcggcggcagccatcccccgcgtggatctggcggccgatgggtgtgatttttactctctttttttcagatttttttcgcgtgcggacgacataagcacccgcacgcggaaaaccgatttttccgtgcgggtgcgccacccgcatagaaaaattgggattttcacagatccttccaggcagatgggctgaaggtccgaacgcgaaaaccacttttgatccgtctaaaaagaattttttcttactaaaatatacttattttaggacggaaagagtaaagactttacaatataatcaaaccttaccgtttgatccaacaaattaagaccaaatcaccatacaatccatcatatgtaaacttgacactaatttgtgacaagtcaaacttgacgacatgtttatggggcatgtagttttcattatctaaaaaacatatatatatgggccatttgagttctttgccatttgtaaccttgtctcagctctcttcttcttcttttttcttcttgtttttttacaatggctaaaattggaattattttctttttggtacaaaaatttggctagactttttttcttttggtttgctatcaatgttatattttaggtagtagaactaagccaaataattttacaatgcctttttttgctacaactagatagatagatggctacatttttagcgtgccaattttttttagtttggttgagtttggccacaaaccaaaaagaaacccttaatcagctctctgaacattccccaactgcatgccaggatcaacgcacgaggcggtattaacgatcaaattatgcctagttttttttccttttttttgagtggaaagtcatgcctagttggttcacttgattgtggttaaatttcaaccgattgcaagttggaattagcggcggcagcagccggagaatcagggtagtggtagcgagagacttggaagtcaacgaaaagaaatttagcacttcacgagagtatatatatgaggggaaatccttatctttttcaacgtccacgtcgttcgttctgatcgatctatcatgcacggcggctgatatctgatcaaacgatgacatgtataatcgtctcactgcaatagaggtttgatgcagagaatgaacaatcctctacattttcttttgaggaaaaaataatcctctagagatgcactttcaagtgcagtgataaggaatgtgtggtctcaactctaaattaagttaagtgttcaatatctaacacactcataatttcttcttaaaaatgtttagaggaacatctttccctacaaatatcactttttttagaaaaaaaaaatcctctagaatctatactgaaagtatcacatagccatccgactgatgaaacactcctatctatgctacagtaaatttgttgcggtgcatatattgattagattattgttgatatttcctccatccctcccaaaaatatatttacttctgctgtacacctctgcgaaaaaagtgcagagaatttgcatcccacgtctttacggatattattacaatatagattttaccttgatttttgttagtatttgcttttcaaactgtttaacgatgtgttttatacggaaattttttatgtaaaaattgttttaaaatatcaaataaatcaattttataagtctacaataattgaaactcaattaatcacacactaatatctttattgttttacatgccctaacttcacctttgtgaattcaaatggacctagatggatggtatctcctccaccgggcgatccgagcagatcgagctcgccgcaccaccatcgtcggcgccggcgtcggaactcggaagccatccatccaggcgacaccgtcgtcgccatgattttgggacgccggcctagctacaaatgggctttggttcagtgcacagcacaagctagtacacgtccttatcagagagcacctggtcgatcatggcgtgcagccgagatgctggctactttctctgtttcctttttaacttgacaccggatataaaactttgaaggatcatcttttccaacgtgttttgcatgctacataaaactattacacttacattcacggattcaccaaaacatcgtagttttaaaagtctttattggtataaggtaaaatcacaagtgaaaggaggtgtaacttagtggttacagtgacctccttagtagtaccctaaagtcctaagttaaaatcttcataagagcaaatttcagattgggttatttaaaggctaagttcctaatttaaaaatgttgcatatatccggttggatatggagactaggtaaaaaaaatacccttctccaaaaagaaaaaaaaaaggtaaaatcaccttgatcagcagtgtcaagtagtaacaaggaacatgctttgagagcagggattgcaatttcgaaactatgtttttttgctggagagagccgaaagaaccgaaattatttgaaaatttcacaaattttaaatggatttgaataaactttgatcaaattcaaaaaatttagaaaaaccccaaaatttcaggcgaaatatacgcttgccagtgggggggggggggatttctgaaatttcactccaaaatttcaatcactgcatgagagtaggcaagctgcactagctgcagatcatgttcctgcagctgcagctcctccagtaccaccactgttggtgtacaatgcaacatggcattggagcctctgtacccattgatcgacaagctagggttgctcgtgtggcccagctagcactgatcgatggacgatgggcctcgatatgaacatgatcagtcgaatcttgcaggtgttgaaaaacggtcgtccgtcgccgatcgtcgagatggatatctgaagaatgtcggtgctacaacatctatctataagatcactgcatttttctgatacaaaaaagagcctcgccatgtgcggcctgccggcacattttacaccttctagatgcaagcagttcatgcactgagtgatctgcagttctgcacacattgctagtatatatagctagtggattactagctacttgtttaaagtcactttgcagctagcatttctcaaatcttactactgcattatgggtaggtatgttccttcagttgagaattactaagatggagcaaagtgctttattaatcaattgctagtgagaagtgaatagataaataaataaatgagatgcatgataggagaaaagtgaaacaaaaggccaatagagggaatgacgaaaagaggagtggataagttgaccgccggaaacttgttcccgacaatagaatgtggaggatacactcctcccctagaataactat

SEQ ID NO: 3407 - DNA, 606 bp, Oryza sativa
gctcccccaaagaaggggaggagcttttcgaacacaagcgaccgcttggccaacccgggaaagacgaccccgccgccagcgcgctccacaccgccgccaagcccaacggcggcctcgccgaagccaatgttccgccgccacctcgccgcccaccaacggcgacccaggccgcccagcgtcgctggtcgcgcctccaacccgccacctccgcatggccaacgcgccgttgccgccgcctacgcgcggccctcgcgccgtcccgcgcatcccaggagacgtcgccgcgtcttgggttgccgggccgagcggccgtcgaaaagccgccgcaccgctgctgccgcgctgggcaggttgcgcctgcccgccgcctccgcgcccgggctagccgcaccacgctgccccaggcgcccgccgcctccgcgctcgggctgtccctgcagagccaccgccggtgagccgcagctgccctccgcctccgcgctcgagccaggccgaccgagctgtagccgcacgccgccgcgccgcctcaagccgcgtcgcgccgccggcgcgccagatctaggcgaggggtggccggattcggccttgggggcgccggatccgccg

SEQ ID NO: 3408 - DNA, 683 bp, Oryza sativa
cattcgtatggtgcttgaacaacttatgctcacaacaacacactttcggcgcttcacggtagtgccatatccagtagcgcgcacagtccacaacagcacacatgaaaagcggcagctcgagttatcactatcaactttcggcgctgcctgttgacataaagtgaatcacgcccacgggtgatcgtcttgtcacatctaatgaataatgtatctcattgagttcacatatattgcagtgaaaacgacgctatataattgacaatctgaaggcaacctcttcatatcttctttcccactaccacaccacacacgaaaatggaagcctattaattggtaatacgtaatctagaattgagattatgtacaacattcttcactacaattttacattttggcagcaaaccaaatatgatcaaatgcaattttaccttaccaaatatttggtagtgccaaaacttgcttatattttggcattaacaaaatatttgtacggtaacattccaaatatgccctaaaaaataataaaattgtattttaccaatcttggagattttaatcttgcatagttttcaatataaaaagatttgataactattgatatttatataaaaaaaatatagagcacagtacaaaatccccctcccccagggcggcaagggggcccctgcaaaattccatgcccc

SEQ ID NO: 3409 - DNA, 642 bp, Oryza sativa
cgtacagcgtgcacgaaaccgatcagctcacgctcgtatgctgcgagcgcgcgatggcggggtgcccccggcctactgaagaaggcaacagggtggctgtcctggacgagccccgctccgaagccatgagacgaagcgtcgcattcgacgatgaagggcttggagaagtccggcatggcgagcaccggggcggtggtgactgctgccttgagcgcgtcgaacgccgttgcggcctcccctgaccaggagaaactatctttcttgaggagggcggtgaggggcgcggcgatggcgccgtagttgtgcacaaacttgcggtagtagcccgccaagccgaggaagctgcggactgcgcgcgccgagcgtggcgccggccaatcccgcacagcctgcaccttggccgggtccatggcgacgcccgcctcagagatgacgtggccgaggtacgcgacggacgcgctggcgaaggcgcacttggcgcgcttgaggaagagctggtgccgctgaagctcgctgaggacggcgcggatgtggcgcagatgatccgcccaggtcttgctgtaaattagtatatcatcaaaaaacacaagaacgaaacggcgaaggaacggccgaagtacgtcgttcagggctgcaggaatt

SEQ ID NO: 3410 - DNA, 598 bp, Oryza sativa
ccactcccggtggcttcctcagctgtgcgctgggcgcgctctgtagcgcggcgcacgtcacgcgcgcgacggcgtctcgcgtacgtgcggccccacatgacatctcccccctcatcgagagccagctcgtccccgagctggaagtcggggtacttggcgatgaaagcgtcggcgtcttcccacgtcgccgaagctggggactctcccttccattggatcagcagctggcgcacaccacgtgcgaggcgcgtcttgacggctcgttccggctccgggaccacggcaccatggtgaacagcaggcaggggcggtggagcatccggcggggagccatggaacttcttgaggaggccgatgtggaaaacgtcgtgcagacgagctcggggtggcagagcgaggcgaaccgcgacgtcgttgatgagctcggtgatgcggtagggcccgtagaagcggggcctcagcttgccggcgacggtctgtggcagtgaagatgccgcgcgctgcctgaggcgtagtagggcccagtcacccacctggtacgtgacatggcgatgtgccttgtcatagtggcgcttctgggtcgcctgtgcttggtcaa

SEQ ID NO: 3411 - DNA, 612 bp, Oryza sativa
aagatattcatcccatttttggatcagcacgcacgcaaacgcacctcgttgtcggcgaccaacgagacctgcgcgtacacctcgtccgtcgcggcgtccgcctgcaaacagcacaacgggaggagcagaccctctctctcaatcaatacctcgaacacattgcgctcgcgcgagagcagcaagcggcgagcgcactcacgtggaggctgacgtcgacgacgcggcagaacacgtgcggcggcaccgcggcgccggggccggagccgggcgcggccccgaggtgctcgaggtggccctgcggcaggtacacgacggcgctgcccttccgcggcagcggcgccacggggccagcgcaggcgtgccacagctccaggcacaccgcgccccccgccctcgcctccgcaggcgccgtgacggtgccggtggcgccgccctcctcctcgtcttcctcctcctccacggtgttgaggtcgatgcccaccatagccgcaaccccccaccggcagctcgccgcgccgccgccgcgcttgcttccaacgcggtcgaaagaggagagacggggagggaagcgaggaggggaggcgatcgaggtccctcgcttgggtttaatgg

SEQ ID NO: 3412 - DNA, 730 bp, Oryza sativa
acaatcttcttacacattatatggtgcaaatggcatagaaaaaatagcatgcctgtgataacctattccaaatcagtttgatacaaagatgtcagatatcggtgttttcaggaatcaggattcagaggtacatattgctggggcatcatacagattaagatctactagtatttgtgtgtgaggattctggcactacaatacctgagtacagtgacagtcctcttgtccctgaccagcaaagccacgtttcagcgatgctacttcgaaccatctaccaaagtagcgaattgggtcaaagttcttggcagtcatacccttcatcatcaaacctgtgccgccatcatcagaagggctatcgaatttcaaaggaaccccagccttgtcgatggctgctaccacaccaacctggcacaattttggctgtacaaaggtctctgcagggatagcctggtcaactatgagagattaagagtacatcgataccatgttacaagcctgaactggtaatctcactccattttccctcttctcttaattgaaattaacaagttttatgtatccaatcaaaattgcaccagtaaaattctctcaatcctcaacagtaaaaatatcttttcttaaaaaaaactgttcttgcttagtgatccagaggttatctctttgaattaccccgtgtttagttccaaagtttttcttcaaactaccaacttttccatcacatcaaaacttt

SEQ ID NO: 3413 - DNA, 21526 bp, Oryza sativa
ctgctacgttgagccacgctttcgaccgccagcacccggcctgtcgttgcttgtaccgaacgggagctagctcttcagatcgatcgtggataacggtagctatagctgccgtttctctgctcagatcgaaacgaaaaaggaagcagaatgtgtaggttttcttcggttgtcaaatgccgatgtgtgcagacgtacagtacgtggtcgtcatcatttgatctggccgtggagtttgtgtgccattgcaattgcaattgggtgtggctaatgggcgatcgatctgagcgaaacccatgccccctgtacacacctctcctcccctccccttcttctctttctactacactaaaaatttttaaaaaataaaaaaacaaagttgaaaaaatttatgtatagaaatacttatataaaaaaattagaattcaaatttaaatttgaaacggatgtgtaaacttttgacttataaattttgggtctataaactaatatttgaattcaaattcaaatttgaatcgggtatgtaaacttttgacttataaaatttgggtctataaattttaggtgtataaactttagatgcatagaaatactatatatataaaatatttgaattcaaattcaaatttgaatcgtttataattcaaattcaaatttgaatcgggtatataaacttttgacttataaactttgggtctataaattttaggtgtataaactttagatgtatagaaatactataaataaaatatttgaattcaaattcaaatttgaattgggtatcaaattcaaatttgaatcgggtatataaacttttgacttataaactttggatttataaactttagatgtatagaaacactatatataaaaaatatttgaattcaaattcaaatttgaatcgtatataaacttttgatttataaactttaggtctgtaaactttagatgtgtaaacttcaggtgtataaactttaggtgtataaatttactaaaataggaaagtaatatggtgtaaaaaaaaaacacgtggaggagggggggggggaaaccgatcgctcctggcgatcaatcgccaactggactctaggagtttcgattgcaattggtcttgcaggaagacgagacatctctcgtttctgaatgtggaattttttttatttttaattttttttattaaaagttttacaaaaataattttccattttgaaaattgacggaagtagtcgcctaccgccctctgggaaggcgatttttaaaaatcgccctcccagagggcggccaaaatgacgtggcagacggccgttcgctctcgggcgacggccgtcaacgaaatttgcaggcggcccccttgccgccctccgcgagggcgattttgtactgtgcggggggccgcctgcaaatgggcggcgagggggggcatggaaatttgcaggcggcccctttgccggcctccgcgagggcgattttgtactgtgcgggggccgcctgcaaatgggcggcgagggggcatggaattttgcaggcggcccccttgccgccctgggggagggcgattttgtactgtgctctatatttttgtataaatatcaatagttatcaaatctttttatattgaaaactatacaaaattaaaatctccaagtctggtaaaatacaattttattattttttagggcatatttggattgttaccgtacaaatattttgttaccgtacaaatattttattaatttttagggcatatttggattgttagtgccaaatttttcttcacgaccaaatatttggtaaggtaaaattgcatttgatcatatttggtttgctgccaaaatgtaaaattgtagtgaagaatgttctatataatctcaaatctagattacgtattaccaatgaataggcttccattttcgtgtgttgtgtgctagtgggaaagaagatatgaagaggttgccttcagattgtcaattatatagcgtcgttttcactgcaatatatgtgaactcaatgagatacattattcattagatgtgacaagacgatcacgcgtgggcgtgattcactttatgtaaacaggcaacgccgaaagttgatagtgataactcgagctgccgcttttcatgtgtgctgttgtggactgtgcgcgctactggatctgacactaccgtgcagcgccgaaagtgtgttgtcgtgagcataagttgttctagcaccatatgaatgaaaagaactatgtagacgagacaaacacaagtagtactgcagtagtaatagcaaaagtagtactgctttacaagtttgtaagccaaaagaaacggtcacataaggactgaagaggtagaatactactgacgaggcctcttacccctgtccctcctaccctgcgccctaatgtgcccgtgggagtacgtgagtcggtccgggggtacggcacggccaacccgtcctgcctgtacaggtgtgacctctggctgctcctgagtgtgcgcctctggagctcctccaagctgagaggagcctagtacgtcgtggtggtctgcaccgtgcaagtcgtcgtcgtagaactggctagtaggaccagtcctaccggcgtgagacgaagaggccccagtaccgaagatcccggctgcaaatcctgctggacaaggaccatcagtttcgtacaggtatttaacagtattaataaaaagtaaagtaccgtatgggcgagggatcgacgctccgtgagaggaagagctggcgaacgcgcccgaagaggtggcgaacgcccctgcggagctcgtggaagcgccggtcgtgcctgcgaacgcgctcgaaggcagacgaggtcctgcgatgaggaaacgtgcagttaaaacatggtgacataatcgtgcaaaagctgaaacaaaaatgaactaatatctgggctgaactgtaccgtgcgaaaccggtgctgtaggtcgcactgctccgaagctaggggcgctcgaaggcaaacgaggtcctgcgaggatggaacatcaagttacgacggggtgatgttttcgtataaaaacagaaacaaaacttaagaaacctctgggctgagcagtaccgtgcgaaataggtgccgtaggtcgaggtcctgctccgacggtaggcgcgcgaggccgtggttgtaccggaccagctggaggtacgacgtccacggcgctgcgacaggagaagacgcgcatgaccgcacgcatcttctcccgcatctggtcgaaggtcaccatctgctcaacgtcagtcaagtgcaaacctctgttcaacctcacttggactgcggtgatatcggcactgatatcccgtgcggcatcagcctatgcaagatggaaataacaaattcagtagttgtcctatattatgcaagataaatgaaataattgtaagaagtaatacaaattggacgtaccgccacgaagtagtctcggtcaaggtgcgtgggatacgcgtccgtgacagcggcaacgtgcggctctggggcgtctggagtgaaggtcacacgcgcacgagtgcgaggaaggtaccagcgaaggtagtcacggtagttctccaccgtgtgtgggaagagctcgttgatcacctcctctgtagctaacacccagtcgtcaacgtactgctgtacacgtggagcccaaagtgcgcctgctagctgtccccgtcgagtcaacctgtgaagagaggtaaattatatggctcgatgaagtaattatcataaaaatttagaaatgaacaatccgaactcacgagtggtcggcagggaggacggtcagctgcacgttgcccggaaacacctgcctaagtccgaactgtctcatcacatgctgcgggcagtgaggctcaacgaaaatgtcgaacaccatcggcaggatggtgagccagtaagcctggtcgcgtgtgcacatggacgaaagtcctagcggtgctctcgcagcgacggcctcttctgtgtacggctcccagatgacgtcgctcggctggagacggtcaaactcgaacacgaagtccgggtaaccacgtctcacctggacgtgagcgtaacgacgctgcaataaacatgatcggaattagacatgttatgtgaagaaaaaaaaagacgactgataaacttataacgcagcgaagttgcactaaccccacgtcgacaccagtaagtccccatcgtgggaccgtcctctggacactgcgcgctgcgaccaaccccgtagggtgcgctatccaccattggtcgacctatggcaaacctctcggctgcccaaagctgaagcaacatagggcagccagcgatgatcgctcccgcgtcagtcttcgtgcacgcctcacagagggcacggtacgtggctgctagcacggcagaaccccagctccactgcggcacgtcctgtggctgagcatccgcgatggaccgtgcgtagtggaccagccggaagtccacagcgtgcccgtgggtgctagtgaacatcacccacccgaacaaccacaacaggtacgcctcaagggagcgtcggaccgagtaatcatcagcgtcagggtgcagaaggtccgcctacaattaagaatgaaatgttagtacaaaacactcattcggtcgcaaataagcacgtatgataataacaacttatttacttacagtgaactggagcaaccaagccttgctaggcccgactgtagagtacggaggaagggtgttggtcggtcctaggtgtggaaggcgcatcacctgctcgaagcgcgcagtgatatcctccttccacccaaaaacaccgtccacgggaccaactgctgctcccgccagcggtagcccgagcaagtacgacacgtcctgcagtgtcggagccatctccccacagggaaggtggaacgtgtgcgtctcaggtctccagcggtctacaagagcggcaaggagtgaccggtctgcatcccaccgcttcgctgggtcacggtcgtccgccgccgcctcaacaagcctacaaagtggtagaaggcctgccgcacgcaacctgtatagagcaaacttcaaacataagtacaacacaaagcaaagttgagttgaaatgtgaacatacgcgtaccaaggaacgtgacgggggtcgacacgcaaccactcgcgcgacgtgcgtggacggaaggtgccgagctgtgcaccctcgactgctgacaggaacgagcggtggttcctgtcaatcccacggttcaacagcgccggtgtgtcgtacgccatacctgcatcaaataggttgatcagaaacatataaataattagttcaacataagtaataaatgttcataagcgaattactaacacatattaaacaagagtacaaacaaacaaaagtgtttagtccgaacactcatcacgataacattatgatacaacaccgaatagttcgcaatactactagtacaacaatagtcggaggtactcattacaacaacattgaattgaaattacacgatagaagtatttagtccgaacactcattacatcacaacagcattttatttcctaaatcgaaagcattgttacaccatggaatcgcctgctgcgcgacgacgccttggccttgcgcgcctgcttgttgttccttcaccaggtggtcgcctaccatcacttgcctgtccagatggactagcatctgcgccgcttggaacttctgcattcttcgggcatttcttgtaagtatggccgcgcagatcacacttgctgcagcgtaaagtcctcccacctgcttctgactcatccatatcatttctgatgcgtgtagtttggcgtccaccctttttcacccttaacttagatggatctggaatataaaaaacttgggcactcagcgttgtgtaagatcctgagatcccgaacccatatatctcctcactccatgtatgaaagattgcttctttcctgaaataatttgagacgtacacattgggagatataccacaatcaccggcagcagcaagaacgtgtgagcaaggaaggtgacgaagcttcggcttcatacaactgcaggtacatccaccatccgccttcaagacacattcctacacggcttgcttgcgatagataccacgcctgctcctatcaacacacattatttcataccgatgcacttgtgtgccttgagcaacaactcgatgtctccgtgcctttttgattttatcttccatgtactttgtcactacgttgccaaacactatgttgttatcggccatggacagaccaattttcttgtatcgatccctaaagtacgctttcgtgccgtgaaggatgaattcaacaatagcaaccaatggaagtacccgaactcctcgcattacccagttgtacacctctgccaaattggttgtcattatgccataccgagatccatcggtgtcgaacaatagagaccacttctccttaggctcattctcaatccactgagtgaaatttctgatggacgaccctgacctccttctcattgttggtgggtcatcatgtaatgcaccaagaggtatggaaggctcgtcaccttcaactagtggtctgcgagattgctcatctgtttgcttcgttgtcaactcatccaacttgtcccacaactcattaaatttcttctcttggttctgtgcacagagcctcttaaagagctccataagatgcttgttcttgaattgcttgtagaaatttgcacccatgtgacgcatgcaccaccgactccgaacatcaggccacttagctggaagtcccttctcatcccaaccgttctgcaagtagacaatagcccgcaacatacccgcatgacgatcatgtataaggcaaacgttgggcctcatacgcaccactgcaatgtgcactctctctaggaaccagtaccagctttcagtgttctcactctctacaaatgcaaaagccataggtagaacctggttgttcccatcacacccaattgctgtcaatatctgacctcggtatttacctgtcataaaagttccatctatgcatagaacaggtcgacaatgcacaaaagcattgatgcaagcacccaatgagaaaaaggctctttgcagcacactctttgttcgatcatcaaccgatgtaaatgtatgtaggtcatagtacgtattattattcctctgggcaatggtggctaacaaacgaggcaaattatcataagaagcttcaaatgtgccatacctcatctcaatgatcttttgtttggctctccaggcctttgcatggcttatggtgtacttgaatttgttctcgatgtgcctaataattgattttggttcaaagccaatgttaccaacaacactgctgtacatctcacttgccacaaaagctgaagtgatgtttcggtgatacttctccaccccttgtaagtagcacttgtgctcggtcacaatgctaactttccaataatcattccatttacccttatatgcatggacacgccacggacaatcttccttcatgcacctcacttcatacacataatttgttgacttgaccaccctaaactctctctgcaaggaaactgcccaatgcttcaccgcctccttcatctcatccttatgagcataccttgcaccctcaattacctcgttctccttatactcccagggtacatgatcaccctctgatataacaagtccagagaagtcctcatttgcccaatcagtggccattacatcaccttcctcatcggatgatgcgtcgtcgtccacttcctcattatccgaatcttccctctccatttcatcaacaattataccgactctctccccctcatccgccatgcccatagcctgctcctcccttggttgattttcctcattttgcatcgatggtccaacaacatcccctgcattgataggaccctctacatcttcggtttgcattgaaacatttatatctttctcttgtaccgacacaaatataacgaggggccatgaccgttcaaaagccatttccacataccgtctccaagcatcagtgctgtccatcggcattagttcccaaaaataaccttctgttgcacgactcactacaactgacactgacattgtgtagacttcttggtctattctaaatcctctcaacaaccaactataaattgactgaaatgttctctccgcaggcctatcgatgcccttagatgtcattacaaaatctgacagatcaacaccatctggaccaaatctaatatttccttcaccgtgaactatctgaaatgtgaccttacttgacattgtgcctgatgaaaacaataactgcgttaacctcgcatttctgtactacgccctaagttacattctctacaatattgttctctaaatttctaaaattacgttacattctccagatcaaactaaactacatcttacaattaacactactgtctatgtctcaattcatactattatattctatgctctggatctacacatatgtgctgtgtgctacagatgtgctaaaatatatggaactaaaactaaaacgcaacatatatactcaaacataacatattagtacaaatgcaaaagatgtatgggagcatacctgtgatgaattgagcgaaccagcagggcttcgccgctccccttctgctgccctcccctctctctctttcgttttttttggatttttagtgaatataatgaaatttcacagaggagggactgggctttataggggggaggcaaaaatcgccctcccccagggcggcaagggggccgcctgcaaaattccatgccccctcgccgcccatttgcaggcggcccccccacagtacaaaatcgccctagcggagggcggcaagggggccgcctgcaaaattccatgccccccctcgccgcccatttgcaggcggcccccccgcacagtataaaatcgccctaacggagggcggcaagggggccgcctgcaaatttcgttgacggccgtcgcccgagagcgaacggccgtctgccacgtcattttcgccgccctctgagagggcgatttttaaaaatcgccctcccagagggcggtaggcgactacttccgtcaattttcaaaatggaaaattatttttgtaaaacttttaataaaaaaaattataaataaaaaaaattctctgaatgtgatgattggtcaaagactcaagacgagaccttatcggctctggaccgaaatgcagttagaactactaattgggctgtgttcttaaaatgggccgccacaccaacccgtcagctactaaaggcccacagaaggcccgaacaagcctctcatttgcttaaactgctcagactgggccaaaagtgggttgctaattctagtgcatggcacgatcacatctgatccccgaaaacaaaatatttacggcattttagttcgatttttatatacagtaaatttgataaacatagctacattataattataatataactttcacaaaccattagatttgctttaagattcgtacaagaagaaaagaaaaaaattacactgcacaaacgatgtgaaggaattcagtctcgagatgtctccatcgtgagaacaatgcgttaccacaggttttttaaagttagatataagttatataagttatagttatacgacagttactacttactacaaatataatcacactacgattcaattatatttacctgacaaacatgttacggttttagatctgtttccgttggaaacttgaaccttcatggacactcacaaccagaaatgcccaattgcccatcccctgtcttgactcctggccatctttctccttgctgattttgtattctctaccgttttaatgccccattttgcaacgcatcgttatttagaagatttcagtgataatttcagttttcatttcttaattttggaatggaactaaggaaggaacaaactaatcctcagctcaacttccaaacacccggtgataacccagcttattgtactccagttctcagaccaaacgtactgtacgaatttggacaagaaaaaggaaaagtttagaggtagaaactgcacgaggcccacttgtcagtgacacaaccaattggtgtctgacgtcaattggaggccccttctcgttcgcacccctctccttggaaggagacgcgcccgctgcgactgcgagagcgaacccccaaaaccctcgccacctctgcggggcgccgcgcgatcgcgagctctctcccattcccttccctccctccctctctctctcgcgctccaccctaatgccccccacgaggcccaagcggcggcgcggcggctccgcgcgatcccgcggccggaagaagcagaagcgcctcgacgccatccacgatgtcgcgccggtatccgcccctcccgccggagccgccgtcgtcgtcggcggcggcggcgagagcgaggattccgacgcggagggcccccgacggagcacgcgggtgcgccgcgcgccggccctgctcgacacctcgccgctcccctccccgcgccgtaagagggcgcgcggcggcggcggcggcggggtggccgggtcgagcggcgggagctcgcggaggagaagcagaggtagggcgaggggcgaggcgggggttgcccgcgagattggcgaggaagaggaggaggaggaagacgacgaggcggggaacgtggtgtggcgctctcggctgcgggatagggtcaaggggaaggctaagctggataagcgagttaggagcctctggttcgacgaggactacgaggtggagctgaaggaggaggaggaggtggtggtggaggaggaggaggaggatgaggaggagggggatgaggaggaggaggaggagcaggttaggacattggtggtggaccttcgggagggagctgaggaagagacaatgggcgagggaagtgggagcttgccaatgcgagggagggaagtgatggatagggaaatcaatctaaccatcgatttgaatgtggaagaacatgaggctgtcgagggtgtcaatgtggtggaagaggaagatggggaaaaaggaggcgaagcggatgaggagaaaggagatgcgattggtcctggaaatgatctacacgaaggcaagcatgaggaggtaggggacgaggagggtttacatgagaaggagagaactgaagagctgggatcagcagtactagaagggcgaaatggtgatgagctaccttgcaatgagaataatgctgaggatggcactggcagttcacatgaacacgagcatcttcttgtgcaaaatgagcagactgtggaagagagcaacctttgtgttgagcagcaaatggaactggatggttctagtcctagtgagcaattgaaagaggttcagcaggatgtacagacaggtggtgcctcaaatgtagtactgcccgaggaggccccaaaggaaggagtccgcaaatttccagtttcggaagaaaaacagggtaccatggagattaaagaagggagacgttgtgggctctgtggtggagggactgatggaagaccacctaaggttgcattacatgatacagttgacagtgataatgaagcctatgagggggctttgccttcagaggatccaaactatgatatgtgggacgggttcggtgatgatcctgggtggcttggaaggttattgggtccaatacatgatcagtttggcattgctcgtgtctgggttcatcagaattgtgcagtttggagtcctgaggtatgccccacattattttataaaattctcaccctcatactattcctgtaccttctgccttatactgggtcattgtctccttgtgattttcatgaccatattctctcaaaacaatatgcccccaatacatgttttgggattatcattggttactccggactttggaagcaagcaaaacaagctaaatgtgttgcaagcaaaacaaactaaatgcttcaacatagtgcatgctttgaccttgtggtttggatgtaatggaatggagttatgaaaaacttgcttttgtcacattttcaggtttactttgctggtttgggctgcctaaaaaatgtaagagcagcactttgccgtggaaggcttttgaagtgcagccgatgtggcagacctggtgcaactattgggtgtcgagttgatcgatgtccgaaaacctaccatttggtaattggtttttacttaaaccacattttaccattctagttttgccctttagcctttaatatgcattaaccttttcgatttgtagccttgtagtcgagcagaagcctgtatatttgatcaccggatgtttcttatagcctgcaatgatcatcgacattacttccaacctcaaggagataaatatgttgaactgctcagaaaaatgaagataaaaaagatgaaggcagatatcagaaaggtgtcacatgatgcatggagaaaggacatagaggccgaggaaaaatggttagagaactgtggagaagatgaggaattcttgaaacgtgaggggaagaggctaaacagagatctttcgagaattgcacctgtttacataggaggcacttctgaaaatgaaaaggcgtactgtggctgggagtctgttgctgggctcagtaacgttattcagagcatgaaggaagtggtgatactgcctcttctgtatcctgagtttttcagttctttaggtcttacacctccaagaggtgttctgctgcatggccatcctggtactggtaaaacactcgtagtgcgtgcactaataggggcatgctctcaggggaacagaaggattgcttattttgctcgaaaaggtgctgattgtttgggaaagtatgttggcgatgctgagagacaactaagacttctgtttcaggtagctgaaagatgtcaaccttcgatcatattttttgatgagatagatggcttagcaccttctagatccagacgacaagaccagacacacaattcagttgtggcgactttgctttctttgctggatggtttgaaatcacggggttcagttatagtaatcggcgcaacaaatcgtcctgatgctattgatcctgctcttaggaggccaggaagatttgaccgtgagatatacttcccgctccccacctttgaggatagatccgctattctttcattacacacgaaaaaatggccaagtcctatttctggggcattcctctcagttattgcaagccaaactgttggatatgctggtgctgatctgcagtcaatttgcacccaagctgcaataaatgctttgaaaaggacttgcccattgaaggaaatcttactctctgcagagaaaggatttgagcatgggcgacttcctctaccatcaattcttgtggaggaaagggattggcttgctgctcttgcagctgctccaccaccctgttcacagagagaagcagggattgctgcaaatgatctagtttcctctcctcttgtctcctatcttgtgccgtgccttcttaaaccattgctgcacctttttatctccctctatttggatgagcgaatctggttaccttcatctcttctgaaggcatttgcttctattaagcaagttatcttctcatctatggagaagaataatgtgcctcacacattttggtcttcctatctcccatctttgatacaacagaaaggtattgcaaaaagaattgcatcaatcttgtcaggctatggtctaatagcttatcaactaggaaaccatgattctgtgttaaatcacaatgaacagcacgagaagtttgatgcccacagattgaattccaccggttctcacccaaaaggaggtttagcacataaattatcaggatttagagctttagctgctggagcgcccagatcaggccaacaacatctgatccgttgccttcttcatggttttgtgggtcatactgtaatacacaagcttgatcttgcaactatggcacaggagggaaacggtgatattcttagtggactcacacaaattcttcgtaagtttctttatttctttacctcataattgttcatctaaaggcattgtccacaaatatgtgataatattgtctgtatgcatggctctgaggttatataaatgcatgcttgctccaaaagttgtctgcatagaagaatcaatgataactctcttcaagcttaaacctgttattgcatgagcatgcctgtcatattgatatatcatggcactactgttgcctatccacattccccatttcccaatatctgcaattgcatgtaagacatctgacatttcttgctttgacttcttcgttctctatttatactcccattcaacgccatatatctgtagctgccattcctgttcatatttattatcttttttgacaggaagtcctgttcctatttattggttcaaatacatcatgttgtttttttttcctaaaaaatattgtgcacaaaacttccatatcgaatcatcatttctttgttctccttttgttttatcttttcaacactttcatacatggtcttaaatggttaattaaacattaggagcttttctggatctaacatttgataaatttttcaagagtctatttaaacaaactatgtaatatgtcatagctatcatcttcagatataccacaatactgatgagagtgtcttcttattcgatatggggaaccagccattcacaacctgaactgattttggacaagcagtacctactcagttcaaaagggaatgctatttaaccaagaacagtaattagttcaagtcagttatatcttcaagttggatctttctgttgactcaaagttgatctttgagggtgtttggttggttcctcgtgaggtatatacctcaacatcgcaatacatcctaagtacgagttcatcgcgatttagaaaatgatttaaatttatttctaactatccattttcactacactttaagttagttgagtcaaactggagttttggcattcaaagttgaatttgtttccattgagctgtatattttcaaattatatcgttaaagacaaatttgcatatgatctgaagattcctgcaccatgctaaattgtttatatttttggaagccatttcccgataatgattcaattgcaatcaatatagtggagatgcattgtttgaagatcaggcaataaattatgctgagttggtgatacaatgattgaagatcatgcaagaaattaaactgagtacttttaattataacagaattatgctatggcccaattccactttaagctgaagtgaaatgatatagtagttacttatgtattaccctattagcattcttcatttctttccagtgaaatgggcaaataatcatgtattttactttcgcttgaccagtaaaatgccttaatcttggaagatgtataatctatatgcctagaattgatttgtgggccatcgacaagttccatgaacaagaagcagaagatcatgtgctcaatgtgggaacaagcaagttagggtccacagcaacaaaaaatattaaaaaatgttctgaagtatggaattcgttggttgatcagatgggttcattgttagcttctgtatccatcagtgttctggtaaatttcttttcttttcatatgcttcttcaattcctttttgtttgaaaattttgggtatgtatgcatatccatactgtccttttactcacaatgtttacagctgaattgtgcattgcatttatgactaatatattgagattttagtaggttcatgagcgtaaatgactagcattagctgaaaatataggtattgacatttttattcaggcatataatcacctaatttgtactctatccctccaaatatgtataataatctaaacgaataataatttttgaaataatgttctgtccttagaaaaacaaatttaatgaactgaaatgctgctcaagtgttaataataataataataatttaatacatagtcataggagataatcagttgacagctattatcttaatcagtacacaagttacttctctgggtttccattttcaaataaaagaaagggcgaaaaggaagctggaatatatggcccatataccaggggataatttaagaggcagtgcaaggaaaccaagtataatataaaactaagggctcatttgacttcttgaatagtgatatgctctgttctacttcttgttgcagaatgtagttaagaaaatctttgcgtttctagtagaaaatgtattgctaagaagcggccaggcttcagttaacatataaaaagtgtaggacaattgcttaacaagcattacacttgcaaactgcttaactgttcatttattctggattacccctgtgcaaatgacgagtagtttgaccccatttgttgctgtgtgaattttcatattatgatcatctggaacaccgtgaatgttggattactgctattggccattacccctgattttctgatgataaaccctgatttacttggacttaagatctaatgatatatacttatggaacacttctggatatttacatccaaattgcacatttagctgataatttgtttttcagtccaccagtgaactgaagtttcaagatctccctagtggagtaagacatttcttcagcacacatgttgtagatcaatgtcttgcttcttcagaacacacaataccaaggttctctgtgaatgttgacagctactttacctgggatgaggttattgacgcatgctgtttgcggatatcacatgatttagttcagcagcatgttcaacttttgcatgacagggctcataacaatcatgatgaacagaaagaggtctttgttcctatggaaattagtgcaccaggtgaacatagatccagtgggagtaaggaagccagcatgttaacgaagtatccattgaacatggacaagcatccctcatgtggggtttcttcaagagagcatcctactcagctgggcacatgtagtgctcagcaagagccaccaacatctaatgttgaagataaagaggacaatactgagaaaattgatttcaatgagaaagtcgcaacaaatcgttctaatagaattgtgaaggacagtgaatcactagctattatggcctttggaattcagatactacagcacccgcaattttctaaactttgttgggttacatcgaaactacgagagggcccctgcactgatataaatggaccatggaaaggctggccatttaattcctgtttattgcaaagcactacagctgataaatcattatctggaggaaacaatgttcttaagggcaaagagaagattccgtctgtcagaggacttgttgctgttggtctattagcatatagaggtgcttatgcatctgttttggaaatctgttctgaggtgagaaaggtcttggaactgttagttggacaggtccgaactaaaattttggaaaagagaagtcgatatcggtacttccatattctgtcccaagttgcttatctggatgatatcatgagcagctgggcatacacctttcaaaggtaagcaatgggctgtatatttgtgtttgtttgtattggttgtcacattattgattctttttgaagttagtaaactagtaaagtatacttctggcagtcagcaaaaaatattggtacttcatactgctgttttctgacaaaattgtcctgatatttaacttttatatttgtctacaggttacatagtgaaaacaggagagtaaaaacaagtccaaaggtaactgttggaaagtcatccacaagagaatgtcaaggcgacagcaacactgcagaagcaaacatacttggtgctcctgctggctgctctgaggcccaaggcactcctggccaacatacagatgaccttgaagttattcctgctcactgccctagtgagatgcaagagaattcagtccaacatgctccaggccatcttgaaatccatggcattgtctgcgaccttgacaatgataatgtgacatctatatccagcataaatgcagtggaacctgatcttatccattcagcttcacttgatgtgcacacagattcacttaccccagcagatgcagtaataaatgatgggcaatcttgtggggttgacaatgatgggcaaatgtccagagtaatcaatggagaagaaaaccacatatctaatattgaaagacctgaaagccacacagtatctgttgcggatttcaatgagttgcaaaggaaaaatgctgttgcatcctcaactagtaccgacagtgcaggaacatccaggaacatggtgtcttctgaagctcgtggaagtgacaatgagcggaatactgatttccctgtggatgatgtcaaattaggtcatttggttaatcctcaatcacaggataccatgaaaagtctctcagttctgaaacctccatgtctctacaaatgttgccctgtgtgtttcaatgctgtttataagatggttcatgatattctttcaaattcagtaaggcctagtctgcattgcttagcagtcgatgatatgcatgaccttttgtcatcatggtcagtgaatcttctagcaacagttagaaaatggtatacttctcaaggtattgttggctctgaagaaaattctggagaagggcattgtgtttgtagcagtgataatggttgtgttccaagggagtgcacatgccatttggaaagcaacgaagatgctggaactataaaggatgagagctattatctaagtggacagccattaagttttttctttaaagatggtgtattgataccaccagatatcactgcaccaactacacttcattgcagttatatgagattatgtgtttgctcgataccaggttcaatttctatgttcaatcggatctcgagttgatgtgattgtgtgatgcaaggtacttcaatgctaaggataccacagttctgatctttttcctgtgctggcctatcttcagtgtttaccaggtcttgtgcactctcatgggattttgcttgtttccccagtggtagcagctagttcattgcaattacacctcctcccttgatgcaactcccaagctagccttctgcaaataaattgcctttattggttatgttcagcagtggagtgctgggttatatagtttttgggaaacctggatcgactgaaaagaaacaatgctattgattttgtgtctgttaagtggttccgttgtatacgcagtctactgttactgatattggaatctttaaactagctgatccgtgatgctttctcaaatctcattgtattatgtattatagctcaattaaatcactgagttgatcagttgaaacaagattgacaagtacctacagtgtccaagttgtaccttcagactggttactggtatgctttccgacgagctactaacatttaactgcgttcttatgtacatttgagcacactgttacttagaaatgcttaagaaattttgactttggtacttcttagaatataatcatgtacatatttctaaagaaggcaattgtttgacgataaaattaatgtccaacaaagtatttactgattttgtgttattggcatggaacttcattatatggataaatcagtgaactactcatgtgaacttcattgaagctttagtggattattaagttcatgtacaaatttgcttcagtaggcatcttgaactcttgtttctttggtctttgcactgaatcataaattgagtgagggctgatggatgggtttgtttgtatattagaccaagtggccttactatgcccagttccctgaagtagccatgccatggcttggcttatccagtttgatacattttgccatggtggtggtttattgctcttttagcaaagcagttgtgctggctattctttgttggacaagtttagtttgaaggcaggcatatgttctatttgtatgtggcttgccattttcataattttgtcagcagaactgggacaaacttattattgtaaaagggaagattattatttgaacaatctgtatatgatgaactgattcccgttactggtataaactacaaagacatgaactgtaacaaaactggtgaagattattaatattttgtgtctgtaaacagggaaaagcccaccattttccagtttgtcagaaactggttgcattgtatttttagattaattgaaaatttacattctgatgaaacatagattaagattgggcgacatgagaatttgtctgtgattgagccatcgaggtgaccaagaaccatcaataattcaaatactattcttgggattctgaatcttggttataaactataggcaaccgtttttcccccctgatgtttgtgtacaacctgactgttttggttgggtccgactgagaagctgtttggaccagacaacagcaaatcccaactaagttcataccatttgtgttactgttacctgtgctgctggctatcagggagaaatgcacagacaattccctttactttgttattgtttcttaccatgaacctcttgtgtcatctatcgtttactttgttagacttgttctaattggttcgatctgccacagggagtggctctcccacaataaagttttgaccctaacatgtattgagatgcccaagtctatggtgttctctaatgcaacatactagctaagaaatttcaacactttcagcaggagctttgtaactttctttatgccttgcagagcattatactggcaggctgtgttgaatgaactatgtaatttgaaacttgtcataccagccagtgatgctgttatcaaagggtgtggcgatggtttattgtactctcaaaacttattctgaaacaaactattgtctctgatggtcccatgttatgaaatattgtttcttccagcctgttctcaatcagattgtctcatacctgtatatactggtggttgtattgcactggtcagtgagtatggaatgcttatagtaagaaagctcatgctgcagcatgatagttcaagtcaagtgacctttgcatggtagtcctggttagaacaatcattggtttatttttgaagaggagaagttgagagaaggaatgtgaaaacattacatgagatgttaggaagatgcaggtttgtaaagatatggttaatggctttatgtgtcaatttttagtctttggaagatcttgctgatttttcaagccacagaaggttggaaggatacttttgcactttgctgtcaagctagacaaaatatgccatgaagaagagtactaaacacaagtaatatttttgcctctccagttcagttttttattacgttatttgtaatgactttataattcaattcttattttgcaaatacatacacagttgcttatatgtaggaacaattcataaaatgacatagctggtgtagtagtacaataagtttcaccagtgccattccatgtcaattagtatatgctaaattagatttataaatttattacactgaattttactttgatttctcgaagtttattttgctcaaatattatgtcaggtgcacatatttattcaaatcttagcatctactccctttgtcccaaaatataggaagttttgg

SEQ ID NO: 3414 - DNA, 1139 bp, Oryza sativa
atccaaccaaaactccttatattttgggacggagggagtagctaatagggaagcgataaaaataattttgattttgaccttgagtagaggcacttccaacatatctcaattgtgcctgttggtgtcttgcggtggaatattaggaagcactattcaatgattgcacaagtaaatgcataatacaaagcactatttacaacacacttttgtgtagtaatttttaaaacataaactagacttccatatgccagttgttgactaatgtacagcaaatttggtgacttaaataaagtttgatgatattgttctcctgtttgtcaaaattcactaaaattttcatgagattgttatgtggcttatggtttatcaaactagaagacaaatataatgttgctatactgtatatccatgtctggaagtttaagttacataaccttttcttttcttttacaaatagtcaataaacaaaaaattcttatacaacctcagaaaacccagagaatttagacaaaatagcgcaaaggacatactttgtaccacacaaacatgaaatgaatttttatagccatgtagttaatctcccataccagctaggctgcatctgaaaatgccaagtacacacaaaatatgcaaggcagaaaatgaaaagaatatatctaacatttctatttcatgttgtaaggcacacatgatacagaatgacatatttgcattttggtactgttttttcttctaagaatagcgtgggacctatgggcaggggactaagcctttgctcgctttatttatatatatatatatatatatatatatatattctgattacaagtggtcaaaagtatgctgggtgataatcttcatcgtcgtataccatgagatcttttacgatttgatccattgttggcctcttgcttctttcctcaagacatgaaatagctgctttcaccatcgcttttgcttgatcacaattgaaatggcctttcagcctactgtctactatagtgtccaggacctcaccactagtgagcatctgttttaccacctgcacgaattgcatcaagtctatgttttcttcttctattgttatcccacttgaaactctagtcccagtcacaatctccagaagcacaaccccatag

SEQ ID NO: 3415 - DNA, 729 bp, Oryza sativa
ggccattcccatggcgcgtggacgacacgacaaatgcccaaaaatgaaagggagggaaaaagcttactagtaatagcttggcttagcgagcagctacagtagcaggagtggagtggagtattagttaattaattagtccacggcgttaatgatactccaccgattgaaagagtagcagcaaaggggaatcctttccaccatcccacttccacctttcttcttcttcttcttcttcgcggcgacatggcgcgcgagggggaggggtggatccatgaccatgagtagcttacgaggattccccaagcccaccacccaccacccaccgccaccttttgttccgcaaccgcaatgatttcttcttcttgtaccacactgcttctgctgctgccgacgccgccgccgccgccgccaccagcaaaccccaatctcgcctgaccaccgttccccacctcgcctcgcctcgcctcgccgccgatacacgatgttcaagctgcaccgccaccgctcgtcggaccgcgtcggccagcgctttgacttccgcttctccaacttccgcgccgtccaggtaccatgctctcctctcgatcccccattccttcttgccctcctcaccttgccccttgggattcggattcggattcggattcctcgcatggggaatcaatcgcttgctttgcgacctcgattcatctacgtagctcaccagcatccaaggtttcgcatttcctg

SEQ ID NO: 3416 - DNA, 8284 bp, Oryza sativa
tcaggtggcaacccgtaaagctgtaggaggtgacttggattttgctattgcaaagggtgttggttggctcaaggctggattgatatggctgtacaactttgtcctgctctttgtccctgttgatttgtaagttgatggtttgggaatttgacattacaaattactagattttcttttcttcactcccctgttataaccattagtttcctcttcttttgcaggtcagatatggaagcatgcaaagatgactggagaaaaattgttgacgaagcgttcagccatcctacatacaattctgctctggttactgtacataatacttgatgtcaggctacagaagcctttctccattaaagaacattcttgtagcatgtcatttcacagtgtatcaccttaaatgcctaagtaaatatatctcggtcgcaaattatacctctgatctatccctcttgattcagaaaacctattttgcatttgaagaattctggaggcgacagcagttataacaaggcggccacaaacttcagcagtaaattggtctccttataacaatgtccaagctatcctttatttttcattttatgttagctaatgttgcaagagtatttgcgtaacaagattttggcaattaaaaacatactccctccgtcctaatatgtagtaatctatgtccagattcgtagtcttaagatgtgtctaatcccatcctaggatgctacatattgggacggagggagtatgtcagagtataagcttcattcggtcttctcattccagagagaattgggctctagcttttctcagggttgaatttaaccattttcatatgcatcctttcaatcatttttattttttattttaatatttattttttgttttatcatcttattaaaaatcaatttgtggattctgttgttccaaaacaaaattttgtggattccaagtccttccaaatatttattgacttgtccagtatgcatacagtaaagttcattactaacattgaataatattgaaagcactattcagaaaaggttagtcttttaagtgatgatggattaaaattggactaaccatcttcctttctcattttgatacagtaaagtttaattgttgatctactgtgtaaatatagtgcgtgcgtcatcatgtaaaagaatgcagctttaccctctgagttgtcattcaggtaatttctcatatatttcttctattaggatgactttcaactttacatgattcatatggatacattatcttgacagattaggggttaatttagtgattacattgccaattgtgcaggcatgtatgacctagttggctgggaggctatccaactagatgcatcaactggtgtctgcctggctgcctgaatagttttatggtggtgcagttagcatgtctgatgatggcattggcaggtgagtttccagcgtcactcccatacaattattatcgttatacaaatatttatacattggcaaaaatgtgttgtcggatgcagaacgccagtactgaggtagcatcgttgcatgcatcatccttaaaaatgccatatgaattaaaaaatgcaatgcacatatttgcacagtggagaaatgtgttgtcggatgtacaggaagtctcttgtaatagaaagactgcatcaccttaaaaatatagcctgaatttaaaaaatgtgttgtcggatggccattggagtagaaagtagcgaggtttgcatcatcctgtgaattatagaaagaggggtggttaggaagatatcacgttatataggagaaagtaacctatcgttgcttaccagtttcctatcgatcgagaaatgctgttaattaattgcctctttttgttgacgtttttccctctgagaagaatatgttcggtcctgagatatttgctcatgtgctgtacacatttcagtttggaatgtcctattatgagaaagatagaacttgtgaattacaagtcctaaggccgtaaaaaaatattacaagtccaaaagcatatacttagactaaagttcgcagaactttgtcaccaacctgtgaaaacacttgccattacatatatactccaaatccaagagatgccattcctctccttttatgtttttttcccttttttatgaaaaaaaaagtagctgtctttcaataaagatggcatttgaaaaaaaaaatgcacagttggtgacagtggcggatccccagccctgttaatgcaattttgaattcatgaattcggctcgtaacctaaagacgtttggaacacaagatttgcatgccttcatgaatttgggaacccagccgtttggaacataggaggtgagaaaataaaggttttagaacttctcctcttattattgttctaacctcttatcatcaaaaacaaaaaccctaatataaaatgtttaatttgtaatgagccgggtttaatctttcgttttcggcgtttgtatcggagggtgccgatgtgcaaaattttaaacataatttgattaaatacaaaaaataaaaaataaaattttcagccgaattaataccatatcaagaagtccgatagaaccaaactttccgaatacataaagagcaatgatgtcagtaatttcactgcctaaaaatataaatgtactactcggtttagagcatttaaaccctcttaattactactccctcccataatataagtcgtaactactttttttttcagatgttccataatataagatgtgcatgcatacaattaattagtacatcttctccattaaattatgattttttaaaatcctctacccttaaaatctctaattctattgggtgcatgcattttatttattagggtgatacaaattaggaggtcttggtctttgaattaagggtggttatgacttatattttggaacggaaggagtacagtcagtggtgggcaaacaaattaaatatacacaagcgtacactctaaaatcttctattttctggctgatgaaagtacaagcacagtattcagcatttttgccggctagtggatctgctgtgtgctggtgtgtaacttgatttaatttatatttagaataagagtcggattcgttgctttttaaatgaagggaagtgagatttgcctttggaaagcgacacttgttatttttcttccttttgttaatgaagagggcacttatcattttgctttaatttggaccagagattccgtgattgtgggagtgccaactgccacagagagttcttttttgttcttttggaatggcaacaagagcatgcatactgatattttaaggtagtacaactctgcatacatggagcaattaattaagtatagcatctctatgaactgaggtgacattgaacagactaattaattaataaacctaaagagagagagagagagagggctacaaatatttgtttgaacaagacatgctacatactctatacgattgagatgtgtagaaacattttttttccatgtattttgaggaacatgcacatatcaacatacatgtaatacgatgttgaattaagcaagcaaatttaagcatgcagagtgcactgcttagcacacactgcatgtgttgctagctagctagctccatctagttccctctcttctcatcatgattgacacttgataaaattaagcaagatttagctagctagctgagctgatctgatcaccatgcatgcatgcaagcaaggccaattcaatttcaagctcgccggccatacaccacacagcacatatacggtgggtaaaacaaaaacaaaaaggaaatcatacacaacattgattcattcatccattctcttaattaattgacttgaggttgaggagcatatatatacgtgcgtggcatgcatgcatatatatggtacggtggtcgacgacgacgacgacgagcctagcaagcttggatgtttgtcgatctcataattaattaatttggatgggtcgatgagatgagatcagatcttgccgatgaggggtatgccgacggcggtgacgatgagggtggatgggacgccgaagacgatgtgctgccagaaggtgaggtcgtaggcgttcctgggcgccctcctcgcctgctcgcacactatcaggttcgccgccgaccccagcagcgacaggttccccgccaccgtgctcacccacgccagcagcagccacgacgtcgtcaccgccgccggcgatatcagcgccgccgccttcgccacctcatcacccataagaagcactgcatgcatgcgcatatatatttttgtatgttaattagttatacttatatggagtagtatacattaattctggattaatagaatgtataattacccgttggtacgtttgatgcgaggttggagaggaggaggatgatgacggagaggacggagatgccgccgacgctgttgaccttggagtagggggccatgaagtcccagatggctcccgggaggcccgtcttgttgaagccgctgacggtgatgaacatcccggagaagaagacgagcagcgagtaggacacggtgtccaggcacggctcggcgtcgcggaagtcgaccaccaccagcgccagcgccgtggtgatggccgtccacgacatgttgagccccaccatgtaggccaccaccatccccaccgtcaccacgtacgcgaagctcttgaggaacagcttccgccgcgcctccgtgcactgcatgaaccatgggtgcttggtcgttatgttctccgacatctccagcgacatcatcgtgttgccgttgccgttcagctgcggcgtgctcttggccgacgccggcgacctgccttcctccaccgcctccatctgcttgccgtcgacgctgagctcggcccctccgcccagctccctccagtacatgcagagcagcatgaccatgttgacggccatcccgacgagcatggccgggaggattcccatgaggaacttggggaaggtgatcttgctattgaaggcgatgaccaggttctgggggttgccgatgggggtggcggcggagccgatgttggcgctggaggcgagggcgaggaggaagggcttggcggggaggttgcgctcggcggcgagctcgaggacgaactcggtgaggacgacgcagcaggtgtcgttggtgaagagggcgctggcgagggcggtgacgacgcagacgcggcacatgaggtcgcgcccgccctggctcttccacgccagcagacgccccaggtgcttgaacatcccggcgttccggaggtagctgcccaccaccatggtggcgaagaggaggcccaggattgggaggtcgatggaggcgtacgcgtcgtcggggctgatcacgtggaatatcaccatcagcaccgcgctcagcagcgaccccgccgtccgcccgatcggcaggaacggcaccgacgggaacaccgccatcatccagaacaccgcgaacgcgatcgatccaagcgccaccttgggcgccgacgcaagctcactcatcttcttcttcttcgatcgaccaccacctagcaggtaattaagtgtctgatcgagctagctagcagattatagctagcttagctacttgagctgatgatctctctctggtacgcgcgcagtagctaagctgctagtgcatgcgctgctgatgcttcctctcgcttcctccatgccggctataaatactactcgacgtactctcgtctgcctagctagctgatgtcatgaataactaatacgcatcaacatgtagctagctagctagggtttttattcatttctaattactactccctccgtttaaaaatgtttgataccgttgactttttagcacatgtttgaccatttgtcttatttaaaaaaaattgtgaaatatgtaaaactatatgtgtacatgaaagtttatttaacaatgaatcaaatgatatgaaaagaataaataattacttaaattttttgaataagacgaatggtcaaacacgtactaaaaagtcaacggtgtcaaacattttgaaacggagggagtaataatcacctctagctctgtccgaaagcaaagctagctaggtagcgtacaaaccctaagagtcaaagccatgagatcaaaagggtaatgtaaactaatcgatcatcccctctcgtcacactgcaacccggctttattattctcgcttcgggacaaattaataaccacatgtgtattaattaattttgtaatgcaaattagtgcatttaatttgtacacttaactgcatattatatatactagcatatatatcgcatacaaattcatatatgtacattatcaatctagctaattctctctcacacaattcacaagcatacataatgctagctctgcgcgtttctgcattgcatgcatgccaagtagaatgtctccgtcgatctacttgtggtctcactcaaaattacaaaaggttaattatacgacttaaaatggattgtcgtggccttccaaattaagcaagcatgattagcagtcgatcgagagttggcacgcgcgccagttagaagcgtcggccggccatagctaccttggttaatcgcgagctagctgcaatactccctccgtttcaaaatatttgacaccgttggctttttagcacatgtttaaccgttcgtcttattaaaaaaattatgaaatatgtaaaactatatctgtacatgaaaatatatttaacaataaatcaaataatatgaaaagaataaataactacttgatttttttaataagatgaatagtcaaacacgtactgaaaagttaacggtatcaaacattttgaaacggagggcgtatattaattcagtctcagcgttaataacaagtacgtatgcacatgtgacatgtaggattagatatatccatatcgatatggagcagttaaatgttgccattatttaactatttaattaaatctaacatacaataatcagcttgcacactgtctctttcagatcatgcatcatcaccgccgcgcccttaactaaactagctagatatatacatatgtgctgtatatatttatatctgttaatttaaatatctttctgttttctttggtttctacatgtgtgcatttaggcatctcacacacacaacaacaacaacaaccacaacaaaaaaattagcaaaacatctacaatacctaattagtgttactaaatctaatatttgaattattttaatactatatttattttgtgttaaatattaccgtgttttttagggcttgtttggttaatttgcaaccatgccaaactattggcaatgccaaatcatagacaaatttttgccaatgccaatctgttggtaatatttgtgtggtattagcaactattggtagcaaaccaaacattgccaaaatcactatttaaaatgccgatatttggtatggcaagtttaatttgacttcaaatcaaactagcccttaataaattttgaataggaaaaagatcaaactgttttataatatgaaggaacggagggagtacatcagtgcgctgctatgcatgcgccgaccattggtcggattaatttactccgatgatcagcaaagtagttagcaaggcaggtactgatgagcacatcatataattaacggtagtaaataatcatcaaattgccgatcaaggcgatataatgcatgaaactatctatgaacagactgaaaaaaatatctacaggtgcaacgcatatatgaagcatgcgtactctcgtatatgactatatgactatacgatatcgtcatatatcaaattaactccctgcaggccactcaccttgatacatgcgacaactaatagttcggtttgctaccaattaacacaaatcgacatacacatacgacgctagaaaaaagctaaggaattaattgtgtgtttcatcaaaagttcagatcataaaggctagtattagctaaagccgacgagtcagaagccactactaatattacatcatattatatccgctgcatgcaggaggctgctagaatgagccaggccagctgatgggattccatattcttaattttctgtaattttagcaactgcgacatgatcgacacgtcactaattatatttaactacttaaccaaaagcaggcatgataagacattcttcttttaactcgatcgggatatgtatgcatgcatggctggatcgattatcgctcggagatgcttacctcatatacatttatagcttgatcaatctcatctatccatggttatatatatatatatatatatatatatatatatatatatatatata

SEQ ID NO: 3417 - DNA, 3797 bp, Oryza sativa
cttctagaaatagctttgcacactaaatcactaattcacttgaaagctttttgcttgctggcgatactaacttgatattcatgacttgtttcatacttcttatgcacatgcttagctaggcttgagcacatgcttgtatctgtgtgatccatgtctaccttttgatgcctttagataactctcaaagctctcaaaacctaaaatttgcaagtttcatctcatttttatcttgcatttttgtctcttttgatcttgatggcatcattgacaaagggggagagaaatttgcacttattgaaaattaaaacttgctttaaatcttggtgaaagggggagtttggcacatagggggagcattcttgcatttgcatttgcatcccttttttcttcttgtcacttggtcttgatttttcgcgatttcaaaatgaccaaagttcgcttttgcaaaatggtttgctttgtgaatcaaaaatcaaattttcaaaattttgcttgagattgtcaatgttcccatcaagggggagattgtgaaaccatgtgtggttatagttcttttgtgatgggaaattgacaagtaccggatgtgcaagaagtgtgtgtgtggactaacgttggtcaggttgcgacatctgtgccaagacaacggttgtttggttcatgtgtgtgcaggtgatcggggtcgatcttggtcaacggcggatcgggactagactcagggaggagttgaggtccaaagcgatcaaggatgccgggtgacaagattggacacaaggttgcacacggtggacgaacaccgtgtgaaaaggtctttgcaacaggcttcacaaggccaagtgtgcaagcatcggattcgcgaagaaatcagaagggactgtgcaagtgcattgctgctacagtacttgctgtaggtagcatacatgcatgtacacgtactgtacttgtgcaaggaggagcttgcactgtactggttgctactagcatggctcggtggaaaagtcaagctagctagctgtgcatgtgcgctgtgattggttggcagggaggccaagccaatccagccgttccacgtggcccaagatggtgaatggctcggctcggcaggcctgcatcgtccaagcagcgacggcccaagacggcggcccatggcgcatgggctcaggaggtgcaggcagcttgcatgcgcaaggacgcgcgcggaaaaaccgtacgcggcaacccccgtttcgcgtgactcgatcggaggcgggtgcaggagcgcgggacccacacgcgattttgcaagcgcgcgcgggagcggctcagcgggacgcgtggcggcttcgggctggttgggcgctggcgagcgcgcgctgaggaaaaggagacggaacgcgcacgacgcggctgggcaacgtggcaagtttggattcgtcaagacggagagcacgcggattcatcagcaagaagaccatgtgagggttcggatcgatgaggtggcaatcatctggagcttttcctttgagtagaaggaacaatggatggaccagatctgttctgagttagggtttcgccctaggggtatttgagacaatgtcttaggggtcttaggctataaatagagagatggatgcaagggtggaggttgctccttttggtaatcattttgagatgctcggtgagagagtttccgtgtgagtttggagtgtgtttgcccgagaggcttttgtattaggattagtttggagtgtgtttgtccgagagattttaagtttgtgttaatgttcctctgaaggtgtatgtttgctcctagttgagcggttattttgcatcacctataaatgaaatgatttgaaggatttcatttttgccttgtccatttaaattccgcaatttaaattccgcttgcaatttgaactttgcgatgatgagttttgctctctctttctcacctcacttctagtttcgggaattccttttctcttcctcctctagtttcgggaattccttttctcttctttttctctcttcttttctagatccggcttctctaatagccgcgattctagtaaggattttgagaaatccggcttgatgagtattttcgggggcaagatttgaattgctatattcaccccccccccctctatagctgttcttggtctttcaggtttggatataatagtcctcacaggtgatgcagaaacccagctatcttcttgttgagatctcaattaattcttcatcaaatgatatttccttccctctcagaaagtccattgttggttacaaggcaagtgtgtggaaggcttggaaaactaggcatcaatgttttacctgcccgtgcagtgtttgagttagctcgtaacaataaagaagttcacttaaacatcaatgggatttcagatctctttccaggtcaatctttatgttccaagtgatgccatacttcatgcctcacctgtcgctccaaacgaagtaattaattgcaagaagttcttgtttgacagtggcaaacaccactgctactacactaccaacaatgccgctttaagatttatgcaatttagttatttttgttaagcacagaagcaccacttttaccattttgctcgctctatttgttagtgcagaggacaacagtgatatagtgagaagactcagaaattttggatgtcgttgtgcaatggttgggcatgaatttcttgatcatgattccataggtgaaagtcatattggaatatcagtagctgatgccactgattacaccaaaagtgagtccgatcttgttttgactcagcctgccctgatacctatttcttcagccgtgcaaatcagtagggaaatttgtcagatgatgaagggctatatggtaagtcaattttgatgcagttcaagagtttttgttgctggcaaggcatttgacgtgtagatgacaaaatgggtagtcagttgagatgcgttgcttttgttgcagatctacactgtctcatcaactgtccatcttgtgagtacaaacagtgattatgttttgaaaactacagcattatgcaatgctaacattaataattatatttattgaagttcggtgtccatgccattttacttttatggaacttcgacttaccaagtttcttgactctggtgattgctgcttttaattactgtgagtttcagctacaaaaggccaaccttactctacaatatatattgtttgtgcccttgtttcttttcatgattagtaagtattacttgttgcttttatctgatttcacgggatacactgagagttaagaaaatcattgctagcggtgctgcttttggtagctacattgttctgagtacagccatttttttcagggctgcaacaatgacaggcttcttttcagtaagcaccttttcttcttattaaaggagattattttggtctggaaaattgaatgagctgattatttaggctgtggacagtgcaaaattgaacataaatcactgatggacaccgatgaggaaattagagctgctttgttccttcagatgagcattgtgaatcaggctgttgcactgtttgcttattcagatgattgctgccatatcagatgtcctggacctgttgtaacatttgcctttatttttacccagatggtgagatcgttaacttttctctttctgtttttgccgagtccatccttcgtttgctgcttgttgatttcacggaacttctacctactggtcagaaccataatttagcaattggccactttgtttgtggctaggattctagaaataattgcctaactgttattttaccagcatcgtctaat

SEQ ID NO: 3418 - DNA, 649 bp, Oryza sativa
atagaacaaacttatcccctagagacagctctaatgggggtatgcatgtgggaaggcaggattctgccagctcgtacgttagcgcaagtcgtggtgatgatggatttagatcaaacaattcatctttcagttcccgtgcatcaggtccaaatgtgttgcaaggaaatactccaaaatcatttggaaatgggtttggtcagttatcattagggacatctgattcatccaaagagcttcttgaagcggctgaagaaacaattgaggaactccgtgacgaggcgaaaatgtgggaacggcattctcgcaagttgaaggctgatctggagatgttgaagaaggaatgttccgagaaatccaagcaacagactgagctagaagctgagctgtctgctgcgcatgctgaacgggattcctataggcaagaaattgaagagttgaagtcatctatgaaagaggtaaccacgcgacaaaaggttggaggaacctccaaatatggggactggatagatctgcagaaggaacttgaagatgatgtgaaatttctgaaagaatcaaatgcaaacttatccatacaactgaaaaatactcaagaagcaaatatagagcttgtttctattcttcaggagttggaagagaccatagaagaaca

SEQ ID NO: 3419 - DNA, 546 bp, Oryza sativa
atgatacctaccctcctaatgccttgtttagatcaaaataaaatttggccaaagacatgacatcaaatgtttggacacatgtataggacattaaatgtaggaaaaaaaccaattgcacattttgcatgtaaattgcgacacgaatcttttaagcctaattactccatgatttgtcaatgtggtgctacagtaaacatttgctaatgacggattaattaggcttaataaatttatctcgcagtttacaggcggaatctataatttgttttgttattagtctacgtttaatacttcaaatgtgtgtccgtatacttcaaaaactttacacccaagaactaaacacaccctaatataggcctttcggatcccctccccacctctgttttctatctcccccttctctgatatatgtatatccacatttttactaaaattttaagcaagtttttctcctagaatactacttcatctgtttgatatcataagtacgtccacaatatgtgttacaagatgtttttactttggtcaaagtcaaactacttaaaa

SEQ ID NO: 3420 - DNA, 717 bp, Oryza sativa
ttagaattagatctcctcagaacctctgaatcatcttgtgcttcagacaattttctctgagcttcctgttgtttttgcttaaactcaagcctttgagtttccatctctgcttgctggcgctctactttatctttgagattgacgataagtgatttagaatcatgtatctgcagctcgcttgactccttttcatttgtcatgtatgtcaactgagcttcgagtccagaaatgcgttccgatagctctatgttttcctgttccaggtccgatatatgtagctctaggtcagctttgcaactctccagttcagttacctttctttccagaaccttattggcagaaacatgggaatctatgctgcttgaaagcacaaggatatcttgccgcacctcatccaagcattttgaagaaatgctgctttctttacgtgatgcttccaggcattcctccaactgactcttctctgcctgaattttagaaataacgctttccatttcaactttggaacatcgcaaatcatcattttcctgctgctgtagctgaattttagccttcaacacatctgtctcaggttcactatccataccatttctaaattggtatcctcttgcaccactagtttgaacaccttcccctgccatggaatgggaactgtcaagcttctgcctcagctcagataactcaagatttctttgttctagttcctcttggcttttt

SEQ ID NO: 3421 - DNA, 1008 bp, Oryza sativa
cagacaaacaccatgtgggtataaaacatttgcgaattggaagcataatttaactgtcgtaaaactcaattccaccgttggattggaccaaatcctcgtacaagacaaaaccggcccacatggaaacgagtaaggcaggtcggagtccataggagagcacgtcccaggcatggtagggggtaacattgaaccaacaacccttcacaacaataatagacgacggcgatgaacaaaactaggacgactctttcttctcttccacctccgcttccttcttctcctcaggctccttctcctctgcagcctcctcgaacgtctctccagggacaagctcagggacatcatcgtcgtcgtcctgagcgttacctgcgctggcaccagcctcagcaccgggtacctgcttctggaactgctcagcaagcctcctgaggttgtccaggttatcaggtcctgcagataggtaattaagggtgatcaaacaagagtatgtatatactactatgtgagtaggacgtacttaaagactaatgcttggttcagatatttcaggattagggcgaggtgtgcaatattgaactcatattcagtaaaaccaagaaaaaagtctcatacccaactggttgatgattgttggaagcagatcttgcagctctgtcaaaattagaaagccaaagatgagaacaccattatgcaggattgaagaataacatagggtcaacgacgcagatgcaaatttgcgtttaaagggtttgttcatctcaagattttttgccggatgtaattcaacacaaacaagagaagatatttcaacctattcattcatgttaaccactaaacatgaggctacacaacaatcagtacgcaagatcttaagcaatgacttactcttcgtctgtggtgttccactcactacccatgtatttgcaccaatggatgcttgcactgcaggaaggcaagaatagaagacaatttcagaagaaaacagggagcgagttatcaattctatag

SEQ ID NO: 3422 - DNA, 9705 bp, Oryza sativa
  unsure (1)..(9705): unsure at all n locations
tctctctctctctctctccatccacatctctgtctgtctccgctttaaagctgtcaccttttcccatctctctctctctctctctctctcccgtgctgctctcccttctcctctcctcaattaccacgccgcagccgcagccccccaaccctagctagtacggcgggcgacctgagggggtagctgcctacctctatacctgctatctccgttcgatccgggtcgggctcgtgctgctgggggcgggggcaatcaatcggcgagctcggtgatccatggccgtggctgtggggtggctgtgagggtgcccccggcggcgctcccctccgcgcctgccggcgagggggctcggactgaaggtcgccacactctaccgccccacccatgctccctccgcgcgcgatctaagctaggcctaatctagggttcctgattgcttttccattttcgcccggacggaccaaactactactgtctatctatctagcttcttctgctgcttctcgtgctgctcctgcatattttttaaaatttttatttcatctcatttccgggttactctcatttatcatctactccgtaccactattagccaaccaccccattttcccccctttttttcttgagatttttgtgggcgaattcgagtaacctttactccccccattctaggaagcggtttcttttagcatggctttgtttttttcttttcctctcccgctttcttagttaatcaactttaccatatctgttgcgtgcacttcaatccctgtcatttgtatccttcccctagattttgatgctcaaacgattgttttcaccaaatgctgagtcaaaagaactctccttttcttttttcccccagggatctaggcgagctgaaaattgaagtgcaggcaaggagataagagcagcgtccaaattgtgagtacttcattagcaggaggtagtggttgtgcttgcttggctcctttgcaatttggctttggcgaggtagcaatggctgcggcagtggcaatgcgagggagtagcagtgatggaggtggctatgataaggtttccgggatggactccggtaaatatgtgcgctacacgcctgagcaggtggaggcgcttgagcgggtgtacaccgattggcccaagccaacctcctcccgcaggcaacaactgctgcgtgagtgccccataactgctaacattgaccccaacagatcaaggtctggttccagaaaaaaaggtaataataatagaatcgaatctttctacggtagttttttggacaaaaacttgttatggcacgtttccctgaatgtttcatctgacaactgaaataacaatttcgtttagttccttttggggaggctatcggtcctaatatgnctgctttgctgtggcgatgataagcggaattttgatatgaggggagctgcaatgccaattgtttatcatttcatttgtttgcgcaccagcaaaatgtagtataattactttacctgacggctctgcatgtatatgattttttcgtttttcatgttcgctgaagtggatacttgtgcttgtgttgctctaggtgccgggataagcagcggaaggagtcttcacggcttcaggctgtcaacaggaaattgacggcaatgaacaagctacttatggaagagaatgagcgactccagaagcaggtctcccaattggttcatgagaatgcccacatgcgacagcagctgcagaatgtaagctcttgatgtgctggtgctgatgttgtcccccatgcataaacatgttctcactgaaatgctatctattctttgtgcattttgttatacgcatggcatgtccggggatgtgttgttctgtactgtatattgtagattagtataactttaaaatttgatgtatgtgtagctataccagctggggccatatgcgtcagttcctttagaattgatatatgaattaatcctcagaatgtccatgagatcgctagatttcactgataacaccacttgcttgggtgcagactccgctggcaaatgatacaagctgtgaatcaaatgtgactacccctcaaaccctttaagggatgcaagtaacccctctgggtaagtaaatagttctgagtgactcaggtagaattattgttggatggacttgctctttcgatatcatgctatcttaactgccttttatcttgttctaggctcctttcaattgcagaggagaccttgacagagttcctctcaaaggctactggtacagctattgattgggtccagatgcctgggatgaaggttccatgctagcactgtttgtttttttgttctgtgatttgtgctaagaggtttttacttgaagtgcttactacccttttgttttcatgatgtaagcctggtccggattcggttggtattgtggccatttcacatggttgccgtggtgttgctgcccgtgcctgtggtttggtgaacctagaaccaacaaaagtaagtgttgtagctatttgggtacatgggtttggtatttttatgttacctcagtattccctgtctgtatgttttctgaagcatctattttgggtgatagcaagcctatccaccagtcacttagttttctttgtgtgcaaatggttagaaacctactacctccatcccaaaatatagccaaaagttgctatatcaaaaatcctatcagaagtgcctcctgaacacattgctgccgagtgtggaattaagacacactgtaattcactttaataaatactaaactttgaagatgtcactttagaggtctaatgatttcatgtctgccaactgttatcatcaaatttaatcgtgaagataagcagatatcttgctttttttgttactttattcaggagattttgtgtctcatagaactttgttacgtaggtggtagagatattgaaagatcgtccatcttggttccgtgattgtcgaaacctggaagtctttcaatgattccagcaggaaatggaggaacggttgaacttgtctacacacaggtgaacactgtttcatttcacatggtataatggtatatcctcagtgttctctatcaatgcatgtggttcatgccatgaacattattacttgtttttgcttacagttgtatgctccaccacctttagttcctgcacgagatttttggacgttacggtacacaaccccaatggaagatggcagtcttgtggtatgtatgaacatgaacactgttttcaccccacaatgagtctcaatgtgatgttacccttgctaatattcctccatctccaaggtctgtgagagatctttaagtggttcagggggcggtccaagtgctgcctctgctcagcaatatgtgagagcggaaatgcttccaagtggatacctggttcgcccatgtgaaggtgggggatcaattgtgcacatagtggaccatctggatcttgaggtatttttcacacttttgtacagttgaaccatgttttttgtcctttgatgtaggaccatttttgtatcctgtcaaactaataatacaatttggtttaatctttcaggcatggagtgttcctgaggtgcttcggccactctatgaatcttcaagggtagtcgctcagaaaatgactactgcggtaagctgtcgtgaaatgatattcagctcaaatttcattgatgtgattacaagttcatcatttcaagtgaaacttgtttttaatgaactcttcaagtttcataacattggatttttttttagaaaaaataaaataaaaatccaatattatgaaacttgaagagttcaagctaatgataaagtttgtgttttggataaagcttataatattggatatgtggtgaaaatgatttatatgggttggtacaactaatgataaaatttgccttttggatatgttgaacagttcattttctgcaatctactttatactaaccttttattgtctatcctatatatcaaggcactccggcacatcagacaaattgctcaagaaacaagtggggaagtggtgtatgccttggggaggcaaccagcagtgctacggacttttagtcaaaggctgagcaggtgatttttttataaattattactcagcaattaatatttttttcacctgtttaatctaacaccaatattatgcttttcttagaggctttaacgatgccattagtggtttcaatgatgatgggtggtctataatgggcggagacggtgttgaagatgtagttattgcttgcaactcaactaagaaaattaggagtaacagcaatgctggcatcgcctttggagcccccggaggtattatatgtgctaaggcatcaatgttactgcaggtaagggtaatcattatcagctcattagggtgcagatgacccctctgtatgtagcgtcattttccaaggaagggaaaaaaaaacttttttagtgattcaacatatgcaagcacataaataaattgctcggctgtattaacatttgatagtgagatcctaatgagatttttgatgttttgcctggtcctacacctgatgataatttgtttgatttatttcattactttcttttttgcggagaaacttatttcataaaactgctgtcatcgctggtgtgaatataaaagcagtgtcacaaaagttttttcctcagagacattgaacacacagaatgagttctttggaactagatttccatgttcaaaacttgtagctgttaaatcatgttaatccatacgtcttcttttccttctttggtatttcagagtgttcctccagcagtactggttcgatttctgagggagcatagatctgaatgggccgattacaatattgatgcatatttggcttcaactctgaaaacaagtgcatgttcacttactgggttgcgacccatgagattttctgggagccaaatcatcattccacttgctcacacagttgagaatgaggaggtatattttcctgaatatggggaaagtctgttttttgtgcgcttgttgctgttgaactgatttgagtaatggttatagcaaactacttattttcattcttgctgatctgtttacattgtcatagtggatagtgactatctagttaattccattgtcggacatagttttgttattattgatttattttcattaacttgaaaaaaaaacgaacagattcttgaagttgttcgccttgagggtcaacctcttactcatgatgaagctcttctttcaagggatatccacctgcttcaggtaagacactaaatgccattgctatgttttttgtctgtatatgtactgtgttgcttctcaattgagaaaactagtagcttttaatacatgtaatttcttgcttaatatgttgatcattgtatctattcgtgagcatctttggctctatttcatcttatcaaattattgtagagttaaatatgctgtgtaacaactaccaacccataagcctatctttatccgggcatattaagtttgttgctacacccttttttcccccttcgaagtacagtcaaagatgcaaagctttttatgaggcttgtaaatattccagtttgctaatatacccttatcttttgcagctctgcactggaatagacgagaagtctgtgggatcctcctttcagcttgtgtttgcaccgattgatgatttcccagatgaaactccattgatttcttctggcttccgtgttataccacttgatatgaaaacagttaagtgctgccaaattccaaattacattatccattacccttttgactgttccctaggtccatatgtgctttatttgctgttgcattaatctgtgatgagtcgtgaatgtcttttagcttttctaggaacctcagttttattcatttgttcagtgagttaaccctggccaattttaactcttcataaacaattgttttggttgttctaagacaaataatctcttggaaatgtttcatttattctcccctctagtccgctttaaatgttccagctctgtccacagagaccccaaaaaaaagctattttgtaaactcccattaaattgagaaaaaaaactgttaaattggttatttgcatcttgattgtatcaccagttagaactaatagaggcatttggtttcaaatattcccttggaaaaataaagcaagtatgtatgaaccaagcttgctaaaatgtttatcctttttgaaccagaggtagtactatatttttggtcggctgccactaaatttttaggctctgtgcccaaaagtttaaccgtcacatttcatgcaggatggtgcatcctctggtaggacattagatttggcatctagtcttgaagtaggttcagcaacagctcaagcctccggagatgcatctgcagatgattgtaacttgcgatctgttctgacgatcgcttttcaattcccttacgagttgcatctccaagacagtgttgcagctatggctcgccaatatgtccgtagcattgtttctgctgtgcaaagagtgtcaatggctatctctccctctcaaactggtctaaatgccggacagaggataatctctggtttccctgaagcagcaacccttgctcgatgggtttgccagagctaccagtaagtgtactcgtagtttcttcctgtgcagtagtgatgatatttaataagaataaatttgatagttttccatgttggttgcaagctgacaaaatattattatgccgtcgctcagttaccatctaggggtagagttacttagtcaatcagatggagatgcagaacaattgttgaagatgctatggcattaccaagatgctattttgtgctgctcattcaaggtatctgatgaattcaactcgatcaatgttccatcatttgatctaatctcatttagtctattaagtactattacagaccactcgatcaatgtttacccatgtattacagaccactcgatcaatgtttacccatgtactctaaaacttatcgcttgtccagctgacctacaatcttttcatgcatttttcaatctaacaaaaactggctctgttaataataacctaatagttagaaagaactggctctgttaataatgacctagtaatagttagtacttagtacagacctaacgagtgcttagaccctcaaacgtgttttcaacagggtgattttgctatatttttccctttgagtaaatgctctcaattttttgtaaggtttacacttttgacactaatgcgatcatcggaccacaatatttgctatcttgtatgacagaaatgttttggtttctttcaggaaaaaccggtgtttacatttgccaacaaagcaggactggacatgctagaaacttcccttgtcgccttacaggacctcacattggacaggatctttgatgagcctggaaaagaagcattgttctcaaacattcccaaattgatggagcaggtagaaactccttttcgcttaactcacacccttaagtgcatcatatttcagaaatcgctgagttgaaataaattaaaattatgttacattgcttaccatttttttccctgttttgtgtttagggccatgtctacctgccatcaggcgtgtgcatgtcaggaatgggtcggcatgtttctttcgatcaggccgtggcttggaaagtgcttgccgaggatagcaatgttcactgcctggccttctgtttcgtcaactggtcctttgtgtgaccatcccacatccactgcgaagtgaagattcatttttgcttgttcaagactgttttgcactagatctagacctgagaatctagtagtatttgcgaaatttctcgcttatgtaaatgtaatctcgctcccattccatcaagtacccaagtacaaggcagtggccaagtggttttagttgtagggggatcggagcaatcctgacggttgggtacttgggttccttccagcaatgtaaaatcggatcctgtagggcgtcgaaaactgcattggcaagattcttcgaaatgcagaccaaatttagctagtacatcgtaactttggcattagccatttggctattgggtttttcgcttaggtgagatgcagcagatcatcaactgctaccacttctcatagtgataattaaaatgcaaagatgcccccccccccctccccccctgttcagtcactaacgagatgaaacttgtgcacgagtacgagactgaactagactggccgatacattcagcgacaggatttctgattctgaaacgaagggcttgattggtttgataccaatttattaccctaccaaatttttagtaacttcaatagtagcaagtgtatgtttggtgtgctaccaaatattacccacaatagtccaattgaatgctacctaatttggtagtgccaaaatttgccaatgttttggtactacctgttttggcactaccaaaattttggtagtgcaaaaattagctccaatccaaacaaacccgaactatcagggtaacaaacaaggcaggataaaaggcttgggctagctaaaaggccacaatcattcagttagccttgatcatgagtaaaattcctgtgcagtacttaaacttgagagaagatattacttaggtccgtacacatgaaaattacacgtctagatccatcatcttaattcaatgaatcaagccagttcaaaccacgtttgaccagggatgaccaccgtcgtggcgctccacttaggcataacttttgtacttatcgcctccacacctcagcgtggcggtaatttagcaattagcccctcattgctaccgtatcatcccaaaagcacatagtcccctcgtccctcctatcccccctaatacgacgcttccaatgcaaggtgatttgggcatcgattcgagctccgtaagtagtggcgcccgataggcatcacggtacgcaaatccatcgccggtatgtatccacatttcgcccctaccgccgctaccgtctcccgccgctatgtatccacattttgcccctaccgccactaaatcgccgtctcccaccgccttcatatgctgctcccacagttgcaaccctagccatcgggtgaaatgtaaggggccgaatgcaaaagtgatgcctacatacgtcggtggtcatctccagttaaacgaggtttggactggcttggttcattaaaccaagataactgatcttagatgtgcaattttaagtttacggatctaaattgacacccccttgcactcaaccaagataaaccaagtttgaaggatcggccattcttgatcaatcagctagcagtacacaacatcacatgacagattagcagtaataaatgtaatggcgactgacaagcagtatgatgcaaagagattaccacacgaacacacagaattagcaaggcaatctgaatggtctcatatttataaccaagaaaatatgatatccggtggttcttcgaatctttgaggtattacaaaactgcaatcaaaacataaaatggcttgtgtttgtccgcgagtgattacaaggaggaggcgaagcgatcacctaggcgcggtcgcggcggccgtaggggaggcggccggccccatactgctgcggggcggaggtggaggcttcggctggcccacgaccccggggaggtcggccatgccaagggaggtgagcatgtcaagggtctccttgtcaacgcggatgtcatcaacctcgaccgccaacttgtccgg

SEQ ID NO: 3423 - DNA, 3392 bp, Oryza sativa
tttcgaaacggagggagtatgtcacaaccaaccaatgtgcgtgcgtcccttttttttattagacgcgatcgatcgatcgatctaatactgttcagtacagggtactacatgtttacctctctcactaggctggtcattgttaccatttattagtattatatatgatcttcagggtccagttaatcgtatccatctttctttgtcagcttcatttagctgctgtcctttgctggattcactcactatatcatcatttctatcattattagtggtatccaatgtctcgttttcttcttaaaaaaattagtggcatccaatgttggtttctgcatagtattattatttacttaattaatgttcattaacatcttcgcggaaacagcaccaaatgattctgcatttttcaggaaaacgaaaaaaaaacagaaagctggattactttatacagctgcacttttcatgctcatgatctgaagatcaaatcaggtttccttggaggaagaaggtgcagcttcctgcagacaggcaggagggaacaccggaatgaaatgcatgcagaattgcagagaactaattgcagatccataggaattaagtgaatttggccatgccccatgatccatagtataggaagatcggatgaggagaggaaggagtggtggtgtgtccccctgaccaccttacataccctacggtttcagtgacgatccaagttccaaggccagaaaaattcaggccatatcatccactgcctgcttttactcctctgtttcagtgtcactccacaacaagtcggccattgttcatcttcttatctgattctgattgatcatccttcattttgcttggaccttgtaaactggagtttagtgatccaagagatgcagatcagttcttcagtcagtcaggttctggaccaccaatgggaactgggaacaagaacatgtacctgcatgcctcttgtctgaattttcaggcaatgatcgtcaacatttaggttaacagactattcaagttggtgatcatcgtgtggtaaaaaagctggacacatgtcagcaaacagatagcactgtaactgcacaattgcctatgacgatcatcgatcgatctcacctgaacatgcaggcacaagtggatgtaatcatcatgctaattcttaaacttcttgagaagcaggtaagaaagagaacagtgcctgagaggctgagacaaataacaatgaggcacctggttacaattctgctacactgaaatgtagtgcctcgttaaataaagtgctcatcaatcctcattatacaagaagattggatggatgtcatgaaacagaaaaggggcataacccttgatattgtacataatgctttttcattattacaataaataaataatttaggagagtatggtgactgtactactaactaaatctcttgacacaatcacactgttctcagggagagggaaaaaagagctaatacattttttatcaacagttaagctcactcttgctggaatggatgtaatcttcgggtgatccgagtaaccatattaacaaataacgttcaccctccgagtcaatcaagaaaccggtataccggacaaaaaatagacaagatattacacaaataataatcaatcagttaaaagggcgttatcttgataaggtttagtggtagcctttttctccagggagaagtcacagactcacagttcaccctatcaccaagaccttcagtcttttgcagctcatgctccagtaccaactagcatagtctggtgcacatcacatctgcttcagcacttggcttttgctctcacatgataacatactgtcatggtgcagacatggctctggttcatatgatgtccatctgcgaaagtagaagggttttacactgggtactagctagcgagttcagttataacagattgaatgataagaggcattctgtccaccatggtacacaatgggatcccattagtcacgagctcggatcagcttcacaagaaattttggcttacgcatccaaactacaagtatcaataactggaagcaacctatgtgacaagaatgtatacacaggtacctgtgatgtcagtctctgttatggcaggcaatagttctacgacaacctagaaccaccgccctcctcctttcttggtagctttcagttccatcactaatcgttcccgctgagcctctacctctgcatactgcaagctcatgttgagtaaccgctccttcatatctcttagctctccttctagttgcaaaaccctttcgttactactctcattgccattcccagcagcacactgcccatcaggcatgggactgtacagaaaaggaaaaataaaaataaaacaagaatatcatgatgttctgaatggaaggcagcagagattatcagactaggtatgaaaaagatttgccaaaggagatatgctgtccaagttcaacagtattgatgatttagcaaaccaacaaaatgaaacatttaacatagtgtaaacatatggcatcaagatttatgttcattaacattgtgtaattcagcttaaatatcaccagcagcccaaacacatcatgtgggtgtgtgtgtgtgtgtagcagactgcagatgccattgtaagaatatcaaattttgtttcaaaggttagatggataactgtaacaaaggaaagaaatgttcttctatgatgtgttgttctaggttgggtaatacataacaaaaggcatgtaagtttggagcagaaggaatacctctgctgttgagctctgtacatcttattctcctctaaagcctctgcaagcttagcttccaatacttggatcttcaaatgaatgccagattcctcatcaactggagaaccaccaatatcctgcagttacaaggaaatatatggcagacagacattaaaaaaaccaataaaatcaacaaaaaataatcatgataagcactttttagggttaacctgctttccaaggtcctcttctttgatgtgggccatctgctcgagctgacttgtaaggtcctcattttcctgctcaagagattgtatctttctctggtactcactatttgatctcttgattctattaagttcattctttagctctgcttcatgtacatgcgatgcttccactgcagatagatcactctccagccttacaagctttgcctgcatagctattctgcttcgtttttcttcttcaccattgtccaaagtctcctgcatattggacattttatctgtcagcatagccttctgtgccttcaattcttcacattcctcagtaacagaacgatgtagctcctccagttttcctctttcgaacttagcctcatcaagagaacttttaagtttgagaacttcgtcttgaaggctcatta

SEQ ID NO: 3424 - DNA, 900 bp, Oryza sativa
ttgcaagcaagcttgagcataatgcatagcctatcacaaggctgctcgttgcgtagtactgtttcgccataagagtagagtgaaaacctgcaattgcgtaaatatcagcaaaatattcgtaaacctgcaattactaatgcaggatgtttgaatgtgctatattttccaagtattttgtggtcgatctggctcctaaagaaaataaaaacaagagtatatgtatatgctttcaagtaagtcattcttgactagtaattataaacaggcaaggacatgtgatgatgtgaaatgactacctggctactgcaaactctcaagatatccaatatatgcgaattagataaagattgtttacaactgattgataaaataaatttaggatgggccatgctatttcactttgcttctgcatgtaggactagcaaatctaaggcattaaaatcaaaagtaaatcagaacatgtcatattgcttggcagctgcagagttgagaagaaattttttctgtctagagctcacatccacatgaatgaacacagcgatgccgtgtaacaaaacaacaactccacactaatcacttcatttcccttgtgaagaagatccaaataactcatcttgtactggtagacagtattaaacaccaagatgaacacaaaccccaactactcaaattaatgcacacaattcggttttgttcccttcattgcatcaatcagaactgtagaaagaataacccactagttacagccattggaaaccgcagaaaatctccaaaattggcacattttaccactgccgacaagccgcacaatagcaaagagaaaaaaggaaactatcaacccacaagaaagaatggcggcaaaagatcctatttttcggcaaaaagaacccatccaagaaa

SEQ ID NO: 3425 - DNA, 783 bp, Oryza sativa
aaattaaataaatccctaaatgaatatacaaggtggtggatcttattgttctactcaagggtgcacctgcgcacattctacgtacatgcagtgcataaatatcgtacacacatagtatgatttaatggtttgtgaaaaattaaaaccctattatgatgaaagaagaccagatttaactactatattttctaatcatattaaatatatacaggaaaaggtccaaatatccctcccgctcagtggcggatccaggaaaaaaaagtagtgggggctgaactaactaagccagcataaatcgaaacatctcacatataaattggctacatgtatagttcaaagtagacacgtcaaattaatgataagtagagaattttgtccataccaaaccaatatccaatagatgatgtttcaatgccagtcacttattattcttcattagtaatctgtacaaagaaaaaaaaagggcaaatgaacgattaatcgaaaatgacttattttgaattcaaataatttagagacttagggagagaatggaggcatggagcataccactaatttctgttgaggcactagcattcgacgctttttcatctcttcaaagtgttggatgattttttcatcactaatacttctaaaaatctgcttctcagtgtagcaaatcatcaagtcattgagccattcatcccccattttgtttcgcaaatctgtctttataagagacatagctgagaagaccctctcaactgaagccgttgccaccggaagtatcaatgataactcaat

SEQ ID NO: 3426 - DNA, 744 bp, Oryza sativa
agccaatcaaactcattgaaccaagttttttgaaaggatctccactcaccaccttgccatttacgaggaaatatagtaatattaggttgagttgggccactcaatgcatatgccctctttacttgatctctaatttcaggtggataaacttcaattggtttgcgaagccctggatcaccaattatatctgattgactaaactctgccctaggcctcttcggctgacttaaattctcggtgctaggtgaaggatctgtgttgcttgaactagaataatacgtgagtagtgttctttttgacatgttgacaatctaaaaagtaaaaaggtataggaaacaattataagtttctgtcagagaatcactaacttactgaaattgaagtcactgaaaatctgaaattgaactcttgacacaatttatattcagagaatcagatgttagtagtttacccaatggccaatgcaaagtagcagtctagcagactagcagtggcctgcccggctgcccctgtgctgtggctgtgcccaactgcccacggcgttgccggcgccgctggccgcttgcggcctgccgcctgcccgcccgccttgcggcctcgctgggagctgggcagctggcagtcgagtcgccggcgcgccgcctcccctacagcgcggcggcgctttcccgccggctggcccgcgcggccgcgcccgccttctgttcgccctgcccgcctgccttgcggcctcgctgggcgctg

SEQ ID NO: 3427 - DNA, 2378 bp, Oryza sativa
cttagaggcactttaaaaaagtctaataagtgtcttatggtgaattatctctacaaacgaaaagacattttataaaatgtctataagatggtagaggcattttctagagacattaaattataccacaaacatatgaaaccagcattttctagagacattaaattgtaccacaaacatatgaaaccagtctaaaaaagagacattttataaaatatctataagatggtagaggcattttctagagacattaaattgtaccacaaacatatgaaaccagcattttctagagacattaaattgtaccacaaacatatgaaaccagtcccaaaaaggagaataaaatactttctttgcttttgtcaagccttgaacacaaacatatgaaaccaagtctaaaaaaggagaataaaatagtttctctgcttttgtcaagccttaaacccatgacttcttggagaaatcttttctacctttaatgcactaaccaactcaactacatgtcattacttgtatgtttgtgcctttagttacttatatttactccttcagtatacattatcattctaagaagtgtctttacatagtttaaaatgtctcaagaaaatacttttacatatcagtgccgaaatattgcctctacaagataaaatctaataaaatgagctgaaaatatctctagagtaaaagttttctaggtaatttttaaagtgcctctataaagtgtctctacactataaaaactcatgatcttagaagaaatttgcaaaacacctctacaaaagtatctctatatgaggtttttgttgtagtcctcttccacaaggattgccaacatggccaacttgcattagctaaggcaccactcgagaggacaaacttctagaaagagcatgcccaaactgttgaaaaaagtttttgccaaggaagcctcctagaggacgtctctagggaaagaagagacgataagacccgccgcactcgttgaggtcttgaggagaaccaagacaaggtttttacccagcaacccactagagggagagagacgactcgacaatgcccctaagagggaaaacgacacctaaagcggtgttgttttcatcccagcaaggtcgggctaggttttacacctattgtccgccccttgccgatccacaactatcgcttcattactccatcaccggccatccttcgtcagcgggtggacaccactataccgacgcctttcgtcggccagcttccgcatgcctctatggcatacccattgtcaccggcctctctgttgtcactgcgtcaacctctcgcgccattagtcgggctggcttccctaccgtcacctacaccgacctcctaacaccacctgcgctagccacccgcggtcgccgtgccgattccgaccagaaacttataccaagtctagctaaaacttgaatatgggcaaacaggtttcactataaggaacctaaccgtttgagctactccctccggttctccggttctataataattgacgttttggataagcttaaggtcaaacttttataactttgaccatcaataactttaaaaatatttagtttaaagaaactataacaacatatatagatttgtctgtcaaaacactataataaaagtaagcatgcatttaattattgcatatattataatagaaaaataaggtcaaagatatattttgtagaccgtgtcattgtctaaaatgtcaattaaaatgaaaccggaagaagtatgtttactctgcatttagtgtcctaaatattgaaaacttttgtatgactcccaaaagtggtttcggatgttggtactgtatatggaaattatctctagctacaaaagaagtagtccaatctcctcctattgcttaaggatgtggcactgtttattgttgattaaccatgcgtcgtcgtcactcgtcactgctcagtgctcacaaagaaacctcatataaatcacaaagactttcgagatttgtattggaattaattaatcctctacttgaatacatttaattgggatctggaacccagtgaagaggggcgtgtcgaaggtgtccatggatcgagaatcaatcgatcgagaatcaataaaggccgagactgcagagaatgataactttatagcttgggaagcacacaagtcagctcttgtaagattaatgatgtatataaaaaaaattagatataacaatgtttaagtgttacaccttcatcagtccacagtttgctcttcagcttaccagctacaaccaaaggccccatcggtaggttcgtctaataaaccaaagcaaaaagttaaaatttgaatttttaaatttaattttaaagttgattttgagatattttcaacgtattgtatcccttgta

SEQ ID NO: 3428 - DNA, 12053 bp, Oryza sativa
  unsure (1)..(12053): unsure at all n locations
taatttggagctagtagtggactatactattaaacttgctcttatagtgagtacagtagataacgtaagcgggttgtacatgttgtaacatcggatttgtgcttatgtaaaagagagaagaaaatcaagctacatatgtacagccagctacaacatgacctctaataaactatgagagatgtatggattagtttttttttcgggggattagttttttttttcggggaattagttattaatgatacaatatatatttacaactaactattgtataataagtggctatagataatgtttagtagtttttaaggttaatagctgactatattattaaacttgctttaaaggagactcagacgatcaccccattgcctggtgtacggtattgttacgtcgagtcgagagcaagtcgtcttctttcaagttgttgcattgcggtacaaaatgggaaaggtactgaaactacttcgatttacacggtatacaaggttgcaggtggcagaaaatgaaaaccctacaacaaccagaggaccaggctgcttgtttgaccattggcaccgcacattacgtggtttcatttgcacatctcaggggaaaaaaggcgcaaattgacaatgcagatctatgatccttgggaatacagcaactttataaaaatctagtagtaccaggaattactccaatatctagaaaaatactccctccatctcaaaaatctcaaaatatagcaacctaatttactggattagtcataccatagtgcaacgaatctgaacaaagaacctattcaaatccgttgttaggttgtatctaatctcgtactataaagctatattttggagtggaggggctccaatatttcattcattccagaggtggcataaccgcataagctacagcagtgcacaaaggtctcgatcacaatacatacacggctacagcagtgcacaagggtctcgatcacaatacagacacggccagaacgtcgcagtgcaggataaggtaacaatagaactagatattgttcgttgtcagatgattcgtttccccagttcagcttggtgaaaaaacgaaaacggtcgcagtgggtgaaaagaattctagtgcttgaagacgatcagcacggcagtgcagttgtccttgcacgcctctcacgaacagcttccttcacgagccgccgcactgccagagtcgctgacgaggtctcctgcaatgattgacggttgaacaaagttttagggttgagaaatttggtgttcatatacttcatccatcccaaaatatagcaacttaaaataaataggccccctaggatatgttttctccgatcctaggttgctatattttggaacagagagagtaatgctttgcggaattgatcgtattaaattcaatcataatcgggtcacatgctttagattttgtgtgccagcgtaatctgatcataaatgctttcactacggtagataattgctgttagatggagtagtggggaaaggaaacgaatgcacttggagatgcaaataacagaaacaaacagcaccttcaattgattctgcacaaattcaacagcatcacctggtccaaatacctggcacatccatttacagcacatgttaaaacaacacggaaaaagtatattactgaagcagaccacaagaacgattggcgataaaggggagaagagaaaaaggacgtactccccataagccatcacacccaagaataataaaatgatctttcctcgttacttcaaaggagtggacgtccggtgtagcaatcagcccaacctgcagagtggggcacataagagatcgtaatataaaaatgtagcaatttcctatggctaaagcaggctttccaaaagcatgtcaaaagaccataggatttcacattttatctttgaaagaacttcacaagaccaggcatggccagttgcccaacagaattcatacctactataattcaatatatgcaaatggcacattgttaggtttgccatatcgagaaagccactgttagtttatccaattatccagacaaagagatgaacagagaaacagggaaatatactagtatcataattttgtgaaggcttgcagcctcgcaaagacctaaaacatgctagcaagcttccacaacgtctgtttacaacttaaatccccagcagttaatagggtcgaacgttagctgaaacaacagtgctagcatatagccagaaatctgacacttcatagttggttcaaaaagcaatgtggaaatgtgcacaactgcttatgagaaatgtatctgcaacagcaaaccttcttaaactgacgatcacccaaagctctagatacttcaatgcgaccttgtaatctgccattagggccaacagatcctccagcctttgtagggaaaacatgttaaaatgaatcaagagtcaacacaaatcaaaatcaaaatcaaaatataatgatagaactaacaagctcatatagtaattgccaattcatcaaaaccacaagggactaaactaaataaacgacatgaagcaaatcaaaaaaggatctgaaaccttttgcaaagcaataaatcaagaaatgataacatactcataatataaacaagctaactgaaaccacataaaagtagggtaatcaccggcatatgattgaagcacaaatgcattaagttgttcaaggaataacccataatgaaaacggatattaacaacgcagagctacattcatatttgcagttgtgtagcataatcagattaggtttaacaggttacggtgcatgcagcatgattacattggaaaatctagagcaagaaaggacttcattatattaaataacagtgcacaaaacagaatatacttttaaactttcaaaacgaaactgagatgaaatttggcaggaaaactgaaataaatgttgaaagtaaagcaacaagttaccttttggattcgagcacgttcttgtggaaagattgctttatgttctctggtcaaaacaatagccttcagttgacttttggcatcatccactgcaccttcaccatcagctgatgtggaacgagctaatacagctttagcatctccagcatttgcaacaaccacctttttttcaaaaataaaataaacaacaatcacataatcgacaatatatttcactacataaacaatagaacagttgtgatccagtagttcaaaatttaaaactatagagcacagagctgaaaccaaagcacatagcattgaaagaaacaaaatagtaaaccacatgatttaagcttatacaaataaaaagtagattggacctacgtacagtaaaccacatgatttaaacaactcagcaagaaatgacatgcagatgatcacgatataaaatatgggccctcatgaaccatcgagaacctctaactaagagggctgaaagtaagcaccaacacatttctatcacctcttaaatcttgtcactatcgatactcccaaagtcaaaatccaaaaatataataatgtgaaaatattatgagtacacaaaattcccttgttactgaaaactaaccgtctgccccaggacccagacacagacagctgttgcaccatcttgccagtttcctatagtataataaggaaataggtagaaattcagtagtatagagtaaaaaatcatatgaaacaaaaatgaaactaacaaaatttacataatagagtttcaaaatctacctcaatgctgggcacaatacaatgtttattattagttgtcaccaaaacagaaatgtattccttttattgttgtgaaataggaaagtcgaatgaaatccaatctgattaaataataaatatctctccttgtccaagcagaaggaaaaggagacaatttgagcagacctttagtatctctaattagctctgctgctcaccaaaataattatctcattatatgcattttgttgacagcatcagctaaactatacactacgaaccactagctacaaattttaaccaccaaagaaggctatttatggtcaggtaactgataacaatgcagaacattaagtagatttgcaataacattttcagccaatatagtagaatggccagatattattcttatctgggccataaacctatattgggtcagaggtgactgtaaagcagaggtctatggtaaatgtgcaggccaacttttccacacgaattggatattgcagaagagtaatggagatatgggaaaatatgtagtggaacctacaacttagctggaaacttttgcatggaagttcagaaaatatataaggaaaatcacaaatgtagggaagatgtaattagacaaccatacaaaatttttaacaacaaattcagacttcgtttgtgagatataaaattaacaatggcaatgaagaaacactatacctgtttttttgttattttgtttttcactgtttctcgatttcctatctcatagatggagaggagtttcatctgatattttgtatgattgtctaatatcaccttagccatatgtgatatttttcaaatatttttaaaattttattccatggtttctgcctagatatgaatatatcctcgtacctttagtactttcttgcagtaagcactcatcagttctacgaaaacctgaaaagatccaacaaagtaagtaccagagcataaaatcagttggtgtatcagtaatgtactaattaccgatggaaaataaatacttactgaacggaaattaaagagcttgaaacatcaaatgtgtggagagatagatatagtaagtacagagaagagtagtgctatacgtaagattcttttaaaatgccaactgtttgatttaataagttggttgatggaaaataaaagatgcgaaagtgtaccatttcagtactggtaaaaagtttgtaagaattttttttgtagcacatcattttcttacagggaatatgctaatatgaaggaaaaacaataataaacagagaaagcttggaattgaaattgtgttcctcttagcactggaactacacgtaagatggcaatgcctgttgtcgttttccataaacaatatatttcttctaccaaaccagacagtgaaattaaaactaaaggattgcacctggactcatcatcataaagtactccctccattcaagtttgatcatcattttttttaaaaaaaaaactgattttcaagtttgatcgtcacatttgcagttggcatgcagttgcatctcgtccgacgtgctggccgtttcagttcgcacgtgaaattaatcagccactgcatggacgcctcaggagcactgcccgttgcatgcatgtgaaattaatcgcatttacaattggctacagatcattggttccgctgcgatcatcatgcatgcatgggctgttacaataggcatgctgacccattggcctgngagtagattangaagatgataagcatgtttgctgtccttggtctttgtgtcaggccaaaatatgacagacaaacttgaatagagggagtatatgggatgctaatggaatcaaggtcaatgtgtctatgtacagtacataggacagtttagctgaccaggggaataatcttagccatcaaaaatcaacaagtgtaatcctagtctacagttatcagcaagtaactaagattcatgtaataaataccttcaatgatggccttctttgcagctttaacatccatctgtaaatccatttttaattactattaggtaactcacaaaccaaattactgtgtgcattgcattcaagcaaaaaagggattaatctagagataccattgaaataaatcaagtgacggacctaactgaaatgactcattaatggaaggtagcataagaggaaataaaacataaatctaatgatggaatactcccatatgataaaaaaaagaaaaatagagaaacaatgaatgcgcaattttgctaacactaaactatcactcagtgaggaaaacagaagttcagatagaacatgaatagtgaaaacattgaaaggaagcagataatgtaaacagaccaactcacgtggtaatcctgctgcaataacattctgatgcaaatgtttctgtgcatactctgcagccaggcgaccaccatgtccatcatatattgcgaaatgagcgcacctgcatcaagctacacatcaggctgcaagtattggatgctaggagttaaactgaacagaaagaggcagacctcaggtttcccggagattccatgctagcatcaggaagcagcacccatgcatcttccatagtatgcctgcaacccttgtcttctgcagcatcagcttccacactagtcaaaatcaccccatggccacttgaaacattcgagttggttgctgctttctcatctgaaacacacgggtttgtcgacaccgtgttttcctttcgagaggcatctcctccttgagcttcatcgccattcgtttcatgcgaagcgtcagatgtcagaatgtgctccttttcagcagcagcgccgacaactttggggcgttttgatgcccactcttcatcgccaccgccgttgtcgctggttgcttcacgcttttgatgagccatgacgacctgaactatacagcttccaagttccaacagcctcttatcaatttcaccagcgcactgaaatgcacaaacaaacagaaggaaatgaatgaaatgtgagtgcatttcgctatatactttatatatttgctaaaagctaaatcaaaatatgagcccctcttcatcatctgcatctaccagatccccacccctcttccccaatctcccatgaaccaaacccttccaaatcgaccccccaaaacctagcactagtagccattctcccacatccccaccacccgaacccttcgttcccagcatcactcctttgtccccagaccacatcgaagcgatcgagacgcgctctaagagcgcgggcgagcgagctcatcgcagcagaaatcgcagcggcaaaaaccgtaaaaagggagaggagctgaacagagcgcacgaccacgaaacctgaggaggaggaggaggaagcggagtacgggagcccgccggccgtcgtagcgccgccgtcgccggtgaacgagagggtcggagagagaagaagaagaagaagaagggatttggcgattttagcctcgtttgggttgaccccaattttggcccatccacgtattcgggccgggctggaatctcggcccaccggaagtggatgggcctgggtttccgcctaaccagggccggattccgcccacgcgggaacaattcctgggccagatgaacggtggagcccatgtcacagggatttcattctatctttttcctttcttgtatataagtctttgctcttcataactactccctctctgtgcctctgtggttataaatattttattttaaagaataagtttggatcaaatttcctaaaattttactaccaattctatatttaaataattttagaaatataataaattaatgatactatgatagtacttgtaaaacagaactaaggctctgttcaggaggagggttgagctagcacgtaaaacgatgtttgtattaacgcatgattaattaagtatttgttattctttttcaaaaatagattaatatgatttttttaagcaactttcgtatagaaacttttttaaaaaaacacatcgtttagtagtttgaaaaacgtgcgcgcgcaaaatgagggtggggagttgggaaccctagggaacaaacagagcctaagtagggctcaatttcatgtatttgacggatcgagtttaaaaagtttgactaaattatgcattagtcgcacagtccttcctcactggtagtgtagcttggcagcagattatgttacgaaccccttttagtgcatattagatcgatcaggttactcgggctctattagggctttaagatattattgtataaattagccatcacatcaacctaacctaccctcctctttttatttgcactagtaaggctcaggggcaatgattagttttttttaccaccgttcatggcatatcttttttttcttttgttgttgtatgagagggaacagttgattttatcccccttttagtacgtatcggttgtttgacgatgcggatcaaccaaaagtagccacgcgtagtccttactggtttatgggagatgagagcacaccaatgctcagaaatctcagctctgcttacacagatggagatcctcagcaagagcttcatagacttcaatttacattttattagccgaaattgtaatagggtagcacatgcttgtgcccggatggtatcccagaactctcgggcggtggagtggcttataacccccttataaccccacctgacttagggatatcttaatccaagattgtaaccctgaccgtgattaatgaatctccggtcgccccccccccccaaaagaaaaaaacaatatgcaatttactctctttctcctttatgtttgttatactagtttataatattgtggttgagagcatcctcatatgcttgcccatccatcattttcggtggatagttcctagagtcgagacaaaacccacttatgacacatccttaacatttactccctccgtactcgaattagaagtcgttttggacaggattgtgcttaccaaggaatcattaattaaggggtattcttccatgtttgcccttattaaatgaggctgcgggtttccttttacaagaattgttcatagttagattggttaggcagccgcacccagtctgggcggcgagtgtaatgaacaagcgctattaatgcgcatgattactgcggacggcgagcatgcgcacgcaggggcaaacacatccaccttctatcctctgagcgtgccgcgacattctttgtgaaaacaccagtgacacccaaaacgacttctaattcaagtatggagggaatatacatggtttaattatctacgacatggctcttgatccaccacttgttgtgtgtcgacgagcagcccctgtagctgttcaaggcggccggatgctggttcccaaagtgattcttgcccatttcacacaaataaaaaagaagaaggtaaagatcatgcatacaaattaactgaaaaaacataattaccatgcattatatgatgcactgtcttcattgtaaagcactaaggcatatagatgatcccaattaagatgatacttttccttgataaaagatcagtttcccctcaaatgtctctctaaaagaaaataaagatcaccaggttttagagataagattcatttcaggttacagcgcagctgataacggcagctagaataatggcagttgctgctgatgactctacatgtgtatttagggataaaaacggatcggatattttcttgaccgttcagccgtttctaccaaatatggcaagtattttttctaacaccaggaatattaaattaaataggatatgcttttatcttaaaaacgggtgaatgggttacctaatacttttttaggttatctaaaactcgtactattatctaaaaccgatattcggattaacagatttctagattatatcaccatactacatgaccgaatctcacaccatcatagtctaggatttttttagacttataagctaacttataagataaaaagtctactcctaaccaacaaagcaagttttttgtttggttttttttaaagccatataaaccaaaagctccatcattttcttcaacagaatgcattaattgtcctgcgatctcattgttgaagaagcttttttggtttacgtgatcaaagtggaggtatgactcaagcattaaataattaaaatattaggactttaaataatcgaccggcttataaaacatataagccaaaaggttgacttgaaaagccaagccaataaatctaagcccaaataaagagagcctaagcaagtagcttattgctctttttaacttccgaggccctccaagcacgtggatgggagcataactggcatcattatttaatgcatgccggcctatccgataatttcgacatgttcataaatcgagctgttccactcccatatcatttccgacatccgtgtatatatccaaaagtgtacggtgtaagatatagtatgattataaccgtacgtctaagtacactatgtttttatccctacatatattgatggatgctatcttcctaaaactagctactacccttgtcctaaaaagatttatttttctagatgagtttccatagttacgtttccacattttgtgtagaaaagtgaactcctttttgaaacagagacaacaccagaaatagtaataatatatcagtatatatggagatgatttatcccgtcatgatatcattctagccttagctagctttgcagataaaatggatatggattactccaaatcaaaatggttctttggcatcattaaatctatctcagaaatttatactgcatcaatgcactccaacctaaaactaatctcatttcccccattttttttctttttcgcttttccagacgaccaaacgagacgcacgcatagcgtctctcgtcacgagaaaaaccaaaacgacagtaaagagcgctcgcgtcatcactgacataagggcccccacccccctggttggcccctagtgtcattgacctagtcagatggacttcctgacctcggagaccgcacacgcgacccgacccgcgcctctcgctgaccgccctggcccacgccacccgtggggcccacacgtcagcaactcaccccgcccccacacccctcctccacagctgtcgcgtgccaaacagagagacggaactcttcctctcgccgaccggtgggacctcccgaccggctcaccgacccaccgcggtcgctgacagtggggcccacatcctcgcgtaccccacctgtcggtgagtgtggcgtgcgtggccaccggtggcggcgcagggcgtcactgagggtgaggcgctcgcgcttgcggttgtagcatataaagcacgccgcgttcacatcgtcgtagtgccaaatctaccaactcttctcccctccccctcctcgcgatctcgcgctctcgacctcgtcgccgccgccgatcgccgccgccgcagccgcagccggacggagagtcggagaccgtatggaggtgatgggagcggaggaggcgaggacttcgagggtggtggtggcggcggcggggcgcagcctcaacccgaacgcgaaggagttcgtgccgcggtggcaccgccacgccgccgccgccgacgacgacgacgccgccaggaggacgaagctctccgcggacgcgccggagttcgtctacgaggggttctggcgaggcgttgatggtctcaccggctacggctacggctacggcgacggccacgacggcgcgccggaggagctcgtcgtcgtcgtctcggagcgcctcaacccggacgcgccggagttcaccgccgccgcctcgatccgccggagaagatcgccggggagcgggaatggcatctcctccacccgccactggagtgtaagcaagagccgcttcttgcactccgtaatttcttccttcgatctctttcagatcacaaatcgtcgatgaaacttgattttggtttcgatttcgatttctcgtttcaatcgtgttcgtatgattttgatttcgatttcgatttcgattatttctcgtttcaatcttgttcgtggcgtcttggtttacagttttttgggtttacgctttccttttcgggtggcggtagttgcatgtgttgaaaatcagggcgaagaggcgcagatcggtgggggagggggtttatgtttttggtatagggatagcgtcagatcgaggtggttgcttatttactgtgagctgcaagaaagacaagagggagttgttgcatgctttgagtgtctctctctttgtacatttgaatacaaggagggtttatcatctattattgaagacaagaaaaggaaaattctatgcatacgtactaaattttgttttactaaactcttactaacatcaacgtgttacgctgtgag

SEQ ID NO: 3429 - DNA, 658 bp, Oryza sativa
catcaccagaaagtgaagaaccccattttcaccttcactgaacacatgctaatttttcacctccactgaacacatgctaaataagggtggcaatcaaatttgctgagggttggcggcctaccaggacggctgtatggcccgtcactggctggaaagaagcagctgattctagcttctcccatgttaacctcctctttgattccagtgaagcttgcctttcttcgtcctccttgtacttgaccaggcacgccgaaaagagcacgtcatccatctcagaaaacatcttctttacattatctgtgagattcaggacagcttggttccaatgattctggctattatgttccaatgctggaacaatgataggcatgatcatttggcggttttgtgcaatcaagctaataacgttatcgttgttccatatgaaaagcgcccgttcagcaacctgaaaaaacccatctcgttgaggcaattacttggataaaaagcattagtctgtcatggcagacaaatgtcttcaattcttaatgctggtccaaatatctcacatttgtgatattaacagtacagagcaaccccatgcccaaagcatgattagttgataacataatggcccactattgttgtccacatttatttcggaccatcagacatctat

SEQ ID NO: 3430 - DNA, 1769 bp, Oryza sativa
tacagaaaagaatgtatgatttggagaaaaagtctgacacaagtgaatctgtctagttatttgaattgcaaagttggctccttagcgaagccccaagcggtaaccaaattcctcatgtgacataacacatggcctgatggttaaggaaaagtgcccttttcattttttgagtgttataatatatgttcttttccccctctataacactacatcaaggttggcacactgataactattgctgcaatgaacacaaaagaaagccgcctattcatatggtaaactggctactactgctgattaacatgtgtagcctttctacctatattataaggattggtaggagttttctatgtgaccacaatccattttgctatatagagtatggtgattaagtccagtaccaatatatactgtattagtcctactgatcagtgatcaccacttttctacccaagataacaagaaatcagtatatatgtgtaaatattagtgctcatggagaagcagttcagattgatataagatgtgcacttacattccgatttgtcggacaaggtccagtagtataataacaccgcatatggctcatccgttgggagctctgcttttgtagtgctcctgctgcctgggttacacatgaaataattcgaacccctccttggttcctgcactggttgtatgattggctccatgaccagcttaagctgctccttgcgccactcttccctcttctgaatttcctcctcagttggaaacttgggtacatatggctctgaaaccttcgcccaatcagattcctcaggagattcaaacaacaagctgtactcgccttctccttcccctccccctgatagtgtcccaggtagagataacgcattaagcctcaactcctcgttttcttgctgcttctgctgatacagaagtccctgatcttcctctgcttctaatgcaaagatggcactgagtcccaaatcatgtcttctctttctgtcattgcggcatttagccggcaaagcttcctattgagctgaacaagcaaacttgaacacgatattgggttgttatcatcgaccctccattctagaatttggtgtgtccagctctctgctgaggtgcagggcaggaatgtgcagttgtcgtcatcatctccgctatggatgcccaccgtgattccactccacccagtaagaatgatgccatcgttgagccgtattggtacattgtctactaggaacttgaaactcaaaatctgatccacctgtgtgtgttcttgcggcaacaccgatagcattgccacaggtctcaacgtctctatatagcttctttgttctgtgaagccaatggtctctgggtccgaatagccttccacaaatcctactacttgaagcttcatcgtcgtcaatggcagaataaacctgccatcgcaggcaagcctccggcgcatgacgcgaggacattcctgctccacaaagttgcagcgaacctccccatcagtgcccattgaagtttgaaccttcggtgcatcgcttcacaaggcgattcccactgcatctccccatggcctagagggatgcaggcaagaggcatcatctccagctcctccctttccctgttcagctcttcttgcttcctcttctcctgctcttgtttctcctgaagcaccatctttttttgctcctcttgttcatcatctggtagagagtcctggccagatcctccaatgcggccgtaatgttgatgaaatcatggccgaccctagcatacaactt

SEQ ID NO: 3431 - DNA, 2843 bp, Oryza sativa
tatatatatatatatatatatatatatatatatatatatatataaagagacagagatatcatgcattttttttctagggttcaatttttaggggagatagatccatgtttgggggcatgatctgtgatattatctggtttgatgtgacggtcacatgaaagaaactacttcaatctttagatgcttgatttgattttggttcttcaggcagggtggaaactgaaatagtctttccccttggtttgggactttttcttctttgtcttaattagatcttttcctatttagtccgtttccacttttggttcgtcctttttccccctcttttggccatgaatagctactttcctaaagttccatggatgcatacatggtgcatatatatgtcactaatgctctctctctctctcactatgatctactatatactccctctattttttaatagatgacgccattgactttttctcacatgtttaaccattcgtcttattcaaaaaatttacgtaattataatttattttgctatgagttgttttatcactcatagtcaaacatgtgagaaaaaatcaacggcgtcatctattaaaaaacggaggcagtattatattacggtgccatcatatatattccatcttagacaaattcctaaaattttgaggtccctaattaattaattcctatctactgactacatttttacagaggaggggtagtagaaacttctcagacaaggaagatcagccccgttttcttctagggtgcgaagggcccagaaggaagagtttgtgagaagaacaatatttgtcagtgatatagaccatactgtaagatactgatatttccatggattgcaatgcgatgaattttattttctatggcttgcatatatggagtaatttgtcacatccaaatataatgtgtgacacttcatttgtttctgaaagataataatggtatgcatttgtgtgtttcaggttactgaggacatgttagctgaactgttcgggagctattgcagcgtacgcctcttccttcccatgtgtatatatatgtgcctgagtaaacatttttttagctccactattttttttatccttttctttttgcgaaacacagtgtagatgcaagcgtttatataaacacgcgcacacttagcttcactagttttctaggtatataactgtgatatgtatggtgattgagtaagactgctttcgatatatatgaaaaacttttgatattgtgatatatatcattcatatgcatatgtatatagtaaccaaagcatcatcatttgcaagtgccaagcacaattatgttcatgtgacgcactaatttcttttttatcctttgaaaggcttgaatcaggtggtggaacgtactctttagaagtatgtatatgccagtttgtaaaattttatggacatgcatgtttacttcagaagatttttgtttataacagggtcctcttaattatttggttctagctagtaaagatagtgttttcataaagttagattttaagtgaaacgaataatcgcttcgtgctatgctgggagcaatctaaaataacatgattttctctagtttgtaatgtcctaaacgccttaaaattcgttgctctagtttaatttgtccatatgttgcaacaggtggtggtggattgccgcatctgtggagatcactcatctggccttaggtttgcatttattgaatttcaagatgagagtaagtggcacatttcaaacctgaatcttgtttttcatcaatacaagtgagaggttcatacaaatataatctggagatataacatggaagccccctttttttttcaggtgatgcttatgctgcattggatcttgatgggtatgttcttggcatttgccctcttagggtttcaccttccaagactgcaatcatgcctgtgaacccttcttttcttcctcaggtcagtacagcccaaggaaccatgttattgccatgatttataatcaagatagatcatcccattttcaacatgttgtgtactcactcttaaattaatttgttcggtagtctgaagctgagagggagatgtgctcaagaacaatctattgcacaaacatcgacaagagtgtatgcgaaaccttaatcctccttgagaaaaaattctccaataattaagcagttgtctccaatgttaataattaagttccttgttaacttttataggtcaatgtaacagatttgaaatacttctgcgaggaacactttggtcaggttagaatataatcatctcatgaattgatattcctcttcattaattatttttcagcagcacacactgtatatatttgagatttattctggtccaacaaaaaatacctcgagatatcggcacctcatagtaccaaatcgtttttatcgttggatctacctggataggattggcattgttggactggagcaaatctcatatatatttatctgaattttttgtaccgtaatatatttatctgaattatctcgctttcttccatttcatggattatatgcaggttttccgcctaaaactgttaggtgatgatggtcaccccacccgcatagcttttattgagtttctgaggtgactctctcaaatatgtcagttctcaatgcagtaattttcgcacattggttggcttgaatttaagtatagtagatggtgtaggagcaatgtaataataaacatcctcattaatttcctcatcctaataagcaagctgttcttcttaatgatcgataatcgatcactagctcttggtttagatcgtcctagcttacagcccatttatatgcatatatgtaaatgccatgcacat

SEQ ID NO: 3432 - DNA, 6189 bp, Oryza sativa
cctgcaccattttttgcaagagagtgttgagacggagagcaaagtcatcaacatcctcacctggcttgaaggccaggttctcccactccttgcggagtgcctgcagtgtggacttgcgggcgcggtcgctgccgatgcgtgccgcagcgatggcgtcccaggcctccttggcagtccgtttctgggaaagcgagaactgcatctcggcggaactgcagcgatgagggcatccagtgcccgccgatcctcgtcgtagtcgacgtcaccgtaccggactgcctcccacatgtgccgcacctggagcctcaccctcatcaccgcggcccactcgatgtagttggttttggtgagggtaggccacccaccgccgggaccaaaatccctgaccaccgtctggacgccgtggtgaccatggcgccggtcaggggagagggagccgtgccgcctgcgagggccgcgtgcgggctccgggctgccgccggcacgcccgcgcccgtctgggttcccgtcggcgggcgcgcggtcccttgggccgccgccgccgccgtggaggtgggctgctgcccaccgctctgctcgctcccgtgcccttcctcttgccagctcctcaagctccctgtcagcggtgatgtcgccggcgatggagccgttgatgctgctgcgcaaggtctcaacctctacctccgccgcacgtgccgcatcttccgccgcctctgcttctgcctccgccctggctgctgccaactctgctgccgccagtctggccgccctcgctgctgctgcagcggtctgagccgttgctcgcctgcgctcttctgctgcggcgagctcggcgtcctgctgacgccgagtgctcgaggcgaccgaacgccgagaccgaacgtcggacatggcgcacctccggggggctgctgcgtggagagggggaagggaaaggggaaggaggagcagccggtgttgctgctgctggtggtggctgagagctcaaccgagcttgggaaggggtggaacaagagatgtttagcctacaggaaagtgtggctctgataccagatgttagaatttcaatggttactctcattgagaagaggatggcactcgagatggggcaattttctggttttcttcattcactaaacacaaaagccatatcctcccaaagaggattggatacatatttatagctgcttgtagcagccatgcagccatgctagtctaagagggtgctgtcagcatcccaacaaactgtcctagagcagagcatcccaacaaactgtcctagagcatctcaacaaactgctgtcctaactgtcctagagcatccaaactgaaagtagagatgctgtcctagaaagctgaaaaacaggaaaaaaggcaccacaagaccaagaccaaccagccaagacttattcctacattacatgcataggatggtgtgtgccatgaagaggagcatctggtaccaaacagaaatccacatccacatgaggtactataccttgccagaatctttccatggagtcttgccaaaatcagcgatgtcggtgggagaggtgctggggctttgttcccagtaggagaagccgatctccgtctgccggcgaagcatcgatatcagaggctcctccagtgaagggcaagcagtgatctttacccttcgaagggagggaagcacgttagtctgacctgcttgcaatccaccgttcccagcagtcacttcacagcgctccttgagcccaactatggtctctaacttgctgcacgatgatacggtgatccctgcaagggcatggagatttgacagtggaaggcgcacaagcttgtgtgagcccctgatgtcgatcgtacgaaggagagggaagacacaatgtggatggttttcaggtagccaccattcctcccatgcaaccaggttctgtaccaccaatgtctcaagacactgaaatggggcctcgcaatcgccgtagaactcaggccctatgcttctcaatttccacaggctcgtcagcttgagctgcttcaggtttggcaattgtccaagtggtggtagatgatcagtgtagtagcacttgcacagctccagttcttgtaaactaaacaaggaccggtctcctagccatgaacagaagttcaatcctctaaaaccacttattacgagttgtcggatgtagttgtgaggctgcagggattccagtacaacctcatcatggggtacgcttttgtaggaaggcagaggattccacactagttctaagcgagttaattttttcttgctcaggtttgcactccttggttcccaaattctgtcatgtgtgatgttctggagatccatgatgcagagctgcccttgaagagtgttaatgtccttgatttcatccagcgtggcagctccgctccctgaattggccactgcaaatgttgatagtgactgaagtttggtcagccggtggattcctgatggtattgtgacagggaactctctcggaagaacaaggtgacgcaggttggacagtgccgacacatttctgggaagagatatcgtgtcaaaagggtatgtgtttcgtagagtctgcagcttgtacattttgcaaatagcctccggaatttctctctgacagatcccaaggtagcggagatgatgaagaacccccaccgatttacccagcttgatctgatcacttgatgatacatccaggattcgtagatacttcaggtgtggtgaatgcagcagacaaccttcaaggttataccaccactggctctgaacaagcacctgaaagaacgtcctcaagttatttctaacacagcttctgagataagttctccatttactctgaaaagacagtgatcttaggggaaagtgtccagcaaccggaagagtaaaaggcaccaatttattgtctgagtagaagggcgttgttccaacaagaacagctaaatatcgaagatgattattggcactagtattgcaaccaccaacagatgaaccacaacactttttgacaaggatctctttacccccaattgatttagcaaggtcatgaatgaggtcgtgcactatgacaaacttctcccgtgaaccagccaactgcaaattttgaagaaatgatctccgaaccaattcatttacatacaagtgcccaatttcttccatccttttcacaccgtcctcctgaatgaaacccaaagcacaccacatatggaccagctcctctaagtcaaatttgtgacctctcggaaaggcagcaagaaatgtgaagcatcgcttcagaattgcaggcagactgtaatagctcaatttcagaattggaaggatgtggtcccatccagggcccagctcccagagatcacttgtcagtacataattccagaactccaagcttgtgtctaaagataacattgcacctagagtcttcaggactagtggcactccatcactcttttctactattttccgcccgattggtcccaactctgtttctctacaagcattgtcagggaatgacaatttacagaacaacgcccaactgtcatctttttgcaacccacctagatgaattaccttcttcgcctgcacaattgtggagacattctcgttgcgagtagtgatgatcatgtggctccctgtagcaacagcagaaaatggccgtttcatcgtctcccatttgatggtgtcctcattccaaacatcgtcaaacacaagcaatatcttcttacccttgacctcctcgtgcaattgcctctggagtggctctagctcagtcagatcacagggtttagcggtgaccgactcgattgctgctttggttagtctgacttcatcgaatacttctgaaacccaaacccatgcttgtatatcaaagtgattttgaacccttgcgtcattatagacgagcctagctagtgttgtcttccccattccacccatggcaactatagaaataagccttacagcaccagctttacaagtttcatattcatgttccttcaatcttctcttcttaaatgtaaggcacccatcaagcaaagaagatattattaattttttctcatcctcccggccgtagacctccaatggatcaagcaaagaactggtgcacctactaatcctagattctttcctacacaatccttcctgatcaattagcccaagatctacacgatcacgacagatctcatcaagaaatttcctaaccttgcttatcctgtctagtatattctgttgaaaagagggattgtttggtccaaagtctgtatagtctgttaccttctcttcctggacgggggtgctgcggagcaactcatagctgtaatcttcaagtatcccctcagcttcccatgtcacttgcttgagctcagagatccaaagcttcatagtctcgtcagcgatttccctttcatctgcatcaaccaacaccgcggtgattcggcgcacagttctgtccagcttggcacctcctcgttgacatgatcagtcagagatggtagttcagctgatgacagatatgattgttgaggaagcgcaggtgataatattctggatttcatcccaaaaaagtaggagaatagtgaggaagccatcatgaactcaaagagaaatactaaaacataatcttcagatcaagaaactgatataaggaaaatggcgtttgggtcaagtcaatgcctggccttgctccaatccaaaaggaatgagcttttacggtgttgcccctaagcatgcgactaaaatatattttttgcaatattcaacaagctcctatgagtctgtaaaaaactattgcacggtggcaaaactgcaggagtacaggaatacaggataaggccatataatgttcctggaaattgcaaatataaagcatcggtgttgttttagatcgaattttatttccatggttggaattatcccctttcagcagaaaaaaaaagtggcaggaagtgagaaatgggtggttacctgcaggctgcagaaaaaccagaatttgaagttgatttgggcctgaaaagtcataaggaccaactaatacatgttagtgatgctgaccagtgaccaccaagcggctactaggaaagtcataaggagcagctagtacataccggtgatgctgacttcaagtaaattgtaaggttattaaaatcagcatcatcctgaaacagtttaatctatgtacgagcacctagaacaattttatgcagaagcagtgatgttaatcacaaataaatttgcatgtacatgttagaccaggtaaatgaattctctacagttgcattgggcttttgtagataatatataacatgcttcttgtgccctgttacgtaggtggaatatacaaagttccagcaacagtaaaaattcaagtaagtagttagcattccagaaaaatcttaactgaactgaaattaaacaagaggtgttagtactacgctacaactgccctgcaatatagttaccgtcctccgctgattcaaccaactcactcaagagtcaagaatgatccagagaatatatataacagggaaactgttttaacaacttgagtggatgtctacccgtttattgcatatcatttaaataattatgaaaaaaattgaaaaaatatgaacaagatagatcaatatgtaatatatcactccacaaacatgcaagttaaaattcaaattctacaacttgtagaagttgaatttgaacttgcatgtttgtggagtgatatattacatattgatttatcttgtcaattttttgtaaccatctagttggcatgtaataaacggatggacgtccactcgagctattagaatccatctccatatataacatggttcttgcgcgatatggtgccagtcgaatatcagcaacaggaaaactcaagcaagtagttcgaattcatgaaaaatcttgactgaaaattattgttaccggtggaatttcatggaaattctggtactgtccccgtgatgctgcattgctgttgcattccttccctgcattaatccaagtaactcaatagtcaagaataatccagatagtagtatatatttccccaaacttgactaatcctttctcgttacgaaaacgaagaaggagaactgcgattccagaatatgaaaaacagattaaaaaacagtgcttggtgagcactgagctcaatcaacaagggcttgattagccgcagcagttgaactagccgt

SEQ ID NO: 3433 - DNA, 1817 bp, Oryza sativa
tagcaaagtacactccaatgattcaactacctggactaaatatacttaaatatatcatccatttcgtgcatgtttgtcatgatgtacaaataggctgctttgtactctttatccgttaggtcacgaggcccttggggacaaaagggtcgtctaggatatttaaaaatgctcaaatcacacaagctttcaaaggttgcagtaccatcatcatatcgagggttgtgatttcgacttgatcttgcagttgacttaaaatagagtgatagaaaatttgtggtctcctcaactaaataggcttccactattgaaccctcaacacgtgacttgtttccaaccttctttttgattttttgaataaacctagcaaattagacaatcataataaatgaatcaagactaaactagtccagaactgaatggtatgacaataattgattgtttgtagctccttacctttcaagtggaaacatccaacggaattgcacaggaccaccaagtcgagcctcataaggtaaatgcatcatcaaatgttgcatggagttgaaaaaaccaggaggaaatatcttctccaatttgcagatcagaataggtatgttctgttccaacctatatacattttccttattaagctctctggcacataattgtctataaaagaagcttaactccgccaaagtcacccatatactctcaggaaggaagccacggaatgctgcaggtagcaaacgctccataaatatgtgataatcatggcttttcatgccaaaaatctttttctgtgccaaattcaccccacggctaatattggctgcatatccatcagggaatttcagttctttaaaccacttgagaatggtgaccttatcattcttatcaatacaataagatgcctttggcttatgccacttgccattagcttttagttccaaatgcagccatggtcgatggcaaatctcctctaaatcttgtcttgccttcacattgtcattggtcttatcagcgatgtcaaagcaagtattccaaatagcttcagcaacatttttctcattgtgcatgacatcaatattgtggcgaagcatcaatttgctgaagtaaggaagtctccaaaaacatgatatatgtctccaattgtgctttttcccataattatcagaatctgttatggatgcattcatttgagcttgaacttgctctctgaaagttggcttggtctcccatgatgtattgttgtgtcctttcgaaatgcatttgattgatttcgaaattcgtgatcagttggaaggaaacaccgatggcaatcaaaccagcagctttccctccattatgagccggaatgcctttgattcacacaaacatgtggacatgctagttaccattggtgctccaacccacaaaatcaccataggcacgaaaatcatggactgaccaaagatatgctgccttcatagtgaagtttttcttcttcgaagcatcccatgttgtcacaccaacccatatatcaagtaactgatccaccaaaggttccaataaagaactcaagttctttccaggatgttgaggaccagggataacaagggcaagcattatgttctctggtttcatgcaaatacctggtgggagcttatatggtaccataaacacaggccaacaagaatatgttgcagcattcatgttgaatggtgtgaatccatctatagctagatcaagtctaacattcctgggatcttgtgcaaaattagaaaaatctctatcaaattgagcccatgcttcaccatctaatgggtgcatcatcacatttggcttatgtggagggtgtt

SEQ ID NO: 3434 - DNA, 3777 bp, Oryza sativa
tgacttgatggcaagaagacgagatgtggtagataaacaggagtgtgttgtctgactatgcactttctcatcagcactagcaaccattctgtagaaagcttgggcagaggctgttggctcttcctcagaaagctcatagtcaccggctatgtcaaccaacatgtcatccatccgatccaattcatcaaatttctcattttctgctgaagttgtagcttgatcttcttgaccaatagaacactcaccatgttctgaccagttcatgtaattctctttgaaaccctcacgacacaaatgcatctcaaccatttgccttctgtgtgaaacatagtttcggcacaaggagcatgggcacttaatttttccactaacaacaacatttggcatggaaaaagcataatccaaaaaatccttagtttgctgtacccactcatcagtcggtgcacgaccacgtttccagccagtatacatccactcacggttattttccatattgtggttctgtatgttccgtcatataaaagttattttcgtgtgtttaaactaactatctagttttattgcaacgacgcactatatacagtactagtagctatattaatacaattctatatatgtgcatatatatatctagatagtcacaacaatgtttagttggtaaaatgaagaggaaaacttaattcagcaagcacatgcatggtggcaggtaacttaaaataaaatttgattcaaaattgcatctcaagctttaccttgtaattttttcttcaacggatctgtttggtgcttggtgtttggtgtttggtgatgttactgatatttcttcagtagactgaacctttaggttagtccctatataatatgagaagaattcagaacctaaacatctatgcattaacatctgaaaatagtatgttattttcataagcacaaaagactaataagcatagtagaaaataaaatgaaaattaaatggcattgtttgacatgcacactgaatagcttgcactaattctgtattgacaattcaaaagctgatccacccattccaataaaagaaagccaccctatctagttaagccacgcactacacagatctcagaatgcttgcatccatttaataaaaagatagtattaaattactagttcacaccgcatggaaatcattttaaaaagcaagaaacaaggcttacaaattgatacaacaaaactttctgcattggcatttcatcaaacacctgaagaacatcaatcaccacaagatgtacagaaataatagagagaagaacaagtaccagaaggttgatgatgaagattggggagcacctagcaccaatcaccggagaggtgagcagcagcgacgcgcatcccacggcgaggagaggaacggcggcggcaaggacgccacccaccgtacaagagcagcactgcgccgccgacgagggtggcgaggttgtgtcggccggcgggcggcggcccatatctagacgacagactttgctgcgagttccttagagcatcaccaacagtctagctatctgattcccaaaactgattttaagggattttagtccaaaattagctccaacagatccccttctctcctacccgagttttggagttcccttctcccgattcctcgctccgtttatatgcggacgtgaaactcgctcccaatctcgcactcccgcccctctcctcctattcccgcgcgtggagaaagcgatctttctgcgcgtgaaagaaaaaaaactgaattttctgttggtagtttaacagaagggcccacttttaagttttggggattgaatttaggctatctgttggagggagtagtttttttacttcctattttcgatttaggaaacccaaaaacaaatttttagggaaagattatacgtaagctgttggtgatgctcttaggtcttcacaggcagggtggaataagttcactttgggtccctctatttgtcccttgactgcaaaaccagatacaacccgtccctcaacttacgaaaaccggacaaacgagatccctcgtcggttttgatagcggttttggctgacgtggcacctacgtggctaatttgactcggtctttatctgacgtggcgcttgggtggcaattcgatccgaaaaaataataaagcccatgggacccacatgtcattttcacacataaaataataaaaaaaatagtggacccacgtggatcccacatgtcatgctcaccccctcatcttcttcctccctctccatctcccctctctccatctctctcctctcctctctccagcctccaggcgccacggctcacagagtcacggggaggtccgtgaaggtgcactaaaaccccctagtgggttttggtgattaatgacaaggtggttaaaggggactaacgtgtttatcaagtttattcacaggagtttagtcccaaagcaagttgtgatggctaagaatgcaaggagaccccccaatttgaatgttcctaagtgcaaaaaacaccgaaggtgattagactaggtttttcactttcgaaattgagtttaggaaaaaccgtactactaagaggggttttaaagtgtggttctagggtatacaaagtgctcttagtcatatccatgaatcaaaatatttttagaatcatttttgaaaaatgattttctccccgggacagagagagctacctggaggttctggccggaacttccgggcgccatttcaaagcaaaattttcctaagtgttgcccggaagttcctggcacttttgcccggaatctcctggcaggtttccagttcaaacttgtgagtaactagccgttatatatatggattttgtccccaggtcaccctttggccattccacttcagctctttcatgttctagggttttctagccactcccaagcttcctttgcttcctccactcaaatctagagcctatcttgtgagattgagagaatagatgagagtgtaagagtgtaagagtgttttgaagatggcttgaagattaggtttgattgagcactttggataccttgtgggctgtcacttgggcttattattcctggagatcttctcctagacggttaggtgtcgcccgtgagcttccaaagatcttgtggatgtcccgggaaagtttgtgaaggttttcctcacctccgcaaggaaacgaggtaagtgagtaaagattcttatgctgagttttcagaggttgtcctaggtagagcaacttgcacttgtggtcttttctagaaggaattgtgagttggatcttggtggtcactcaattctagaaaacgacctagaagtgttgagttgaaggctgtggacctcttctgggatctttgcataagtgaggcaaggggttaatcgagacccggctctttggagcacctcaacggagagtaggatctgtgtgatccaaacttcgggaaaaaatcgcctttgtgtctcttgtgcatgatctgtgtttgaatctgctgatatcttgtgatttttaccttgtgcaaccctgtgcctgattttccctagctaggacctgtttttcttctcatatttcgtttatctctgttgcccggaagttcctggctcaaaaactccggaagttccgggctactcatcactgccaggaagttccggtgttcatcaccaggaggttccgggccctgtcaatttaaccgttgcgtttgttgagaaaatttcaggaaagcctattcaccccccctctaggctacatctctgcacgttcaattggtatcagagcctggtgct

SEQ ID NO: 3435 - DNA, 7344 bp, Oryza sativa
gcaatcaaagagagcttgcttcaattgtggtgaatatggccacttcattgccgattgtcccaagtcaaatgaagccaaggctaagagaggcaagaagaagccggagcgtgctcatgtggcggaggcacacatggcggaagtgtggtactccgaagatgaagaagcctccgaggccaagcccaagcccaagccaaaagacaaggttgaaggagagggtggtgttgctaccgtcgccttcaagtcatcttcttcaagcaaggagcgtctcttcaacaacttgagtgatgacaacgacgactcctaccaatactcttgcttcatggctcaaggccgcaaggcatactcctccggtggttcaagttgggttgtggatagtggttgcaccaatcatatgactggagagaggagtatgtttacaagtcttgatgaggagaacaaaactcatgagaatattgtatttggagatgatggtaaaggaaaggtaattggtctaggtaaaattgccatctccaataatcaatctctctctaatgttcttcttgtcaattctttaagctacaatttattgtccgtttctcaattatgtaagttgggttacaattgcttgtttaccgatgaggatgtgacggtctttagaagggatgactcctccgtagcattcaaaggcaagttagagggtgatctctatcttgtcaatttcgatgtggatagagtgaatccggaagcttgtttgattgctaaatcctccatgggttggctatggcatcgtagactagcccatgttggaatgcggaatttggcaattcttctaaagggggaacacatcctcgggctcactaatgtcacatttgagaaagatcgtgtgtgtagtgctttccaagccgggaaacaagttgggaatctacatcctatcaagaacatcatgactacaacacgccctcttgagcttctacatatggatttattcgggcccgtggcttacataagtattggaggtaacaagtatagttttgtcatcgttgatgatttttcacgcttcacttgggtgtattttctccatgacaaggtgaggctcaagatgtcttcaagcgcttcgccaagcaagcccaaaacctctatgatctcaccatcaagagggtgcgaagtgacaatggaagagaattcaagaacactcaagtggaggaattccttgatgaagagggaatcaagcacgagttctccgccccctatgatcctcctcaaaatggcatcgttgagaggaagaaccaaactcttattgaagccgcaagagcaatgcttgatgagtacaagacttcggatatcttttgggcggaggccgtgagtaccgcatgtcatgccatcaaccgcttgtacctccacaagatcctaaagaaaacttcatatgagctcttgagtggtaagaaacctaatgtttcatattttcgtatctttgggagcaaatgctttattttgagtaagaggcctcgctcatctaagttctcacctaaggtggatgagggattcttacttggttatgaatcaaatgcacatgcctattgtgtcttcaacaaaacctccggtattgttgaagtcactagggatgtgacatttgatgaatctaatggctcccaaggagagcaagttgttgtacatgttgtaggtgatgtggatccaagtcaagctatatgtactaaggctattggagacatacgaccagtcgagacgtaggatgaccaagaagatagggaccaaccttcgtcatcgacatccaatagccctacatcaagtcaagagtctgttgactcggaagttccgggaccagatgatcggaacctccggacctctccaggccaggaagttccgggtccatctgccaggaatttccgggcagaggacagtcaaggcgtgcctacggcacaagtggatgggattgaagctgagggcactatagagcatcctgatcaggctcaggtcccctcggtgcaccatccaagaatacatcacactgttcaaagagatcatcccatcgacaacatacttggtgacataagaaagggggtaactactcgttctcgtgtcgctaacttttgttaacactattcgtttgtctcttctttggaaccaaccagggttgaagatgcacttggtgatccggattgggtgatggctatgcaagaggagttgaataacttcactcgcaaccaagtatggacattggtggagagacccgaccaaaatgtcatcggcatcaagtggatcttccgcaacaagcaagacgaacatggagtggttgtaaggaacaaagcccggttagttgcgcaaggattcacccaagtcgagggtcttgattttggtgaaaccttcgcgcccgttgctcgccttgagtcaatccaaatccttttatcctatgccgctcaccatgattttaggttattccaatagatgtcaagagtgcctttctcaatggacctatctcggagttggtctatgtggagcaaccaccggggttcgaggatccaaagttgccaaaccatgtgtacaagctccacaaggcactctacgggctcaaacaagcccctagagcttggtatgaatgtctccgagattttcttttgaaaaattgttttgaaattggataggcggatactactctcttcactaaaaaatttaagagtgatttattcatatgccaaatttatgtcgatgacataatatttggttctactaatgcctctttttgtgaagaatttagtagtatcatgactaaaaggtttgagatgtctatgatgggcgagttgaccttcttccttgggctacaagtgaagcaagcacaagagggcactttcatctctcaaaccaagtacgtgaaggacattctcaagaagtttatgatggaagatgccaaacccatcaagactcctatgcctactaatagccacctagacctcgacgataatggtaaatgtgtggaccaaaaggtataccgctccatgataggatccttgctttacttatgtgcatctcgtcccgatatcatgcttagtatatgcatgtgtgcttgctttcaagcggagcctaaagagtgccatttgattgccatcaagagaattctaagatatgtagttcatactcctaatcttggcttgtggtatcctaaaggttgtgactttgagcttttgggctattccgattcggattatgccgggtgtaaggttgatagaaaaagcacaaccgggacttgtcaattccttgggcggtcccttgtttcttggttctccaagaagcaaaattccattgccttatccaccgccgaagccgaatatgtcgccaccggttcttgttgtgcccaactcctttggatgaaacaaaccctaaaagattttggctacaacttcaccaagattccactcctatgtgacaatgagagtgctatcaaaatagccaacaatcccgttcaatactcaagaaccaagcacatagacattcgccaccacttttcttgagagatcatgaaaccaaaggagacatatgccttacccatgtgagaaccgagagccaattagccgacattttcaccaagcctttagatgagaaaagattttgcgagcttaggagtgagctcaatatcttagattctcgcaacattaggtgatgggtggttgactaatttatagccaaacatatgtcactaaaatgtaaattaaaaaaaatgagctttttgtgtcttgagatcacttcttgtgtagaagatggtcttgataccaggaataaagctcaaacattcccccttttttatccaaaaacctttttattgaaaatctttgcgaaattcctttgtgtgccttttattgcgaaaatttggtttttatcttctccttgtgatgtatattgaccattgttttgtattggttgcttgctggctggttatatacatcacaagtctctgcatgtccatagttctctattcctccttttgatttcttctctctaccatggttttgggcctgactgccctttatctgtcaggccgaaagttccgggcctccctgtccggaacctccgggtgtcggggagtatatatactcagggtgatttagaaactctagtctctctcctcatttcttctccctccccgatgacagccttagtcgccgctacagtgcccctagtggcgattttcacttccaaccgtggaaatttgattcatctccgtggaataaaccacattggtggctaggaggttcttcccgcgatcgatctgtgatttcctctctcaaggtagcacttttgatcctctcttttggttcatcatgtttttgccccgatctctaaatctgtgaacctagggagaaaaccacttggatagtcttgtttctgctaccttgtagatcaccgatctataggatttgttcacatgcgctggctatttttgaaacctctattcttcattcttgccagccggaatttccggtgttcttgcacccggaaccttcgggcgctgtccagccagcctgccattcttgcttctctcaaattttgcctaactactgcactctactttgttgattcctgttgcagtaagcactatgcctcgtgagaaaagacagaaagcctcttaggatgtgtctagtgatgagagtcctcctattcggtttcctcgtggtcgtttgggtaaagagaaagtggttgagggcggcagtggcagcggcactcgtacttctcctaggttcaccaggcaatccaacaaccgtccagttcatattcgggatgttgacagtggtcaaggaagtgatgctcctaatacaagaggttgtgggagaggtggtggtcacagttgtggggctggaagggcctctcatgatttcccgataggatctcgtgagaatcccgttcgactctacaagtctcttggatttgacaccactcctatgcaccacattggaagacccaagtccaactaccttcatcagcttgccaagtgcagaagggaccgtttgattgatccagagacatagcctgaggagtcacaggatcctcgtttcaggactttcactcaattggattggtataactcagtgattatggctagagaaaatccagtggttgagatgaagtggattgattgtgcttacatgaggaaaaagaacaatgaagtgttcaatcaagcgatgcaagtgtgccacaacaagaatcttggagatattcttgccttggagtatgattggaatgaagaggtcattgcacagttctatgcgacagcattctttggtactactaggaagggaactccttatgtgaagtggttgactgagggtgttaggcacaagatttccatggcacagtttgctgagatattgggcttagaggatgaggatctcaataggcctaatattcatagtgaagcacccctccccatgttcaagaccaagttcatgtatgctaaggatgctcctaggacttgtatgggaactactcatggtttgcatccaaattacaaggtgttgtactccatctttcgttggtctttgcttccaaaggttggagatgccacagctttgccatccaagcatgctcatcttctcagtcgcatgtgctacaatcagcctccctttagtgtgataaagatgattaagtcagtcaccggggtgttctacatcaaagatgggtgccacaatccttttcgcccttgtgctccaccttcctcttctccagtggtacctagatctattcctactacctcagctggtccttcttctagtgccccaccgagttcctcgagttcttctcccatcaagaaggcacttcaggcaattttctgtagtgtgctaagactgctaagaaagtgaagtagatcgaaaggcgttagaaggaagatagaagagaggctgggaaagaagtgtcagatgattctgaagatgaggtctatgttgatccatttgaggcttatgaggcagcccgcaacgttgccggtgaaggtccatccacctacttcaatgaagagtcttccaatttagatgatgatgatgatgatgatgatgagggtgacaccgaggcagctgctgaggatgctcccactgatgttgatgagggtgacacctctacacagtccgatgagtctcatctctccggcgataccgagattgttccctccgatggagatggagatgagtgattctcttcttctcttcatggtttcttgctttttggtgccttgatgccaaagggggagaaattgtgaattgaagggggtcatttaaatctttttgctaccttgactgttgtctggtcatttggccagaagttccgggtcctgtgatccggaggttttggccaggcagatttcctctttattatccctctcttatggacatgtaatcgtattctattatggttggatgtaatgactgctagatgctttattatcctttatgtcagtaagttagaccatatgaatgttgcattttgatgtgatgtagtgttcttttcatctttttgagtgattgccatgtcatctagtctttcttcttgcatatcactcatcattcaagcactcacatctgcatcttatttgtttgagggtagtgtgaagtttcttttgagctttccttcatttttatgcatattgtattcatctcatttcattatatgcatatctttagggggagcttcacacttctctcatcattccaaatttaaattctattatctttttgtgtgctttaaccatgttgtcatcaatcaccaaaaagggggagattgaaggtgcacttaaaccccctagtgggttttggtgattaatgacaaggtggttaaaggggactaacgtgtttatcaagtttattcacaggagtttagtcccacagcaagttgtgatggctaagaatgcaaggagacccaccaaattgaatgttcctaagtgtgaaaaacacagaaggtgattagactaggtttttcactttcgaaattgagtttaggaaaaaccgtactattaagaggggtttcaagtgtggttctagggtatacaaagtgctcttagtcatatccatgagtcaaaatatttttagaatcatttttgaaaaataattttctccccgggacagagagggctacccggaggttccggccagaacttccgggcgccatttcaaagcaaaattttcctaagtgctacccggaagttcctggcacttttgcccggaacctcctggcaggtttccagttcaaacttgtgagtaacggctagatgacgtcacctagccattatatatatggatttcatccccaggtcaccctttggccattccacttcagctctttcatgttctagggttttctagtcactcc

SEQ ID NO: 3436 - DNA, 3236 bp, Oryza sativa
aaggctccccacaagacgtcggtactgtgtagcatccacctcctccgctgtgctgtcgcggctcagcttcagtctctcctccatcggagtgagagctgggttgcaatcggtgagcccagccagctcaacgacgcgcttggcgtaggcggtctgtcgaagcgtgatcccggagttgtcctggtgcacttcgatccccaggtagaaggagagaggccccagatcactcatctggaaggtggccttcatctcctccttgaacgccgcgacctctgcatccttggtgccggtgatcactaagtcgtcgacgtagacacccaccagcaaggcatttcctccattgccccgccggtagatggccgcctcgtgcgggctttgctcgaagcccatccccttgagcgtggaatccaacttggcattccacgccctcggtgcctgccgcaagccgtagagggccttgtgcaggcgtagcaccttgccctccttgccggggatcacaaatcccggcggctggtgcacgtagacctcctccttcaagtcgccgtttagaaacgccgacttgacgtccatgtgatggacgccccagccttcctgagcagccagcgcaagaaggagtcgcacggactccatccgtgccacgggagcgaaggcattgtcgtagtcgatcccctcctgctgcacgaaaccgcgtgccaccaagcgagccttgtgcttgacgatggctccggcttcatccctcttcagcttgaacacccacttaagggtgatcgcgcggtgaccacgagggaggtcagcaagctcccaggtgcggttctcctgaaccgcgtccatctccgactgcatcgcggcacgccatgccgcgtgtttctcggcctctgcaaaagaccgaggctcaccgtcgtcgcacgcaaggtgcaactgcgcctccaggttgcgaggcaccagtcccggcaccggctggtcgccgagaagatcctccatcgtacggtaccgtagctgctcgccgtcatggtacgcgtcgatgcgctccccgtcgtgggagagcggagtaacgaactccactgggctgcgctcaacacgagctggcgtcggagtagacgtgcccggaggagtggctgttggtgctggagcgtgtggggacaccggctggggtggtgtcgacgacgagctcgtcgtagtcgaagtcgtggcccgagggtgtgttggtgttggagtcggtggaggctcggggactggggtagacacgctcggtgaagaagagctgcctactcccccagctccctcgaagtggacgtactcgatggtgaagtcgtcgtacgtcggagtcgaaccatcatccaccgccttgtcccatacccaccctcgcccttcgtcgaacacaacatcgcgcgtaatgcgcacacgctgtgtctccgggtcgaggatgcggtaggccttcgagccctccgcgtagccgatgaacacccctggggtgctcctgtcgtcgagcttgccgatgtggccaagctccttggcgaacgcgaggcagccgaagacccgcaggtgggagaccgccggcttgcgcccatgccaagcctcgtacggtgtcctgccatcgagggccttggtaggcgagcggttgaggatgtaggcggccgtcaccaccgcctccccccagaagatggccggcatccccctctgcttgaggagggcccgagccatccccacaaccgtctggttgcgccgctcgacgacgccgttctgctgtgggctgtacggcgcggtgtagtggcgctgaatgccctcatcagcgcagtacgacgcgaattcagccgccgtgaattcgccgccgttgtcggtgcgcagcacgcgcagcttgcggccgcactccgcctctgctgcagcctgcgcatgcctgatggcgtccgcagcctctcccttgctgccgaggaccatcacccacatgtagcgggagaggtcgtcgacgagcagcaggaaataacgtcgtcctcctggtgtggccggtgtcactgggccacacaagtccccgtgcacgagcccgagccgctccttggctcggaagctcgtctgctggggaaaggggagccgccgctgctttgtcaccacgcagacgtcgcagagctgctccacgtggtcaaggcacggcatgcctcgcaccatctccttggcactgagctgcttcagggcctcaaagtggaggtgcccgaagcgctcgtgccactgccacgcctcgtcgtcccgacgagcggcgaggcaaactggatgtgcgacttgcgcgctgaggatgtagagtcgattagtgcctctggttaccttggcaagaaggcgacgacggcgatcccaaatcctcatgagtccgtcctcgaccaacacgcgtgagccgttctcatccagctgtcccacgctgatgatagaattcctcaacgcggggatgtagtagactccggtgagcagcctgtgctcaccggacttggcggtgaaggtgacggagccaacacccttgatctccacgccggaggcgtccccgaacttgacggtgcctcggacgctggagtcgaactcggtgaagaactcccgtcggccggtcatgtgatgggtggcgccggtgtcgaggtaccacccatcagccttgtcgttgctggagccgtcgcagagggagacgagtaccttcggctcatcaaggtggaggaaagccgctgcggccggtgccgctggaggtagctcgatgcttgcgtgagctaggagcagagccggctcttcctcctccacccgtgcgacgtgggcctggccgcgtcgtggctgtcgacagtctttggcccaatggccaagcttgccacagttgcggcaggtgtcgtctcgtgccggcttgtggttgccggtggcaacgccctgggcgcctctgcgggcgccaccctcggcacgtcttcgcgcccaccgtagctggacacctccccgcgccttgcgcggcttacggccgcctgtcggggaagatgactcccccttcctcccgtcaccctgagaggcctcccactgctcccgagtgagatggagcttcccgccgatggtgatgggccccgagagaggccgtggctcatcaccatcgacgaccttgaggcgacctaacgcctcctcgatcgacatcgtggagaggtccagcagagattcaatcgagcgagcgatctgcctgtacttctcagggacgcagcggaagagcttctcgacagctctctcctcgtcgt

SEQ ID NO: 3437 - DNA, 1788 bp, Oryza sativa
  unsure (1)..(1788): unsure at all n locations
acaactgagatggtgtacatcaagcacattgtgacaaatttggggctcaacacttggggttttgtgctctacaacaaccttctttcgctgatgatggcccccttcttttggttcttgacaggggagtacaaatcgctcttcaccgcgatagaatcaaggggtgagaggtggtttcaggttgatgcatttgtggcggtggcattgtcatgtgtgtttggattgctcatcagcttcttcggtttcgcgacgaggaaagctatctcagcaacagcatttacagtgaccggggtagtcaacaagttcctcaccgtggcgatcaatgtattgatctgggacaagcactcgagcccgttcggtttgatctgcttgctcttcaccattgctggtggagttctctaccagcaatcggttacaaagaaaggaattaccgcgccgcagcatgaaccagaatcatctgagcaaaccaaagatgacaatgagggcattgagcttgatgaggagaaacaaagtttggttccaacttctaaaagctccaatgcttgacttgcatgcttagatttacattcagagatcctttaatcttgaaataggcttttgtgtagtgtgaatccctgcaacaaatcacaatgttaatctagaagcaacttccttgtgtcacccaatttcttcaggaatactgaatacaaatagcactgctgttgtttttttcgtggaatggcttattccaattgtaaacttgtaatacactgctggtatggagtatggacatatcatagctgacaaaactgatcattgaacatggatttctcttattgtttctattggatagataatagttactggcacttcttgattctgtcttgtgatggtattcaattaaacatggtctttcttttacttgtgctgtgatgggcatttcaatatttcagtgctaatttctatgaaaatatttcgcatgttgcaaaatatcatagaaaaaaaagggcatattacaacaatttgtccttctaaccatgtacaccagcatttggctaattcctcggaatgtcaagtttttctttatttgcgggtttcatcattgagaagttgatggaaggtaagcactagtaatgaaatgtgcaagatcaatcctcttttctaactgatgatatctgaagaagtagcagtcaaaattgacacatcctaatgaaatttgtctagaggctaccataagcaattcatgcacaggaatcagaacaaagattattcccagttgctactgagtttaactaccagacctctgtcaagtacaatcttcaagtgctaatgtgtgctcatgtaggctgatcttacatgaattggaattggatgagatgtcactagaatcttcaattcatgcagtcactttcaccgcgcaattggggaagcatgtatatatcagcaatctcaaaaccattgggtagaaaattttacattctgaatgaaggagcaaagaaatagtaacatgtatatcacactttacataaaccattgaaaccctggtcaagtacaatttccatagtaagatctcaaaaatatatataaaaaaagggctgaaacagtgctggttctagctagaagcacacaagcagagaaatgaattaagaaaggactgcgctcagttagatccgtgttagtgacaactggacatctncagcatacataggggcaaggagcataaatcagtcttctctccgccttctgtttccggagttcagaaagtgctcaaaatatcagacttgttctaatggcaaaattcgggaccaatgt

SEQ ID NO: 3438 - DNA, 4742 bp, Oryza sativa
gatacacatcttgtcatatgatcaaatggtttcgccaaaaatcaataatcagacaacaaaatgtgcgaactcgatattttacacgactctctttaccaattctgccccgaattacacttaaaacgactcaacagcttaacgttggcttgccacgccttacttgactgtaaaactctcactcttaccgaacttgcccgtaacctgccaaccaaagcgagaacaaaacataacatcaaacgaatcgaccgattgttaggtaatcgtcacctccacaaagagcgactcgctgtataccgttgcatgctagctttatctgttcgggcaatacgatgcccattgtacttgttgactggtctgatatccgtgagcaaaaacggcttatggtattgcgagcttcagtcgcactacacggtcgttctgttactctttatgagaaagcgttcccgctttcagagcaatgttcaaagaaagctcatgaccaatttctagccgaccttgcgagcattctaccgagtaacaccacaccgctcattgtcagtgatgctggctttaaagtgccatggtataaatccgttgagaagctgggttggtactggttaagtcgagtaagaggaaaagtacaatatgcagacctaggagcggaaaactggaaacctatcagcaacttacatgatatgtcatctagtcactcaaagactttaggctataagaggctgactaaaagcaatccaatctcatgccaaattctattgtataaatctcgctctaaaggccgaaaaaatcagcgctcgacacggactcattgtcaccacccgtcacctaaaatctactcagcgtcggcaaaggagccatggattctagcaactaacttacctgttgaaattcgaacacccaaacaacttgttaatatctattcgaacgaatgcagattgaagaaaccttccgagacttgaaaagtcctgcctacggactaggcctacgccatagccgaacgagcagctcagagcgttttgatatcatgctgctaatcgccctgatgcttcaactaacatgttggcttgcgggcgttcatgctcagaaacaaggttgggacaagcacttccaggctaacacagtcagaaatcgaaacgtactctcaacagttcgcttaggcatggaagttttgcggcattctggctacacaataacaagggaagacttactcgtggctgcaaccctactagctcaaaatttattcacacatggttacgctttggggaaattatgaggggatctctcagtgctatgtgtacagatgacaagaggaaaatttattgtaccacttgattgtgttgaaaatattgatgttaaatactttcaatttcatcactcccattccatctttatgtgtttcaagtcttcaacctaatcccctcttaagagtaaaacatcaaacaacaacctagttgcttacatagcacatgccatatgatatagattagttcataggagatcaaaagtatttgtgaagcattttgaaggaatcaaaactgatgatgaaaataatgggcagccatgtgaaagattgagaaaacaaatttgcagtgcaaattaccatattgctaaacatgcagaggattagcattttaccttgacaaaactatacgtgtctcagacattaactgatcaagcttcctaacatccttcagaagtgaagaatcatcaaagccactactggacacagccatcaactgtgcatacacattggcattctcaggtacaaggtagtttatccaagagttatcttcacaaagacccatgaactgcttcaatatttgtaaaattgtttctaggacttcatcaatgcccatagggtctttcagttgtttcctgcatattttcccatgaagtattactaagagaaacacaccatgttatataattctaagtaatttgaagcgaacacggaagtctggatacactctgatgaatcagtgctgtttctgtacaccctctgtcccaaaaagacttgatttctggctatgcacctggacaggtctttttgggatggaaggtgtaatgcttatttcagcaagtaaaactgaaacactcttctttttttctctttatacattaaatgctaaagtgctgatcatgttggttatacaatactccctccttccaaaagtctaagtcctatttctttttgcaccaagaccaaggtgtagttaactcattcatcatgtgacgaaaccaatgaacatgcaaccaataagtactaaaatgacttcttgagttcctatcaaaaatttaatatagcacataatgactacaaataggacttagacttttggaaaaaccaaagaatgaaataggacttagacttttggaaggagagagtaataaataaaaaattggtgatgtaatgaccatatggacagggaaagaaacacttactctttcaagatttctgttgcagcatgctgcatctttgtaattaatgcattgataccatatgtggcaaggtaatcagcagttgcaagaaagtctttgtgcccgcttttgctaaaggtgtcagaaccctcctacaaatggagacatttcaatatcagcaaatagcttgggctcaaatcactcaagcataattttgaattttaaccttcaagagaacaagcgtcaatacatgatgattaagataaagaaatatcatctaagcatctcataactttcatatagtagaaatgactgagaacaggacatggagggtaaatattacctgtaattgcgcaccatccgtaacacgagcaaaatctaagtagagatgtctgcctaatatggtgacctggactctaacatataagctaagcaacgtcatcgcccatattgaagaaacagtccttgtgaaacctaaaacaacaatataaatccataatttctcatagttcattggacaaagaaaaattcaacaaggcatgcaacacgaaaccatgtaagataagaagaagcgtactcaaaattttgatcttctcccaagtgtcatacttctcctttggtgtcagggcaggggcactggattctcccttcccgtgcattagcttctcagtcaggtgtgaaatatccaattcctccatgatccttgaacggagataatgcatagcaaaaggcagtgtggtcgtgtctgagatcttctgcacattttcaaagtgggtctgcaatctacaaaaagaagcatagaaaacgatcacaaagcagtctgttttggaaacaatggtatactcaagatttcactattctctatacatcagagacagtacattactacaacaacagccaaatcacaccttttctaacatgttgataccttatagtagattcttgttcttaaggtatgtaggatcaataacataaactccatgaacatcaatcacagcagtcctcatctaactagcataaataagagagaataagattttctctccatccctcttataaaaaaaaggcgatgtaaatcgtctaaaatagttaaaaggaccagaatgacttgggaaagtaacaatgcaagaacagaaatccccaacccaactgaacacaactaagaaactaatcccctgcaattagaacaataggcgcaccacaaaaggtttctattttttcctcaaaccccaaccgtagaatctataatcctaccctcaaacccccaactttgctgttgctaggctacccatcaaagacgaacacagcatgatagcaatgcaagaagaagaaaccccccgattaaaccccactcaagtaggtagcaagtagacggaggcgacgaggccgcgagcatcttactggttcttgatgatctcctcggcggcgcgctcctccagcgcgcgctgctccacccggacgagctgcctccggtgcgagtccaagtacctgtacgcggcgtagccggcgccggcgaccccgagcgagaccagtatcttccgccggtgccgcccccagaaccccctgcaacacaaatcccccaccagcgaatcaaatcaaatcaatcaatcaatcacccatcccacccaagcattcgccgaacacctcaagagcaaagcaaaaggaggagtccgacatatcccccccaagaaaccctcacctcgcggaagccagcatggcggcgccggggatgggtggtggtggtggtggctccgcccgtcggcgagctcgattggctcgtcctggatcagcaaagccgaggaggaggaggtgggagcgaggtggaggagagagagagaggggaacgaggggcttcgaaggaaatagagaggagttggaggggggaaaacgcaaaaggtagcggaggagacagacacagagcagagccgtctgggattgggtgtcggatgagcaacacaacacaagctctgctaaaaccctgtgtgtttagcagcggatttgtaccctgttttttctttcttttttcttttgagtggatttgtttgtaccttgtgttttattttagttctgcgtgtcgtgtttggctgggtttatcacggggagattgaggttctttttaactatttgccactcttacggagtggcactattgagatgctactcttccaaacttttttacacaaacaccacataagagaggtatttttcctaactagagtgccacgtcaacaagagggacttgaaatgacctttttacccctaatttgagaaatatgagagattatatacaaacatatataagaaaatattgtttattattcttaaaaaag

SEQ ID NO: 3439 - DNA, 5016 bp, Oryza sativa
  unsure (1)..(5016): unsure at all n locations
tcctgcagcccgacaaatgattttttactggtagatgtctatctaccatatatgaatgcatgcaaacaaacagagatgtatggcatatcctctgctccaccagcaaaattccatgtcaaaattaaagatatgtgaggaagacaaaaaaaaatctggaggagcgaagaatggagcaacaccatctcgaacttcaggagggtgaatctgtggaggccacagcacggtcagcaaagacgatggtgccggtgcttcctcgtaaatccataaagtcatttatagcacacaagaaaaaatgttagtaaaattttggaaaccgatatgctaaatcagtggcggacccaggatttataccctgggtgtgcccacaaatacaagccctacacattggtctagagcatatacacaaaaatataggcaaaccgagcattttatacaccaaaatgtagagccctgtacatggcctagacaaagcataatctgaattttctgatgccttgctaaaagaagacaatgcccttgttcctcttcgtattaactgatttcagaattttcaatttttcaaccaatctctagctctcctttaaaagaaaattcagggagacaaagaaactaaaaatagtgagagactaaaagtcccaaagagtatatctgtatctgaagttttagatagatgatgcgaagctggacctgcttgcttgccttggtcaatgtggttgctgctagctgcattccttgcgttgctcacagactcaccgggctcgcatcgacattgcttcgccatgtctctaaatgctagtggctgcggctctcgtctccaccgtcgacgctccacactcgccgtccagccaatatcggtgctctggcctgttgactgtcgtgctcttcggtgtcaccgccgccgctcgctgaatgtggaacaacgcctgatgccctgaccctagctacctttcacacgatgccaagtggatacgcgaatgcgaggtgaagcggggaacttgcacgatgcaaagcgcacaacacatcacacaggcatctatgatgggctggctcatgcgttcatactcatcaacttttgccccaaactaatacatgctatatactataagtttttcgtttttttggtgtgccggngcatacccggcacaccccctgggtccgcccctgtgctaaatgttccaaaaaataatcatacataatacaaatagatatgaaccgacacaatttttctcatcaatttaaggttatatggtttcaagtaattttacttttagtatagagtttatacgtttcaaggtaattagaaaaaaatcataaccaatgtccaaatcagttattaagcaaaacatgtttaaaatgaagtcagggaatatttcaacaatattattctaacataagcattcacaataaaaattaaagcaaaattaaacaaggtgtccgtgcatttctagttcgtattaataattgaaaccactcagtgctagaaaatcagtgcaatcggcaccaacgatcatcatagtcggaaagtcagtggcccttaaaaaccgggcactgacgaagtgtcctaagctattgaccttattttattttatttatttattttcaaaaacgtgataataaaaagaaaggatcatatcacagattcacagctactgctggcgcaggtatttccacattagttcggcaaatagtctagtgcagtcgtgcagacataatatgatgtgcacttgcaccttcttcaggtacaaacgtagttcaatgtaccatcagaatgtgcagtggcgaatgtacaacgtgatgaaaatattattggggctttatattaaagtcataatacataataattataatatactttttcaaaatcctacgcggatagggaaaaaaagaggattaaagactgaagtgaactgaaaaagattgaaattaataggtataagagcactgctacacatactagttttttcttactaaatctttactaataatcatctcaaccgtttgatttaggtagatggaagttatgaaaaatctagatgaactcgtagcatgacacttcagtgttagaatttagtaagaaaaagttagtacctatagtcttttccatgtataaaggccatgagctgcacactgcaacagctactagctagaacacaagagtaaaaataatctacaatataattaatgatcacaattcacaaatgatccagctagtaataaacagcctaatgttttttcatgcacatcatttctttcaccctgaacgtctccagccaactagccatcactgcttggccgtatgctggttgctgtgcaaattttgctggcactatgaactcactacgcaacagatatatgggattagattcctgccaaccagagagctggggctagagccccaaccaataacatgttcaatatgtaatttggtgttaaatctgtacggaatttctcaaaatatattttgtttcatgaaatttactcaattatatatatactccctccgtttcgaaatgtttgacactgttgactttttagcacatgtttgaccgttcgtcttattcaaaaacttttgtgaaagatgtaaaattatatgcctacataaaaatatatttaacaatgaatcaaatgataggaaaagaattaataattacttaaattttttgaataagacgaacggtcaaacatgttttcaaaagtcaacggcgtcaaatatttcgaaacagagagagtagtactgtacggtgactagggttgactagtccctctcgtccaatcctaaagttggcatagctttggacagccgctgccgtctttgtgtgcacaacaataggctataaatgtagctagctttggcgtcctccgatcctatggttgtgtttagatctaaagtttgcatccaaacttcagtccttttccatcacatcaacctgtcatatatacacaacttttcagtcacattatcttcaattttaaccaaaatccaaactttggatccaactaaacacagcctatatacactactcactccgtctcagaatataagaggttttagagttggacacgattattaaaaaagtagggtagaaataagtggtgaagggtcgtgattggatgggtagtggagacaggtgggaaaaatgaatggtgaatagttgtgattggttaggaagagaaatatttgtggagaagtagttatattttaagataaattctaagggctaaaagttgttatattttaggacggagagagtagctaggaggctttaatacacacgtcacactgtacgctgtgaaggaacaatgggtttctggcgccggtgcacaccgtcgacatcggcctgtgcaggcgtctgtgtcgtcgccctcctccttgtggctttggcttgctgcccgacgcgcgcacgcggcgctgccccggcggtgtacgtacttggcgactcgcaggcggacgtcgggaacaacaactacctgccagcgacgctgccgatgtacaaggccaactaccctcacaacggcgtcgactacccggggggcaagcccaccggcaggttcagcaacggctacaacttcgtcgactaccttggtgagtatttcatcaacgcgtacactgcgcactcttgggaattaaaattagaggctattgtattggctatgtatatacatgtgaccattgtcttaaggctcgttcgggttggagagggttgaaggggattggaggggtttgagggggaataatttcacaccacaataaatatgtaataaatttccgctgatctctttctctttgggattaaccgaagatggccttaagggaaaatatttttttcacggcaaatacttctcttgttgttccattaattgcagctgacagtctcggggtggccagccctcctccatacctctctataagcaacacctcggtatacctgaggggtgtcaacttttcttcaggaggatcaggggtgtctaatctcacaaacatggtaatattagctagaacttgaaactgtacgatcgagattaatgtctttcgaatacgtagtactctggtccatgattacgcgcaagtagtaattaattttgtatacttttgcgccatgcatgcagggtcagtgcatcagcttcgacgagcagatagatcagcactactccactgttcatgcaacactggtggagcagctcggcccgcgtcaggcctcgacccaccttgccgaatcgctcttcagcgtcgccatcggcggcaacgatataatcaatcgcgtcctgctgagccagctcgtgggcacccaagaccaattcatcagctcactggccaactccctgaaacgccagctgcaggtatgcatgtacacacaaatgacaaatatacaatccgtccagctgaatgtatatcgaacaaaccagaaattttgacaaactaaccattttagagaacttgtttgaataagaaaccgtgctaaaaactaattctaaaaatataccattcactcagtaccaaaagtccgatggcatcgtatcgcataagatctcggtgctcagacattatagctctcatggctgatcaaatagtttatttttagtaagtttttgggtcagttcaacctttaaataagtttttgatactgacctttaaatatgtgatgtgccataaatttcagaggatgtatgacctcgggacgcgaaggcttttatttgtgggcgcggcgccactggggtgttgcctgatgctgcgggagcagagccccaccaaggaatgccacgcggaggccaattacctatcagctcggtacaacaacgccgtcaccatgctcctccgcgacatgagcgcgatgcacccgggcatgagctacgccttcttcgacacgtacaccgcgttgctgcagtacatccggcagccagaggcatatggtactagtactactttacagtgtagactactccatccgtcctataaaaaaccaacctaatgattcctccgtattttaatattccctccgtattttaatgtatgacgcc

SEQ ID NO: 3440 - DNA, 14125 bp, Oryza sativa
gtcatacattaaaatacggagggagtatataataccgttgactttttttactaatgtttgactattcatcttattcaaaatttttgtgcaaatataaaaatatttatttcatgcttaaggaatatttgatgataaacaaagtcaaaataaaatgaatgataattacataatttttgtaaataaaacggataatcaaacgttggtcaaaaagtcaacagcgtcatacactaaaatacggaggaagtactacatatgacacattctaatactacgaatatagtagagatatatctgtccagattcatagtattaggatgtgtcacgtccgatcttagatttgatttttatgtgacggagaaaggatagagcaatcagtctatactaattaagagtgaatttcatagaactatggatactttaatcaaattatcataaaactataaatctaagatattgttatataaaaaaatatagatttaatgcgaaatttctcataaaattataaatttaagatgaagtgtcaaaaaataaatattaaatagcagatttttcatggaactatatgtgcccatttaatcatagaacgcagtacatagactaaagagcaatcagtgtatataccggaatatctgaacatatttagtacgtatgagtgctcacatgaaaatataattaagaatgaatattttcacaaagcttccgatgctttaatcaaataataataaagctataaaatttaaggtattgttgcatcacaaaattaaagatttcatacaaaatttcttataaaataactataaatttatgatgaagtgtcataaaaataaagattaaatagtagatttaccatagaactacatgtaccaattcaataacaaaactacaacttataactccaacatatataacggtagtggtaaggatttaaagattggaatccgtagttttgtagtaactttaatagtaaagatgtagtttgtgatatttggtctataatttgtaattttctgataaatttgtcactaaatctacggtccattttattgtgatacaaggttttaaatatgtaatttggtgtaatttactctataattaatattttatatttcatattaaaaatacatctcctatgaattaatccaatgccattttggtgttttttcttttattttttttaggttatactgaggtgaaagcagcatgctgcggcctaggggacaacaacgccatgttccagtgcactccggcaagctcgtactgcgccaaccgaacaagctacatgttctgggacatcgtccatccgacggagatcacggccaagagactcaccaaggttgcgtttgatggatccccgccgttggtttacccgataaacatcagccagctcactgcgagttaggcatcaagtatatatatagtacttttgcagtgctatcgatctaccgatgcatgattacctgcaaaaattatctaaactattagtttaattaaaaagtactctaccaccagtagaaataattataaatgactcattgaaggagaaatgatataagatcgtgattgattctactaacaataaccaccatggaaataaacataaaaggggtaagatggatagtatttttgtctaatccactagctctgaaaccgatgagaaaagtggctacgtaggggtgaaaatggagcggattcggacggacattggtcataccatatccaacatcatttttttaagcggatgtagagcgggtgtggatgggatccagatcccctagagttgggtataactctaccgggtgaagttggccaaatatgtgccattccatatatatttcaggggctaggattaagcggaaactattctaatccctcgaggggatgttccctcgtttgctcaaaaaacatctaaacggttatgaaaaattctggaaaaatttgacaacattcatacaacacatatatacaactccacaaaatcttaactccaaactcaactcacacgtcgagatataaaaaagacaaattcagcgtataaatagtagcgtactgtttatatctaaatttgtcttttttgtttctcgatgtgtagatcgaatttgaatatgaattttggtggacaagtaggtatcattatactctacattatcaattttttttagaatttttcacaactatttacatcgaatttggaagaaacaggtatacgaggggagatatcccctcgagggattagaatccacgattaagccacattaatttatactttaaaaaccagtaactgaccatgcaacaaataaactcgcatcaacaacttatcacgagatcatttttattgtataggtagtccccttgctcttccatttgtctcgcgcgcatcggacgctgtcctgcacgcccaaaaacctttgccctgccggctggcttcgctctcgatcgctacgtgcgtgcagctgccaccgccggccgccgccggcgcaacgcacgcacacacaccaacaagtacgtatttgtgcgcgcacgcatgcctccgttacagagacgtcgtgcgtgtttgttaataagctacgaacaagctagctagagatcaagcaacgcaggcatgtcgtcgtcgtcgtcgtcgaggcggtgggcgtcggcctccgttacggacctgtcgtccgccggccggtcgcctctccccgccgccgcgctctcccccgtccgcccgagcgcccgccgctcccccgccgtgtcgcgccccgatccggcgccatccatcgcccgcacgatatggccttcctcctcctcctctaacagtggcaacacgagcactaggaaggcgtcgccgtcgccctcgtcccctgcgccagccgcgtcaaccccctcctcctcctcgtctgtggccaccacgctcgccgaccacctcgccgaagactctctggacgcgccgcctgctgcgctctcgcggcagcggagctgcaccgagctcccgcgcttcgccgacgcggacgccgaggcgaggaaggtcgtcgtcgccaggtcgggcggccacgcgagcgcgatcggccgctccatgcggctcctcccgtccacgaggccagccggcgtcacactcaccccgggccgcgtcgcgccgtccgacctccgcaggctcgacgccggcgccgacgtcgccagctccgggtcggagtgcagcgacgcctccaggggcggcggcggctccacaccgaggacgacgacgaagctgcccaagccgccgccctcgccgttgatagcgcgaaccaactccacccgcctgctcgggtccagcaacacgcagtgggcgctgtcgccggggcgacggagcggctcgccgctgaagacgacgctggcgacggtgccggagctcaagggcaagacgaagagcctaataggccttggatggggccatctctttagccggaggaaggcggcggcggcggaaacggccaccggagcgcaagcaacggcaacactgtcctcgccggcgtcgcggcggagcggtggaggtggtaatagggagatcggccatcagatgaagatgatgcactgccggctgttgcagtggcgcttcgcaaatgccaaggcagaagccgtcagcaagaacaagctgtctattttcgaggtatatatatatcaagaatgcaccgttcacatcaatattataagtacccacacttataatttgtgagcctatataataactaaaatttgttcagtttggtgacatacctagtttgttggatttcagcccaaactctcagcgtcgaacacctgcagctcagtgaacagtgaaattctcaagtattcgacgaaatgaaaacgagcctaatagtgttttttcttaatgtgttaacaaaatttgcagtggttaattttttttcccaaattgagatacatggtatacctgcatatgcttaaatgtacgtatgtatgtgctttaggccgcctttggaaattaaacatcaattcatcaaatggtatattatgtcgttatgttttattttactcctaacctatgtgtatataggtggaattcatgggtgcatgggctaggatatcagagctgcaaggtaaagtggcaaggaggcgtgtacaactcgagaaagagaagctcaaaatcaagttgaattccgtactttcttctcaggttgatacataggagtacatgtttttgttcagttcgatatttgtccgtcaaaattgatcctttagtgattacttctctgacattatgatgcatccatgccatggtgaatatgtgcagatgagaggtttggaaagctgggggcagctggagagcaagcatgctgtggctttggattctaccgtagtttgcacccaggcagccatttgtaagctccctcttaccaatggcgcaaaggtttgtatttttttttcatttaaagctctatttcttaaaaatatgcacttccaacataaaaagacgttgatgaatacacttaggttgtgttcggtaggggagttgggaactctccctccaaacacgtaaaacgagatggttcattagcacgtgattaattaagtattagctattttttctgaaaaatagattaatatgattttttaaagcaacttttgtatagaattttttttgaaaaaacacaccgtttagcagtttgtgaagcatgtgcgtggaaaacagaggaggtgtagttgtgaacacaagctgccaaacgcacccttaggccagtcacaatggctagtgtcattgcacggctacccaaaatattataccatcttctctcaaatgaaatcttttatgaaacaatccccacagtggaggggtttcactttgacgtttccaagactaagcaaagcatttaattgatacaagttgctgggatcatttgtacccaaaatccggcgcggcgcgggagaatgcggaggtcgcacggcggaggcggacgcaagagatccggtgaatgaaacgaatcggcctcaacgggggtttcactctgttaccgaggacttggaaacgacgctgacgagtttcaccaggatgaaactctttccttctctctcatccccatttcatgcaaataatcattttttattcagtcttacccctattaaatgtgcatgacacaccagtgaaacccccattgtgactggccttaggctgagtttttcgcacgcaccttaaggtgaggttgttattgcaactcgttaaaggtgtatgatattattggttacgacagctgatctgatacagataagtttttcacattattgatcattcatcaatgactagacccttcactatcacaaatgacggtttaagtacgacatagatgacatgttccgcaccagcatgatattgaattagcatgttataatatttcaaaaattcaaaaacatggattttatcatcgtttccttagtaggaatattccaaatatatatttttctgttttttctgacttttctatatatgacaaatatgaagcatttggaatcctctcactggccccatctacaatactccctccgtttcgaaatgtttgatactgttgactttttagcacatgtttgaccgttcgtcttattcaaaaacttttgtaaaatatgtaaaattatatgcctacataaaaatatatttaacaatgaatcaaatgataggaaaagaattaataattacttaaattttttgaataagacgaacggttaaacatatactaaaaagtcaatggcgtcaaacattttgaaacggatggagtattttactaaattcgcattttacttcttatcaagatctccctgccatcgatgggaatcatactacagcaggcgcttgacctcactatgaccaccaagacaatagttcggtcgtttactccaatggtaataaaaacacatcaaaataagttaatgtgttaactttatttttcgaaattcgatgcagcaatctgataaaaaaattgttaccattaatattaatgcagctaattaattactttttaattaaattgaagtattttccatgataccaggcccatgataccacattgctgatcacagagctagtagctgtggcaagagaagagcatgctctgttgcaagagtgtctcgagttgctgggccgagtgtctgcattgcaggtagctttgagtcaatatgttccatgaaagaaaacagcatatattcttttcccttatttttatttaacgcgatgcttatgctaatcttcattgatcgtgcaaatccgcaggttgaagaagagagcttgcgttgccatatgcttcagtcatagttactgaatcttatgtccgttgatacagtatgatgacagtagctaaatgttggcttgttcgctctgttatcatttttaaccttaccaaactaaaataggttgaataacagcagtaaattaatatttttaagctgattgcatcaatcagctgtagacatcacatttttgtcagtatacgtaggggctacctaatgcaatacaggaaaaaaaattgaaaatatactgtttattttttctaaaaaatactataagcaaactttattatatgaatagaccatcgtcgcgcttgagataaacgaacttgttaacgatatcatcgtgtcctatcgccgcggccactccgccctagccctcccgccgccaccagacctcacctaccgccgtcgtcgctgacatgtgagatgtgagagagaagaggaggggatagagagagaagagagataggagagctgacatataggtccaagggtatttttgacattccacatgatttctctctcctattcaaccgaaaattattattttaattggtgcagtgtccaccagcaaatatccaacttttgggagtattttccccaaagtcatttcgtgtcatgtcctacagttaaaaccgcaaactcacgatgtcatgtagcaaaatttgcctaataaaaaacaaacagtggatccgctgcatcgcgctcccgacaagcgaacttacacgattaataattagtatcattagtaattgattaattaactattatttttctaattattgttgtcgtgacccaaggtcacggacaaatagggggatagacgggagctaatccctttactcattttggcatttgagtcgtgccttttcgttttttgtgccccctcatctgcgcgtgctccctccacctcgcgcctatataaaacattgttggtcactatcagagagcctcacgtgctccagttttatctcgttctttgaccactttctctttctactcgaactttctatagttttcgagtttaaccatgggtaaaactgtcaagaaaatcgccacaagcctaagttcaaacagtcttcttcaagcttaccccctccgtccaaaaaaaaacccaatcctagctacgaacctggacacgcaacacaatcctccaaggcatccagcaacaggtggatagaagagtggtggctaacggccgtgtcatggaccccccgcgcgaagagcagctgagcatggcaagagcatggaaaagcgaagtaggaagggctcccgacatgtcatcccctcaaggcataccatcatgtcgttgcacggcagctcgcgcgtatccgtatcgtggtcacatgtcagccacaccatcgggattggcgagagaatctccaagagacaggagatggagtacattgtgatgcctgagcacgatcgcaagcaccaccagctccatgagtgtccatgcgtgcacacaaagagtcgctaaatcatgggagaggtgtgcggtggccggcgaccgacagggagaagggtggcggtggtaggtagaatcccgacggcgatgactggcgatgggtgggagaaggcttgcagctgtcgagaagcttcatagtgataggatgtggggagaagggcgtaggtgtcgaagacgatgcgaccacagtgtggagtagatggagttgacctcgaagacgatgtggcgaagccacgcgtgctcctcagtggaggagaggcagagctcagggacacttgaacacatcagcttttgagcagctcggcgggggtggctctgagcttgggggataggagcttggccagcgtgacaagacggaagccctagccctcacgcgcgtaggtaaagatgatattgtcgttgcagttgggacctgggcgcaccacgtgcgcgctcccggtcgttgggagccgcatcagccggtggcctccgctatcgagcttttccctatcggcccacaccattctccccatccattggcggctgccttggaggtttgggttgagatgggaagagaggtaagtgaggtggaagaagattgctggctgacatgtgtggtccacgtgggccccacactgactcggccgccacgtcaacaaaaccaaagagcataccttgggatcaaatgtgacccggttttgcaagattagggatacattatatcttcaagttcggaacagttaaaactcgacaacaagataagggaggttaggtgaactttttccgagatgaaaaatttccagcctcatgggcctgtgcatatgacccataggaggcggcagacctccggctcctcctcgcccgccgccctcgactcccgtctcctcgcctgccgccggcgccgatctccatcctgctagcagaggtggcgccggcgttctcctgctcccgccacatcatcgctaatccatcccatccggcctcggccaccccactgcttctacgagttccatacccagaccgccgccgccgccgccgccgccattggtgaagcccgtcgccatcgccgtcgccgcttccacgcaagtccgtagcagcggattcctgcagcgccccccgaaacatcccgaatccccagccatggcggccggagcagcagcagccacccgccgcagtctctccgcgctccttctctcctcccgcgctctgcaacgccgcttcgccccgctcgccgccgccgcctcctcagcctacctcgccccgtgggcgccgccgtcacgcggagcgaagaccgcgtcgtcgggtgggtctgggtactcgccgctgaacgacccgtccccaaactggagcaatcggccgcccaaggagactatcctgttggacggctgcgactacgagcactggctcatcgtcatggagttcccgaccgatcccaagccctccgaggaagatatggtcgccgcatatgttaagaccctcgccgccgtcgtgggaaggtatatgctcttcttctccaactatatttgagaaactccccttgaactgaagcagattagactaattacaatagtgggcctatacatcttagtgatcgaactgataataaccaaaacatggctgttgcatcaaatttgcatgatgagaaattagtaacaatatatatgatgaatgttgtatcaagtttgtactgttagttgtatgtttcaaaaagtcgagtttacattgtggttttttagcatggcaattaggtagggaaatgattgttcacagactatttttttggacatgagttgccatcagacattaaactgttaatttctgtcttaaaggcatgaagcaaaaatttcacccactgaaacatttgtgaaaattgagaaaaacctagcggcaaccacatggtgacatacagataaaacattttgagtagtagtatgcatatgcaacatctaaaactattcacttccagcaatatgcacgctttctgcaaacactgcaacttcagctacattcaggacaaacagtggcaacacttttaaagtctgactgtgccaactctcaaaaagttcaaggagtaatatatgtgacattatgaaacctgactgctcaacatttttgtttcacatgggcaacatcagcatacccaaaacacgtaagcatggctgcaagtaagcttgctgctgctccgcgttgctccggctgccacatcacactacccttgaccaagagccatgcaggcatcgagcttgctgcttggccctgagagccatgggttgtatcatccccttgctcactcctatggagacacctccatggagatccgctctgcgaatatcccccacccccactgctgttgtgttctcccatcaccttgctccctgcatttcattccccaccgactgtgtgagtccgattctcaagtcagagactggtgtggactgcatgcgtgcgtgcgtttgtgtgagtgtgtgtgtgtgtgtgtgtgtgtgtgtgtgtgtgtgtgtgtgtgtgagagagagagagagagagagagagagagagagagagagttgtgacttgtcaggtttggttcttgtgttgagctcctgaatcattgtggtggctgtggtcatgatttggccaagcagctgcaggcaggcacgagatctgcttaacaaaacacaggcctctggttgagcgtcagtatcagacatctgcagtctaattttctctaatatcatttggccccttcttcatagtttcatatatactcttagtgatctgcaatgttctaatagatgataataactaattgaatctttatcctcaagatcctaatattctatatttgggcatcatgtaggaattcaaatgtttatcataactttttttttgtgtgcagcgaggaggaagccaagaagaaaatctactctgtctgcactacaacttatactgggtttggcgcattgatttcggaggagttatcatacaaggttaaaggtgaaacttttgtggctctgcttttctgtaaggttcacaccatgaatccatgttggaaatatttttttcatttactttgctgctcttaaaggattgcctggagttctttgggtattgcctgactcatatttggatgtgccgaacaaggattatggaggttagtaataatagaccttgttcctgctctgtttgcgattgtgtaggattataatattcttatttggttggatttcttgtagatatttatttgtttcactagttttttattaatcaagtggcaacaaaatgtcttattgtgttccagaatatataatatgaaaatcaatggcaatctaggaaatctattttatttaacttcagttcgatatatgaaacataactatatagctccacgacagcttgaaaataagcaaaacacaacacaaccaccacaaacttattattttttggaaaagaaaagagtaacaaagtgctctactaacaaagattagacataaagagaaaaatactacatatggtgggagagtggagaaacaaaacactacaaggcaattaaccttgacaccaaacagggcctcgaccagaccacccaaggtggaatcttccccatccatgcataatgggaggaatcctttctaatatctttttatttcattgaaaccaaaggtgcaactaaccagagtgagcattttgttaacaattacagcttgtgactataacggtactaacatgccctaaaaagtatgtggtatattcaagtgaatatcagtcaaattccagcaattaatactaaattggcaaaatggcaagcacaaagaggtggagcaatcgtctgaggcattttcacaacagagaaacagataaagtggatttagctctaaatttattgtattgtaactgattctagtgttaattttctgttgtgcgacttgttagtatctctgactccttgggaagcattgtgtgtcatacatttactcttccaaacccagctataagttgatatggtttatttttctcaaaaaaaatgatctggtttatatgttgcctaaggctgtgttcaggaggggttgggaacccctcctctctggcacacaaaacgaagcagcagtttaaaaatggattattatgattttttaaagcaactttcatatagaagaacgaggaggaaaagttgcaaagtgtttagtagtttggaaagcgcgtgcgtgaaaaacaaggaggaaaagttgggagctcgtgctaaagaacaaagcctaacaatgaagatgagctttcatatagaagaactcatgaaaattccaaatacaactccaggagtcctgactcctgagtccagaccaggtttaattctgttaagggaattcttaattgtaattcctgaagtggatgatggaaactaaatggcatggattttgtcgtcatgcattttttggcaaatgaaaaaaaaagtgtggagctgctaactttaaagtattatttagcaatatatatgttgccttagctgttttgtttgtcctcgttacccacttgaggcttagttattgcctcgatggcttgaactatggcagctgttctaaaacatccaccagaaagagctcccttctatcttgcgaaaagaatggactctctcaaaatgacttttatgttgaagaacttgtgcagaaattttgactcctacgttgatttctttgccactagacacatccacctaaagcatccgtttgtggacttttgagaaaatagttcttttaagattagcaatcatagttcgtagttcagccagcaatagaaaaaacacttgtgtaaaagcatagacaccaattactcttgccagcgttccttctttagaaagactgacaaccttatgacctgagagtgtattaatacatcttcagtgctcagtctctggagttggttatgcagataggtagcctagataaatgaatggagaatattccttcttacagccaagaatcctagatagatgaagttgcttctgatcacacacactgaaaggaacaatgttgaattgtgtaaattgaattttagtcccgtggagttactgaaagaatcaggaaatccttttggcaaggtttagtattgccaaagtatggttggcatattggattatcagaaaatccaatgtaaaaatattgacccattcacccatatggcatagaataatagtatgccatttctacttcctgatctaaattctgtgaagaagatcagcatcagtctcagttcatgggtccccatcatttcctcatccagattttgatgttgaattatatgtgtgctattctcttatatacgcctgtctttcctgttttcaacttttggattatggatgatgttttgacaaattacattatgtgcttgtaataatttcatggcaccacttgtaccaggagatctattcgtagatggacaggtcatacatagaccacaattccgatttactgaaaggcaacaggtaaggagccggcctcgtcctcgctatgacaggagacgagtgactatgcaaactgaacagaaagaagcaatgcagaaaggaccttcaaatctgcagcagtagcatgaaaccatgccatatacactaaactgttgccagaatagcctaattatcctggatatgtttaagttctggagtgtgtccatttctggaaatttatctattgtcttgtcagtttagcgccgtggagcctatccgtggacatctctgcagttaagaaacatcatattgaccttgttatatgagaaatcctgcacttttatctccatggtacgcctccgaataaaaaatatccagtccatgccctctggttttaaaagagctccgaataaaaaatatccagtccatgccctctgatgttaaaagagctccgtgccacaaggcagctcttttatgaataattgaatatgtgccagcaccctttttggaaagggataaaatcgtaaaactgccctgtccctattccttataattcacatcagaagtcacttgaaatttggcattccacctcataattcattttgttgcaaatattcaccttcctacttggttttgtggtaaaaaccacaatagtgcaaacatgtttaatcggatcattatgttttcataaattgtgagctgtaaatacgatctataccaaaattaaatactttgtattaacaccttttcgaagattccataaaatagaattgctaaagacaattactaatgagagcctaaatgttggtgcactgactttcgttatatgataagataattgaatggaacacgaagaataaatctaatgtagcgatatcatgctgattcggttagcacgtgcacactgcgattgtttttgcaacaaacgactaggtggtgagtatttgcaataaaatgatttatgggatggaatgtcaatctttgatggtttttgcaatttttcatataagctgtgaatt

SEQ ID NO: 3441 - DNA, 2026 bp, Oryza sativa
ctgttccacgtgcacgtttttcaaacagctaaacggtgtgttttttgcaaaaaaaaaagttttatacaaaagttgcttaaaaaaatcatattgaccccttttgaaaaaaaaaagctaatacttcctctgtttcatattataagaatttctagcattgtccaaatttatatagatattaatgaatctatacacatataacatctatataaatgtaggcaatgctagaaagtcttataatatgaaacggagggaatacttaattaattacatgctaatggaccgctccattttctatgcgtggaagatcggttcccatcaagcccaagcgaactcagctttagagcagatacaatagcaggctattagccagctataaacatattataataagataaaacgatgagagaaaagagcagcgggctatagatctgtagccagctacagcacggactccaagacgcaatgtgtgtatgacaggtggaaccatatattaatagtatagtaagcaactattgtataaattgattattagattgactatcttattaaacttgctctagggcaaatactataatgtttgtttgatgtgttgcccctaaaaatacgtgctcccctggacagcccctgccctccccgcatgagtttgaaggatgtaaaaaaaggacacaggggtatttttgtcatttcggatgtcaagacatcggtggaatattgttaaatttctccaaattttcttccggtcggtctcgaaccttcgtctccagctctcctccgcaccgcagtccgcaaaccccagtttctcaagcatcgaagaatggaaagaggagatggcgctatacccttccgcgccaccaacatcgccgccgccgccggcacgcccacctctgcttctactgcggtattcctcttttttcccctcttgatgaaatatttcctaatttccttggcagtttgccatcttggaataaaaattttgtggaatcagggtattctcctgcttgtattctctgtagatgcggttactcagtttatcaatcgtctcatccacttagttgtatggggaaagcggaggctgaacagtttgcttggaacgggcaaggagcactgctacttctttgattgagatgccattagtgaatgtttctgggttgagagttgagtaggttctttgagggaaatgcttagtcttatggtttttgagaccgaatttatgcatatatgattttaagctcatttgttatgagtagcagtatcactaattttattcatcagattgtgatgtggatatgtggtgtgctgatcaaaagctgattttgtttgcgatcagggccgcccccagcaaggggatagggaaaatgctgtcagtgctgagattgagagggttaacaaactgccagccaatagttcctatgccatacaccgcttgaaggttctaaacaagcttcgccatctattatctatcaaggttagatttttttttgtgtattttcggaccaagataatttgagtcatcctgctatgcaattgtcctgtcaattggtcatctgtgcagtgaatttaaaattttcaacttattgctttttagttagtacatctcaaaaggcaattttcaattcttaacaagagaaaagaattgctattattatactatattctattaaagcctaatttaaagatagcaacattgctattacatgttgctggaggaatatcttaccatgttgattacgctgttggtttggaagaataattttcaaaaccaaatgcaaatttgaaggtcgtgagttattaaccatggtgtaattgtactatgtgctctttcaaggcatcaaagcaaaactattgcgatgtaaatgtggccacatgaaaaaaaacataaataaacccaaggaattgaaatattagattattggattccttgtcagttaagtaacaaaaagttgtgatagtttggtactttggttgctaatgtgcctagattgtaaaacccgatgaaaccctttttggcttagtgaatatgcaactg

SEQ ID NO: 3442 - DNA, 8996 bp, Oryza sativa
ttgattaagaaacccaaaaataagattcccacttgaattggtttttcaagagctgatacctaaaaaacttaaaacttgagcttcaattttttttatgcaaacctaacgtaatgatcaatgaacccaaaaacctatgtacatcaactaaaagttgttgaacatgaatgagaaaaacctgcccacgaacttggattttactgcctccgacctggccgccactggcccactgccattttggaatgctctgcagcatgatcgggtcaccattgaccattagtcctactcctcaggaagtccttgcttaagtgaggctttggctctagcagcggcaggcatgctgtatttctttgattggatgcattcaattgtgtacaatctcacgagcagtgctggaggttccaaatagcacacgaacctatatatgcgagcaccaaaagcttgttcgatgcttatatctaatttattgtcctaacaagaacagaaacttcttggtgaaatgaaataaaagtgccatggagttgaatagcttaaggacatgttttctctgcattatgatttattttatgaagcttatattcagttttgactttttgtaaacctagactgattttattttattttattgtgcaccacagagaacaacatctcaagatgaggagcttgaacttctttttgcaagcctttcaatttaaacactatcggactatcctgtatcctccatatgttacatatggtaggtaagctgcaaattaatactgaactttttcattttggcagctgtgtccgtaatcactgctggtattatccatccacttctctttttattcaaatggatcctatattttgacttttttttttacagcaacctatattttgacatttgatttgtatataccattttatttgcagctgggtggctccgtttggcatttctgctgtccgtcgaacatgtttccagtacggttttctgaagttattggaaatcacccttctattttgtagaactttatgagtggatggtgttgaaactatgatgtatggagtatatgatcttccgtacgcaaatgtcactcttaaccataacggaacttctatagttctattgtagatgcccaaaactttaaaaattgtatgacattattaggtgttgctatgttggcaatggagcaaacattctgaatttatgctacacttggaagtgtagcataaattcaaatctaaccaccgtaacgcgtttcgttcgagtaaaattcctccacttggaagtgctctttttttttttttttggcgttgcgttgcatatggcattacaaaaagctatctgtttctatttgtttaagctgcagcctgccatagaggaacatttagcacagtacacgcttcgttccaagttaatttcaactatatacttgaaagttatttcgtcccaagaaataattattatcacctaatagtttagattaccctaataaataaaatgcacatccgataaaattagagatccggatgatggaggatttaaataataatattttagttgaaaagatacgatagttaatgacatgtatagatgtacatcttatattataaaacaacttattatattatggaacagagggagtataattttttttaaaaaaatgtataggaaagttgctgtaaagaaaatattgattcatttttaatttttttaagattacttattacttgatgtaatacttatttaatcatgtgttaataagcaacccgtattcggtgtacagcctaaaggggaacctaaagggtgttgtgagtaggaataagttcatctgaggtcccttaactttacaccgaatacaattttcgtccctcgaccggaaaaccagacacaacgggtctctcaactattaaaaccggtgtagattaggtcccttggcggttttgagggcggttttggctgacgtggcgcctacgtggctaatttgactcggtctttatccgacgtggcattgacgtggcgcttacgtggcaattcgatctgtcgaacccacatgtcagtctcacatagaaaataataaaaaaaatcatgggacccacgtgggtcccatgtgtcagtccaactcacccctcttcttcctcctttctccccatctctctctctcttcatctccctatctttgctctctccaggcgccatggaagacaacagcgcgcggcggcgcgcggccggcggtaggagaggagggagcaacatgtaaagaccggcgaggcgagcagggagggaggacgcagggaggccggcgatggccgagcgccgtgggcgggtgcttgatgacgatggacggagggagagatgtgcagccgacggcggccagcgggagagggagcggcgatcgccctccgccacaacccgcctccaccaccgagctcgtcagcgaccgcccaccggagcaaggaggatgacagccggcgacgggtgaagaggacgaaggcggcggtttggagtagaggtcggaggagggcccccaaccaccaggatggcgctcgatccgtcgcgtttcaccaccaccgagcttgtcagcggcagcccaccggagcgaggagcttccgcttccccttccccccattgacgccgccgctgcagcagctgaggcgccgctccctatgccaccggttctgtggcgcacgccggatgcggacggggacgccatggccgtggccgcggacgacgtcgacgtcgacctcagcatcctcggcgactcccagggcccccgcgccgccgccactaccggggggagtagcgcacagcagacgtcctcctcctccggctgccaccgccacgcctccccgcatggctgcatctcctcctcctctgacggccatcgccggccaccgccccttctccccgccggccaccgcccttctcccggccgccactaccggatctcgattgctggcgttgctccggggggacctgccgccgcccgggtcgatctgttccgcccaccgccgtcgccgatccccttttatcgccctggcttcctcctccagctcgctgctctcgccggtgggcgccggtctcgccgccccctccagctcgccgctctcaccgaaagaggagaggagatgggagagagatgaagagagggagatggggagagaggaggaagaagaggaagggtgagtttgactgacatgtggggggtccacgatttttttattatttcctatgtgagactgacatgtgggtcccacgaattttattatttttccgggtcaaattgccacgtaagcgccacgtcaatgccacgttggacgaagaccgagtcaaattaaccacgtaggcgccacgttagccaaaaccaccctcaaaaccgtcgagggacctaatctgcaccggttttgatagttgagggacccgttgtgtctggttttccgatagagggacgaaaatcggattcggtgtaaagttaagggacctcagatgaacttattccgttgtgagtaagcccatccggcccaaatgcttcttacagctggtccagcccgcaaaaagtcggagacagggaccctaggcctagaaacaaaagcgaggaacagcattcacccacctgcctgcctggaaggaagaaccaatccaagaagaagcgatggcatctcgtctcgttgcggcggcggcggcgtcctcctcgtcttccccgctcgcccgcctcgtctcccgccgtggcctcgccggcgctgcaggtatgcgcgccgccctcctcctcctccaccttcccagatccgcgggagtcgtagccgccggctgtctggatcggactgtcgtttcggtccattcttggatccacccttggcagattcggggccacgatttggtagcgggggtagttgtttgggggtaggggcattggctcgattctgattagggtttgttcggagttgtttccgctagctagaaacggggtgcctgtttttattttgttttgttttgttctatttatgttgctcctgctgtcttacattcttgattggttcgtcttctgtcgtttccagatcaccatgggcctccgaaggtcaacatttggcaagaaccgatgaacccggctaactggaaggaagagcaagtgagtattcccctggacattcctcctgttttccgtggggcacatgtggctcttgatcttgatgtcattctattctactagggtctctactttgcctgcagcaagtgtcatgtgatcttgtaggcatgactgtcgattttattttccctcattttgttttatggcattattccagttaggtacagttatattcagtttaatatgtcttgttttacaagattatggcaacgggtatgtggaaatggggattgaaaggggattgttgcaacttctatattacaatgaaataaaattgacactattgttgcaataattttgtggtttgttcatacatctgtattatgcttaggaggaatggtccaaaatctgcttgatcgaactgcaataattggttagggttctaagttctatgattatataggctgttatgaattttaactagtaaatatggctatgccttctctgcaatggctggaaagaatgtttttctttcttggtactcatgattattgtcttaggacaaagcttatatgtagcgtgaaattaacactattctattgttccagtgtgctattctgtaatgaagtaaatgtttgttctgtatgaaccatctaataattctcaggaaagttatcagagaagttttcagttaatttactccacttaatagatgtgcttatttgttaagctgaaattctagcctctttcataattttaaagttattttactacgaaccttgtgcttgtggctcatgcccagatcatactcatcacaatcatctttcaaaaatcatcatttaaaattatcatgcttgccatagcgagctcaaggtgaggccaagggcagaagtgtgacaatgtactggcagagtagttcagggatggggactagaaagaagttcagaatgagcagatttgagtcttagggataaggatgcagagatggtggatatggttgttggtgagaatgggggaggttgtgcaggcaacgttgagaaccaagatgtcatccctggttcatcacttgctggccaccactggaagccaggaacttgtcactctcctccgtgtcgctctgccacaacccataccgcttctgtgtacagttggctagttttaagatagggttgtacacatgagatgggacagctgtttttactcccctctcttctccatcctcaaaattttttcctccatccctgtgcagcacctatgcgcctgcttgcgggcggttggcaagcagacaaaagcttggctagacgaggtgaacgtcaatagtatccactttgaggagcatttgtttcaactgtcaaggaaacaatttggcaacaccgtgaaataatagtgaagtagccaataagaattaattcttgttgagctaaccttgataccactaaacacacaccttttcagaaactataattctacagctattatcatgtactctgtacacccaatttggaatatttttaagatgtgttttcaagctctgcattggtcttctccttatgtcatcaacctcgttaattgtacatgcagtttcttctaaatgactctgttctacataccttaggactttgctggaatcatattgttttgttaagaaagttttcttagcttggaactattgatactaattgattgatagaccctatctataagttgatttttttctggtttaatttagatcctgttttttagttgttattctttactttgtgcagtttgtgctagccagcttagctatgtggggaggtattttttatggtgtcggcaggctttttagtgggaagaaggaagacaaaactactgaggtattcattttttacttatatttcttatcttgaataatgctcttgttctcagagttctgatggtgcatgaaatatttaactaatactccgtatcaattaatcatgaaagttagagttagaagcacaaggcacaagtacatgatacaatgtgttcctttcttttgaagggctacctctcgtatttgcagctatattattatgtcagtatagtatagtgtcaagatattgaactacctatttcagtgtcatcagcagatctttttttaccaattagttttgatggtagttttaatgcttgcaagtatctaattatatgagtcgtgcactgtgacaaagaacatgtaaatcaaagagtacttggatttgtctgtttggatagatggtcaagttaaatagatactcccttcgtcccaaaatataagggatttgggttggatgggacacatcctagtactatgaatttggacaggctcccagtccagatttgtagtactagaatgtgttacatccaaccaaaatctcttatattttgggatgtaaggagtattttacaagcactgtgacaaagaacatgtaaaatcaaacagtgcttggatcatttgtctccttggatagatggtcaagttaaatagatattttacaatcatgtgccaatttcatgatgtggaaaacatatgaatgcacatatgatctgaaaattaagcattttttccctcaaaggcatgcaaacgaagtattgctgcattctgaataaattttaattatatctgattgaaatcctccagtagagtttctatatctgtgctcaaattccccagtccccaaaaattatgcagctaatatgtttgcttcaagtaattacattgtatcttggaaaactcagtactttttgccaggtggttttttttttgggggttttcatgtttgatatggtatttatgtagttttatggcgttaaatacttctgctaccatccactactagtcagtgtacaagtgagaagtgataataggtggatttgtggaagtgagaaaaactgaaaaaaaataattgaaatttaaatagcatttgctccatggaaaatggtttttcccatggacatgtgactacatgcacagcttccactatcaaatgtgccgcaagattgatggtaatttttataattcaaatagactaattaatgttccatgcagtcaaatctcccagtcagaaagaaatattgaggcagagggttctatgtgtttaactatatgtgatacatgagtgtcatttaaccaaaaacaatgattcatgatccatgttcaatttacatacatgattgtatacttgcttgctattatgtttctgtcagcacaaaacttatctccattttattgtaatgttttacaggcggcgccagcacaggcataataggatttaccagagccttatttcatgctgcagacgtgcaactgtatgaaataaagaagaattttatggtctgttttaagtttgtatcgctaatggtaaattgtggcgactagatgggtgattttgtaagaggcgagattttgtggacctacacttgtcagccagcatgaataatctttaccgcagtggaactttggttgagaaactgcaacagcgtcttgatattttgttgtcatcacatcaattcatgttttgtaatcaatattggtgcgattgatcatgatcttgcgttatcatactcaggttgattacgttaccgtctggggagtcgaattacttccatgttctaactaaattgatttgtctattttgactgtttggattagtcttgcaaggtatgattgtggttgtttcacgtttttattcacattatttatttttcattattactctccatccaaatcgctcattgtgccttgtggcggtgatcgtgatcaggttcacagaaccgatagaatttcgtgaaaaccggttggttttttgaaactgctgggtctcggtttttgaaaatcggatggaatttcatgaaaaccggttggtttttgtgaaactgctgggtctcggtttttgaaaatcagtcggtattagctagttttcatacagtgttttgactgaaagacatcggttttcaatggtttcggtcggatttcagtaaagttaaaccctgatcgctatacatgctcacaccggcgataagattagtcatcttcaatttgtcagacgagacgtttaccctcctcaatgaccagccataacatgagcatgagtacgccggcttcttcaacactaacgacgacacctcagttgggcctggatggatgccctgcacggcaatacgataaccatgactcacctgagggatggatgactgtgcgtcttctttcctgtactctgtgcctctgtgcttcgatctctacacaggccgagtttatttcgaaactttttcttcaaacttttaacttttccatcacatcaaaacttttctatacacgtaaacttctaacttttccgtcacatcgttccaatttcaactaaacttttaattttggcgtgaactaaacacacctacaaataagatattcagtttgtaaaacacgtttactactttcttcatgttcacatttttctatgtctgatgattgtcttttttttttctttcgacaacttgtggtgattgtctgaataatgcgtgcttctgagttttgaacaatggagcgtgccgaacaaaaagtattgtgtccaatatagtatatcttagtaacacacataatgagggtggttgggggtaagattaagtgaatacttcctttgtcccatatttaagttcatttctagcttcgtcccataataagcacatttttagagtaaccattgtatcggagtttgtagaagtagagaatagtcgtattacgagcagataaagtgatgaatagttacattgagattagataaagtagggaattctatcttttggtatttttattgatatatgtgtgagatggtgaaaaatgaacttgttttgaaacagaggtagtattaaagatgagtcgtggttggatgcaaatgtggatcccatatttgttaacaggatgtaaacaaaccccgggat

SEQ ID NO: 3443 - DNA, 3498 bp, Oryza sativa
aacgtgaagaatgtgaatatattttgcgccgatggactcacatggttttgagctacaacatataaaatgagaaattattctgagctaaaacatggtgtaccataaagtggggcccacatgtcagcatcctgaagaaggctgtgggccaggggagccagccagggttcggccgaccccccagttggcccaatccaacccatcttcggccaggcggttactaccggcatcctatgacggttggagctaattctatctgaagaaatcgtcatggacacatagcaagaggagatgaaatatgctatttggatgcttgagtatgccacttgtcatgaggagagcaaagatgctcataggatgcttggagcatctccacactcccagagcacctctccacctataaatacccctcctctcattcattccctcacacacctcaagaaaaagatctagagctctctcaagtttagtttagtagttctagtgctagtggagtagaaaatagaatagtcttcatagtcctcgagtcttcaggagattgctggtatggctccagtagctttcctctcttcttttgtaagacatattgaattaatagaatattcttctttatacattttcggtattttattccattcatattacttgagtgccgactttacttcatacttgaatcaatatagccatgcaactagctttccagataggtgtattggtgtgggtttagtgtctgagtattcggttgctctatgtcggttgcaaggatgtagagtagtatttagtaatataagcacggtgcttagtttattagataccattaattggggtaatatacagtggttcagaggctggccgctgatggtgacggctcagtatgggtgtcctctgcatgtgtatattattctaagtgcaatttcctggggagggtactcctccgtatttagccccggttggatggccaggacaggttgtcgtaaggaactcagcaaccaggggtagtctcttgaaacaccaggaggacactaggtacggggtattggttgcatgactgtataatagcaagtatagactaaagatgtatgtatactagaagtacaggaatgatacttttcttattctttctccatttattttagactatattttagtgagagtatcttagttttttcttctgtgtgtcaccctaccctttgaactgaattaacctctgcataaactttcatgtatataagtaatatatgaattgttagtaaagttctctcttatcatatctttcattgggatcaaataaatacgacaccttggaatactcccgggtgaaatgctacaatggtatatccgtgcacttgcggatcacatatgtaaccataatataccaggattatttctagtgctattgctgggaattatatttctagtagtgtcgctaagaaataccaacaatactctccatggctccaaatcaggtattgtgttcttgtagtctaatttgaaatttgggatttagaaatttagtgatgagctttgctttaagaaattatgtcaatagcaacttataatttgtttaattgttcatcattcattaggaccctaaaaatggcacctagaaaaagaggtactaaagcaacagcagctgctgaaactagcatggttgcctcatcactagctccaactgaaggggtagaaaggtcatcaactgtgggcagtggcaaccaacactattgttgttgttcatgtggataacaatggtgcagatggggattgagaccatgaaactaatgatgaacatatagcaaaaaaagcaaagaagagatcctcgccagcttgggaacactacaatattgtttataaggtggttaagataaatggctagatggttaaaaagagtgggccaagttcaaatattgtgcctatttagctaggcgcaatagcaggaaatggtacttatgtgttcttgaaccacacaaaaacccacaatgtggttccaggatagcagtaactcaaaatggataagggttccggtacaacatcggttgaaacatacaggtatgatcaagagatctctttacaaaaattttatttggcaattatcatgcatgagtatcctttcaatattgttgagaatgagtattttgttgacttcataaaatctctttggcctacttttcctttgaagagtcgtatcacagttaggaaggatatacttggtatattttcagaagaatggaaaaggttgtatgagctttttaaaaatgttaatgctcactttagtgcaataatagacatatggacctctaaccaaaacaaggggtacatgtgtatcactgttcattgggtttatgacaattggtgtgttcaaaaaaggattatcaggttcatgcatgtaaagggaggcatattgggctaaatttagctgatgtattttctccatgcttgcataagtggttcatcgataaaaaaatgttttctcttactttggacaattaagcagcaaatgatgtttgtgttaaggatgttattaaggtgctgaatagaaaaagtcccctcatgtgtgatgaggcattctttcatatgagatatatgtcatatacttaatcttgttgctagagatggtttggcacatattggacaagctgtttttagtattcgatcattcgtgattcttgtgaagtgttctcctatacagaaggaggaatttataaaatgtgcatctgagagtggattggatatagcgaggggagtctcaaatgatgttttgacatggtggaattcaacgtactatatgttgtcagttgtcagatgccatatattatagaaagtctttcgagaggctttatgaaactaaaagagaaatttatgagggtcttgttccaaaagctgaagattggtataaggcaactaaacactttgcatgtgcttgaagaggtttgatgatatcactaagatttttttttcaggtacttcttatccaactgcaaatttattttaccacactttcgtgaaatcaaggctttaattactccatggatgacaagtgatgatgttgccatcaaaacaatggccacctcaatgaataagaaggttgagaagtactggaagaggtcaaatcttactcttgttgtggcatactttcttgaacctaggtttaagacaaaggcagtagagtataacatgctgaggtgtatggtaagcaatcatatcatgcacctatgcaaaagtttactagtgttgttaagcaattttatcaagaatatgcttctttttataagactactattgcaccaacaactagtgtcaatgttgaatcaaaagaaagccatactatagaagaagcagattatgattttatgaattatgtctatgcctcacatgtggatagtggaagtgatgcaagtgacttggataaataaatggcttagccatcactgttggttcctaatggagataaatctgatgtcttatcatggtggaaagctcaccaaagatgtatatcctgttcac

SEQ ID NO: 3444 - DNA, 631 bp, Oryza sativa
cagctggagtttttatagagccaaaacactggcctccattcttccccgtcattcatgttgatatctcaaatgacatacccgtgcacttgcagcgagtgcagtatgtcgcttttgcatcactcctaggtacaaataatcagtaattgactattttcttaaaacatatctatttttcaagaactataagttatcgaaagtgtaactacgggctaagattatgcatacctctcatgcagggttggtgatatgcctcttctggaacataatatgtgtcagtgctattgcgattatgtggggcggtatggtttcagagaaattcatcttatttaatttgcattcatgccttgtatgttaagcttatgtccctaatttgttagttttgagcaaatatgttaatttatttcatctatgcagaccctagggcctggtttctggctgccatatacttcattacaggatgcccaggtgcctatttttcatggtaccggcctctttatcgtgccatgaggtactacatataatgcccttactgattctctgaattaatattagcaaacattatagtattgtactagagtacctggtcaaaacttgatcatcactacttgacacttggttgtgtatatccact

SEQ ID NO: 3445 - DNA, 617 bp, Oryza sativa
acaggaatttgcatctaagtcaagaaacccactaataacataaaagatgttattatgaggggtacacgcaatggaatttttaaggatgcacctgcagaaaggaccatcttttgtctgcagtaaatcaatatctttacaagaatggcaatgtgtcatatgtttgttgttagcttcatatattggtgaggatgagaacttcatactgcaccaatcaattctgccagaaactaaaggcagaagtagatagactactccaataggcacttgcatctcatggaagtatttaataccattgctaacctccaaatggtcatcaccaataagaaacgaaagaatagttgtctgaaatcttctagcaataattacctggacaaacaaaagttatatattctcaatgaaatggtctaaacaacaatagcctagttatcaaagaattagagaacataaattgacaatttacctgttcttgattgagatggatgatgccaacatatttcatggtaacactagcattgtcttgcccacctggcaatttaaatgagctagaagtaaagtcagatcccaaatcacacttcaaagctaacagtatgtcagttggagaagctgttttgggacat

SEQ ID NO: 3446 - DNA, 1745 bp, Oryza sativa
cccgccaaatgacactcgttccaggggtcggataaagagaattaaagggcacaatgacaaggagaaaaagcaaaacaagaagataaagaaaaaagagagagtaccacaaaggtgcaagaagtgcaaacaagtcgtgctgcacgattcgcgcaactgtcctaacaaagaaccacaacagtgatgcaaggttctatacatcatgcttccttaactatcagtcatcttataatagttgtcatacaatttcctggaagaagttagcgtttctctgtaaaagattgtgtgttgtcatccaaaattcaactaacggtgtatcgtaaagtctatagtgtgccaagaacattctggttctaatggacatactgtagatttccttggaacaaagtagcaattcatgtaaaagataataggtggccatataatatttaactaacagtaggtagtgaacacatgttgaaatataattagttgggaccattgtgaggtaataacatttttagtattgtcgtcgtgagtctaattaataatataaatcgcaaatgtacaattgtcctgttagctgatgtggtcccttgcatttttgcatgggttcttatttatagctctttaagtttttgactgtatgatttgggacctagtgttatcaacttggaacaaagtataaaaaaatatgggaaggattcgaggtgggcaagtgggcatgtaatatacagcgggatgtgtaggaagcacaatcattttggattgcattttcagtttggaatggttaagaattacatatggaaaatatttaaatatattgcgacaagttcggctcatatacaaatgtatattgcgacaaggacattttggacagctaatattcagcttgaaatggttaagagtacatatgggaagacaggaaaaaaatattagaacaaccattgtgttccaggaacattttgttatcttagtttggtccgtagtgtgaataaaactttgtatgtatctatgctcaccagtatatatgtccttaacaattttttatctatgctcacaagtatatatgtccttcttaacaatttttttcactatgcagtttgctgggtgcaggtttttttttgctgagagcagctggcgagaattcttttgctgagagtagttttttgttcaaagtagagccactgccatcatccagtgcacacgtgtgtgatctattaatagattttagccatttaatagcaaggttgcattttgattagacaacaccttgaaggggataactaatatttgtgcacaagtgttgtaacttatgaatgttattacctgccaaaactctgtgggatctaaattgtgtcagcagaagacatctgaatatcagaccatgtcggtatacattgatggactaggttgactctgccaattgtttgtggccacaatctggacctatgattttctaggaaaatcctaaatatacttgaactggataaattttctgtgtgctgtatttttctacttgaactagtaattttctgcacctgtgttcccacaaaccggtgtgctgcatttgcacaccatggtcatgaaagtttttcgtgtctctataacaatatattcatgttgagtttcttcagaattaagttccctgaatgttcagatgtcaattttttttcatgaaggtatatatctgttcaccctcgtccatatatgtggtctgtgtatgtggtgagggagatgccattttccaccctaggcacgatttcctg

SEQ ID NO: 3447 - DNA, 18944 bp, Oryza sativa
acagtttcccgttttcttccctatatgtgctcagatagcaatctatctatctatctattctattatatactaaaaatccattaaacttcctataaacactctcaagccgccacgtggtcttctacaaacgcttctaagtcgccacgtggcactctactaaattagaaaaaatctaagaaaaaaaaaacatccatcactcaatttcacttaaaatttgtggacccatcattttcaaccattggatcaattaataaaataatcccaacaaactccacctctacctccgcgtacgtacgaatctccctcctgtacgtactcacgcatactccctctgtttcataatgtaagactttctagcattgcctacatacatatagatgttaatgaatctaaaaacatacatatgtctaaattcattaatatctaaatgaatatggacaatgctagaaagtcttacattatgaaacggaggaagtacaaaactacgcatggacagttcccttttctatctcttctttttctgcatcgtcctattttatatcaaacacttctatgaataactagatagttaaatgaacagaaactttaagcaatatctcctgtttttatttttaaaattgttttaaatttataattaaactaataatttgagattaatattgctcatattttgctatataggaaaatacgtagtttggacatagaaccctttctttgcatagcaaccaaacagcaataaaacatttaaattggtagaaattatatcttgttgtgaacattttacaagtctaaattagattgatagtatcgaagcagataaaaaaaataaattcaaccatgaataaatcaatataaaagaataacttgtctacgtaccatacttctacatttttgcatgttatccaagtttgcacttatgcaatccaagtggacatgaaaattatgaaaaatacaactccctccgtcccaaaatataacaacttttagtactcatgatttgtcccgaaatataacttcttcactaagggtgtgtttagttcacaccaaaattggaagtttggttgaaattagaacaaagtgacggaaaagttggaagtttgtgtataggaaagttttgatgtgttggaaaagttggaagtttgaagaaaaattttggaactaaactcggcccaacattcacttccaaaccaatcacaaccatccaccattcagttttctcacctacctccacttctcagccaataacatctctctatttaattccacctactttcttaataaccgtgtccagctctaaaacttcttatattctgggatggagagagtaaaatatggagtatattactatatactcattattagttcacaaatattcacggctaaattagatttattatgcgaacaagtaatatggcctatcttggtgctttacatgacattagagaattatgaaaaatcatgaaaaaaattaataacatggattatatcaccatatatatatatatatatatatatatgcttaaaaattaactaggatttttgatatgggtgatccaaattatacaattttttaaatactttaaatctaacatggttataactctaaattggtcaaatgtacatcataatatattaataatgaagttttttttctttttccaaaagtttcttttcacatatgtttatatgcattgggctagggttatttttggaccggaccaccccttgatctgcctgtctatatatgacaacttcgtaataataaattaccaacaaaagtgtacttgagtctgcaacacttaaacatttataaattttgtacatctaccaattatatttatttaattgtgctcttatttcaatttaaattcatttttcaaagaacatacgaaagcatataaaaaggatggagtaaaagtaaatagaagtctgcttttaattatatgaaatagtcttattaaccatatttttttaatagaaaatatcttcaagtaatacatcctaagatatgctaaatattccaaaaagatatacacatagtacgaatgttagtttcataggaactaactcaattgttctgacataatattttcttataaattcaagccggtacggttttaagtaattttagttcataattttatatgttgcaagggtaattagaagaaattaataatcaacatacaaattaattccaaacaaattattgataaagataaatttagaatagagttaacgaatattacaagaataagtcaaccacatgtaaccattcgtaataaaaatttcaagcaacattaaataaagcgcccgcgcatttgcgcgggttgccctcctagttaatatgaaatatttttgtgcacatggtataccttatgtcttgggcatagggatgcaaaagcgaaatttgatcatatattcttcttggatacgcaaagtgaaatttcgtataatcatcttagattgaattgtaagaatagtactccctccatccaaaatataaggcacaaccacccttaacccaaagaccaagaaataattattatcatcttgtagtttggatcattctaataaatacaatgcatgcatctaatagaattagaggatgtgagagtgaaggatttaaagaattaataatttaatggagaaaatatcatagttaattgtatgcatgcatgtatgtcttatattatggaacatatatataaaaaaaaagtggttggttgtgtcttgtattatggaatggagggagtatgtgtctagtaagatttttgacgaggtggagccgtggaggtgagagcaagaatgctttatatttttattctatatgtggataacctctcgtgttagtaacacttgagtctcctcacagcttctttcaaacatagaaatttcaccgaacttgtacgtaactacattaatcgaaaagcccccacaatctctttacttcaaaatagtcaattttcgatccaaatgaattgtaaacgatcgatctcgggctgaaaaaaatcttttgtcatagtaaaaatctaacgaaactgctacacatttatttgggacaaaatttgaaacattccgatcaacttgctcctcagttccagtttagacaagcttaagattctaagaattagttggctaatagctagtttttaaatatctggagaagttgggttttccaatttctaccatctaatttattttttagattttacaattctcaaaatctgataacaatttaaatggagttgcagttgctcccaaaacaggacctcacgtcctcagctagtccctgattcttcggaaaaggggagggatatttttccctccctccactccgcttgagcgccctccgttggtccgttgcttcccgagctcagaaatcggcggttcgagcttggcgtccttcccactaagtgcaaggtcaatagagagcccactgccatctccaattttctgtccagctcaggaagagctatcctatagcttatcaactacaatagattagctgtaaaatatcagagattaatgcattgaactatttaatgcatgcatggccattttgttgcaccacacatacacaatcacatcagagctagttaaatagaggattaataatcgaaacagtgaaacagttacgatgattcacaaatcttctggcaacatgccatcaaacaaaaggaccacagaaactagataaagttctttggtctgattagacattaataagccacacgaggcaactttttagggataacaaaataacagttaataaaaacatagatataaactgagatagttcttgatatccatggaccatcatcagccatcttgatttgttgccaccagcctgtagtggagagatggagcagaatataaattatgttatcagcagaacaatcacagtacaaatgcaatattaatgccagaaatctaactacttagtgatggtcaaatttctgccaattacagtaaacttttcctaaaactagaaaattagatgtgtctcattccaataaattttcttgaaagattgtcacagccgctacactatagtaacatagattctccaatcatatttttgaactgagatgtaaaaaaagatcaataatgccgctccttctccctcctcctcccacacccacaccaccatgcgcttcccgcgacccgctccacgctgcccctcgccggagccgcagcccgagcacgagccgaccaccaagccggcaccggcgcaccgcctccgcgcggtccaccctgccagccgccgcccgggacctcctcgccgacgaccccacgccccgcgccttctccgcgctcctcaaggccgcctcctcgtccgcctccccgcctcgacggccctcctccctgggcctgggcgcgcagctccacgcgcaggccgtcgtgcgcggcttcctcggcggcgacgacagcaccatcctggcgaccgccgtgctcagcttctacgcgtcgtgccgggagcccgacctcgcgcggaaggtgttcgacggaatgccgcgcaggaacgccgtcacctggaacgcgctcatcaaggggtacgcgcaggcggggcgcagggaggaggccattctgctgttccgagacatgaagagggagggcagccatgttgctccggacaggtatacgttcccggcgttgctttctggcatcggccgagagggtggctctggccgcacgctggagctcgggggagccctgcatgcgcatgtcatcaaagcagggctggagagagaccctttcgtgggggcttccctggtttccttgtatgcggctagaaggacattggaggatgcaaaggtcgcctttgatcaagtgggttcttccgatccaatcgtctggtcatccatgatctctgcgtatgtgaactgcgaggaggaagagggtgctctgttgattttcttcaatatgttgtgccaagacattaagccaactcagtttgtctactcgaccgtgttttctgtctgtggaagaatgggaatactggagatgggcaagcaagttcatgcccacagcctgaagagcaatactgaaaaggatgccgcaatgtttaacgcgcttttgaccatgtactcggattgcggatgcattaatgacgcacagaaagtattctcttcaaatgattgcgtgaatgtaatttcttacaattcaatgatttcagctcttggacagcacggatatccgaaagaagcacttgagcatttcaggcagatgaagtttgctggtcttatgcctgacgaggtaaccttgttaaatctgatctcttctttcaaccatgctggtcttgttcatgaaggcctgcagatgttcaattccatggtggatattgaaggcataaaaccaatgtatcaacattatgcctgtgttgttgacatgctggctcgatcaggagagattggcaaagccatgaaaacaatcaatgaaatgccctttgaagctgaagcaccgttatggaggattgttcttggtgcatgcagcaagcaccgtgacattgaaactggcaagcgcattgcagagatgctgtttgagatggaaccctatgaagccacaaattatatacttcttggtaatatttatgcaaggttaggaaggtggacagaagcagaaaaggttagaagtctgatgggtgagagaggtgtttataaggatgatgcatttagctggattgagatgggtcagagaacatatagatttggtgttgatgaccgatcacaccccatctccagagagatatataggaatttagatagattaataagtactatcaaggttgcaggctatgtgcctgatatcagttttgctgcacacaatatacaaagggatagaaaggaagaatcattgtattatcactgtgaaaaattggcatttgcttttggggacttggctgctccttctggaggcactctccgcatcatgaagaaccttcgtgtttgtggtgattgtcattgtgcgtacaaatacttctcccttgttacaggaagagaaataatattgagagacaatcaaaggtttcaccatttcaacagtggtttttgttcctgtggtgattactggtaatggatcaataagctattctgcaatttcgcatcctagcaatgatttaagagctctaatgacaccatatttgtttaggtatgtgttgagctttcacgcaaaacaaaatttccattcattacataggagcacaatataccttttttttttaccatgttcaatgcatgtcacataaaaatattaatgagtagagttgtaaatgatattcatgttgttttgctactttcattcgacatgtatgttccaaatttaggaaataacaaatcagtatatatttttagatcctgtagtaaagttcttaaagattcctcaaagatatgaaattctggtacttctacccagtacctttgctctctaaccatgctgtagaatgcttattttgggtccatttggataatgggatctgaggagtgggattgagatatggaaatgaatgaagggttcggaattagcatgaaatggggtggaagaatggatgactattgtcggtgacatgggaccgggagtatcatgactagaggcttgggcagccgcggtcacccacgtggcctgaccccctcgggggggtcgggcccgagggtgacatggccaccccttcctctgtctccccgaggggtcgggccgctcccgtttcggccccgagggctggggcgccccgaccccctgtggttttggcgccacgtgtatgggttaggtgagcccggcggggctcacctaaccgcatttattgcgggttggacgagcgcgccacgccgcatttaatgcaacgcagcgcgctcgtttatccggtccgtgaccggtcgcagtgtgtgaccggtcacagaccggtcagattgcgggttaggtggcagcaggcggcctgtcacacgcctcgccccgtcccgtcggaatgatgaatgcctccaggcacttgtccctagccggagccggcgtgctaactcctggagttagcacgccagtcccggccagatacgttctaggcttcatcgcaaccattgcaaggaagtcattgtatgaagagggacagacgtgcggcatgctaaactgacacgtggtggacaagaatgaccggtctgtgactggtctgacgccggtcacgtcatcggtagacaaactgtgctcccgcgttgcatccgttttcggcgaagtggaggtaggtatgacccatcccatcggaggggtcattcggacagcggccattgcaaatctccgcccattaatgaaggaatgacagggtgatcccctgtgtcaggcgagtgacagcgctggtccacactcaagaacaagctgtgttttagcttccaagcgaaggcgcgagccaagttttggtcaagatagggtgggtccccacccaaaagaaggggtaggtagaagtgttgcatgtggtatccccttgagatataaaaggaggaccttgcccactgaaaaggggggataaaaaaaaaagatcgtagcttggaggggggagagagaagatggtagctgggatcggagagaaagaagatcgtagcttgtagaggagagaaagaagaagagggtttctagagcctggactttctggttctccggctctctgtaaatccttcacacacagatccaccagaacacaggagtagggtattacgcttctcagcggcccgaacctgtctacatcgcccgtgtctcgtgcatttgctctctcgcgaatattccacagatcgagggtgaagaacctcacttagcgcccccggccgaaccggcaaaggggggcctgcgcggtctcccggtgaggagccccaagctccgtcatctggcgcgccaggtaggggtcgcgtgtgtctttctgagccctcaccctctttcgtgtgcgctaagcttctcccgcttagcccaatggctgaacgggcagtggcgcacaacccctctccgagcgctagcggtgacgacggggagcagaacccgcgccgtcgagctcgtactccaccgtccccctctcgcagaggtcttgggcgggaggaggcgcttgagggggtcgaaagatccgcgacttcgccgctcgcgggtgatggagaaggacggcgagacggggagcgtcgcctcctcgtctacggcgatggcagcacgccccagggcgcgctccaggccgcaggcgcgctcctgcgtcacccgcccgtcgtccctaatccagagactccagcccgacgttggctggatgacgtggccaacttggtcatgacggcgcagcagcgcctaggcgtcggcgggcggtcctccgccaacaaggcctctggcgctgctaccgccggctcagtgtcgtcgaggcggagggtgcggcgagcggcggccgttgcccgccgttcgttcgccattccctcgacaacgcctccgacccaagaagatgtgcgcgggaggccggatgcccgcctcaatatcgagcgccggcgcaatggttgtcgtgctgcccacgcaacggagggcgcttcctcgtccagagcgccacttcggtccgggcacgggggccagtcccccgtgtccccggttggcggtgccggctgtcgagccttcgtggcgagccttcgaaacgtccgttggcccccaaggttccggcccaccatcaccgaaaaatacgacggaagcgtcaaccccgctgagtttctccagatctacacgactgggatcgaggccgcagggggtgacgacagggtcatggcgaatttcttccccatggctctgaaaggtcaggcgcggggttggctaatgaacttgccacccgcgtcggtccactcttgggaggatttgtgccagcagttcactatgaacttccagggcacatatccacgcccaggtgaagaagcggacttgcatgcggtacagcgaagggacgatgagtctcttcgctcgtacattcagcggttctgtcaagtccgcaacactataccatgcatccccgcacacgcggtgatctacgcgttcagggggggcgtgcggcacaaccgcatgctcgagaagatcgcctccaaggagccccagaccaccgcggaggtttttcagctcgcggaccgtgtggctcgcaaggaggaggcctggacctggaactcccccggttccggtgtggcagcttcggccgcccccgggtccgccgctcggccagggcggcgggacaggaggaggaagaagaggtcggcctattccgacgacgagggtcacgtcctctccgtcgagggcgcttcgcgggccacccgaaaggggaagcctgcgagcgacaaaaagaaggaggcccgcgctcccagcagggaacgcccgtctggcaaatggtgttccgtgcacaacacctccctccacgacctcgcggactgccgcgcggtcaaaagtttggccgagcggacgaggaagtgggaggaggagaggaggcaggagcgccgtgagggcaaggccccggcggctcctgccggcaaccggcgaggtgaggccaagcagaaggccaccgccgaggacgttgatgatggcgacgatgacctggggttccaggagcccggggccaccgtcgccaccgtcgatgggggagcgtgcgctcacgtttctcgccggagcctcaaggccatgaagcgagagcttctggccacggcccctacccatgaggcgacgcagcgggcgcgatggtcggaggttgcccttaccttcgaccaaaccgaccacccgccgtgcgttgcccggggaggacagatcgcgatggtggtttcccccaccgtttgcaatgtgaagttggggcacgtcctcatagacggaggcgcagccctcaacatcctttcccccgcagcctttgacgccatcaaggccccggggatggtgctccggccgtcccagccgatcatcggtgtaacgccggggcacacttggccgctaggtcatatcgacctcccggtcactttcggtggttccgccaacttccgcacggagcgggtgaacttcgatgtggcggacctcagtctgccctacaacgcggtcctggggaggcccgcgttggtgaagttcatggcggcggtccactacgcctatctccagatgaagatgccgggccccggtggccccatcaccgtccacggcgacctcaaagtcgcgcttgcttgtatggagcagcgcgcggaccacctcgccgcgacgtccaagcccgcgggtggcgacgagaggctcagcacctccgtcccagccaccccgaggcaacggatggtcacgtgcgacgaggtcccagtcaaggaggttgccctgggcgacggcccgtccaagaccacacgaatcggtggtcttctggacgacaaataggaagacgcgctcgtctccttcctgcgggcaaacgccgacgtcttcgcctggagaccggcggacatgcccggggtccccagggaggtgattgagcaccgtctcgccgtgcggccgggcgcaagaccggtccggcagaaagtgcggcggcaggccccggaacgtcaagccttcatccgcgaggaggtggcgcgacttctggaggccggattcatccgtgaagtcattcatccggagtggctggcgaacccggtcgtcgtccccaaggcgaacggcaagcttcggatgtgcatcgactacaccgacctcaacaaggcatgtcctaaggacccttaccccctgccacgcatagatcagattgtcgactccaccgcggggtgcgaccttttgtgttttctagatgcatactctggttatcatcagattcgcatggctagggaggatgaggaaaaaactgcattcattacccccataggaacttattgttatacgacgatgcctttcgggttaaagaatgcaggtcctacttttcaacgtactactcgaatttctttgggtagccagttaggacgcaatgttgaggcctatgttgatgacttggttgtgaagacgcacaaccaagagaccttactctcagacctagcggaaactttcgaaagtctccgctccgcccgcataaagctgaaccccgacaagtgcgtgttcggcgtgcctgcgggcaagcttctcgggttcttggtctctgcccgaggcatcgaggccaaccccgagaagatacgagctatagagcggatgcgcccccccagcaagcttagggatgtgcagtgcgtcaccggctgcatggccgccctaagtcggttcatatcgaggctgggagagaaggcgctacccctatttaagctcctcaaatgctccgggccgtttacctggacggaggaggctgagcaggccttcactcagttgaaggcgtacctcagttctcccccagtcctggtcgccccggagccagatgagccgttgctactctacctggcggcaaccccgcaggtggtcagcgcggcgttggtcgtggagcgcgacgaggacaaccctcactccgcgcatccccaccctgtgtcgactcaacccgggagtgagcagggaggagaggcccccgagccgaacggtggcccaaggcccccgacggccggagctggccctccgcccacttgtccgacggtaccaggcgcccccgacccccaggaaggccccggggccactgcgggaaggccgcacctgtcgtcctctgaccccgaggttaaccctgtgtcgacccgacccgggagagagcagggaggagaagcccccgagtcggacggtggcccaaggcccccaatggcccccgaaccgaacggcggcccgaggcccccgacggccggagctggtcctccgcccgcttgtccgacggcgccaggcgcccccgacccccaggatggccccggggccactgagggaaggctgcgcctgtcgccctccgaccccgaggtcatcggcacagaagccgagtgcgcggcctctcggacgaagagcgccccgttgatgcggcccctagcgaagaggatcggccccgccgaaaggtgcagcggcccgtctaatttgttagcgaggcccttcgggacgccaagacccgataccctcaggcccagaaaatgctttacgctattctgatggcttcgaggaagttgcgccattatttccaggcgcatcgggtcacagtggttacgtcttaccccctcggccaaatcttgcataaccgagagggtactggacgagtggtgaaatggacgagagggtacttgcactttgaaccacgccacgcgatcaagagccaggccctcgccgactttgtggcagagtggaccccagctcccgagcccgtctccgtccccgaggccagctcgggccccgagcagctgcctcacaccgcctactgggtgatgcagttcgacggctccctgtctcttcagggcgccggtgcgggggtcacgttgacctcgccgagcggagacgtcctcagatacttggttcgcctcgattttcgggcgaccaataatatggcggagtacgagggactccttgcgggactcagggtggcagctggactggggatccgccgcctcatggtgttaggcgactcccagctggtcgttaaccaggtctgtaaggagtaccggtgctctgacccgcagatggacgcttacgtgcgccaggtgcggcgtatggagcgccatttcgacgggatagagcttcggcacgtgcccagacgggataacgcggtcgccgacgaactctcaaggctcgcttcttcgcgagcccagaccctaccgggcgcctttgaagaaaggcttgcccagccgtcagcgcgacccgaccccctaggggagacggatgcgcctgaacggcccccgaggcccgtcggagtccaggcctcgggacccgaggggagcgctcccagctcccctagatcgattgcttggattgctgagatccaggtgtacctcacagataagactctacctgagaaccgcgaagggagtgaacgcatccagcgcatctccaagcgctacgtgctggtagaagggaccctctatcggcgcgcggctaacggagtcctcctgaaatgcattcctcgggaacaaggtgtcgagcttcttgccgatatccatgaaggtgagtgcggagcccactccgcctcacgcaccttggttggcaaggcctttctccagggtttctattggccgacggccctcaacgatgcggttgacctggtccggcggtgcagggcgtgccagttccacgccaagcaaacccatcagccggcccaggccctgcagaccatacctctttcatggccgtttgctgtctgggggctcgatatcctgggtccgtttaggcgggccccgggcgggtttgagtatctgtatgtcgctgtcgacaagttcactaagtggcccgaggcttatccggtcatcaagatcgataagcactccgcgcttaaattcatcaggggcatcactgctcggtttggggtgcctaaccgtatcattacggataacggcacccagttcactagtgagctcttcggtgactactgcgaagacatgggcatcaagctctgcttcgcctcccccgcccaccccagaagcaatggccaagtggagcgcgccaacgcggaaatcctcaagggccttaaaaccaagaccttcaacatcctcaagaagcacggcgactcgtggatcgaggagctgccagcggtgctctgggcgaaccgaaccacgccaagccgagcaaccggggaaacgcctttcttcctcgtctacggcgcggaggcggttctcccgtctgagctcaccctgaggtcccctcgggccaccatgtattgcgaggctgatcaagatcagcttcgcagagacgacctcgactacttggaagagcgaaggcggcgcgcggccctccgagccacgcgctaccagcagagcctgcggcgctaccatcagcgccacgtccgggcccgatcactctgcgtcgacgacctcgtcctacgccacgtccaaacgcgtgccggattgagcaagctctcaccaatgtgggagggtccgtatcgagtgatcggtgtcccccggccgggctccattcggctggccacgggcgacggcacagagctgcctaacccatggaacatcgaacaccttcgtcgcttctacccctagtgggggtcgggtgtcacgtctcgggctcgggccaaccccgcaccccccctcgggcgtgcagggttggccgggggctaccacacatgcatattcttatctttttttatcttccgtatttcaataaaagcattttcgatttcctaaggactgtgtctgtgctgttgtttccttttgaagaatcttgacttgaattagctcgcttgtgctcgatcctgccctcggtggcccgggccggttaaaatcgccaaaaggggcccagaaccgagccgtgccctgggacgtggtgaactccgggggggaatcggcaaaggcccacaatcgggccatccataaccctcggtcatcacgctcccggcctggccagtctcgacatgtggatctccccaggcactagccccgacccgcgccgtttgaggctgggacctgggcacgagcccttgttcaagccaagacacagaaggaccgcggcacagaccatccttgtctcatacgcacaacaaatagaattgacacagaaatttcctctttatctaattgcagattaaattagtctatacaggaaaggggcccgaaggcctcggaagaagaagaaaaagctatttaagataggcatgggcctgggggctcattccgacgcgcccgggtcgccggcctcatcgccgctgtcgcccgcaccgccgtcaccgccctcctcgtcggagtcgagggcgaacgcgagccggggggctgtaccctcgaagctgtggacgatgtggtcggcggcgtcccggacctgcgcgcgcgcgtcgtcctcagtcccgggagggaactcgtccagcgccgcccacggggagaagtccggatccctggcctggtagcttgccagtacgagctccactgccccccgggcgaggtccctcgaggatgacttgatcgtctcctcgagctcctcggggagccgctggagagtcccggccatctcagagaggcgctgggcgaggcccccctggttggcggggtacttcgcggtccgcccgcccagaggcccgcctgccgcccagcgcggtctagacgggagtcggcgtcccgaagcatgccgggccctacctcgcctgccaagcggagggcctcgacctccccggcggacgagtccagcgcgccctgtagatcggcgatggtgtgttcggcagctgcgaggcgagcggctaggtcgccgtcgcccgcggtcgccccgccgttgtgcgccctcgcgtccagctccttcgcccgcgcctcgagctcagcggcccgctgatccagtgcggccctctcggcgcgggcgccttccagattacggcgcgcctgctcctcccgcgctgcctcgcagagggacaggctgtccgccagccgttgcgccgcggcctcggcctcctcgagagctcgctcccgctcggtgagcgcgtcctcgcggaggcggagtgcggactcctcttcggcgcaggcggcctcgtgcgccgccaacgttgcctcccggatggcaacggcggcctcgcggtccgccaggtccctctccctcgcgcgggcgtgctcttccagcgccgtggcgcgagcctcaagggcctcttcgcgccgccgggacgctgcctcattctccgccgcccgacgttcccgggtagcggcggcgtcaaggattccccgggcggtgtcgagcttcttctctagctccgccgcccggctcctgtattggaggcggaggtcgtcccgcacctcgtcgagcacagcggtggcgatgagggcagtctcccgctcctcctccacctccctggcgatctccgccaggtccctccgacgggcctcgagctctgaggtatgccggcggtgagccttgcggcccgcctccaccatggcctccactgagcgccgcccctcttcaacgcgcgtccaagccgcgtcgagctccgcccgctccgcctgcaggatctccatctgggcacttagcccgtccagcaccgtgctgttcgcggtggctaaggcctgcagtaggggctccgcgctcagtggggcagtggaaggcaaaggggagagccgcctcggtgtgggtgccgcgcggctcggtccgccgatagacgtgccggactcgggggcggcctcgccccgaggccggctcgtcctgagcgccgcccgaggggtcgggcccgagcggtgcgcccgcggcctcgtcgtgggtggcctcggaagtcgtcgtcgcttcgggcggagtcgggtcgggggctcggtgggccgcctgacgtgcgtgcgccgtctccgcctcccggacggactcctcggcccagcgcggtctggcctcctcccgagtggcttcctcagcctggcgagcccggacagcctcctgggcaccctcctcggattcccggaggcggtccgcggcttctcgccggtcagcttcccgcctccgggtctccgcggtcgccgtctcctcggcctcagaccgaccggacttggaagggcgaagggggcgcgacgggatctcgctgaaacagaagaagaaccagaaggcaaaaagaagcgggtaagtgaaaacttgccttggggatgggagaatgaatacggccgcggtgggcgcgggaacgaacctgcagggaggtcggctaaacgaccaccttgggggagagatgaggtttccccggcatggttccgtctcccccatcttgcggagccgcttcttctttcgccccccctcgggctgcgacatcggcgcggcaccctccgggcgcctgctgctggcgcgcaccgccccgccccctcggggaggagatggggaaggggtaccctcctgcttcctcttcccccgggcgtcggcagggcggctgccccccggacccccgtcgcggggcccagaagcacgaccccctcccggggtagattgttcccccctgcggctcccgcctgcgccttcgtggcctcgaggagcccgctcctccgacgccccgaccgcctgcatgatggacaggatgctggcgcgatctggatcgctgcagagggggaggacaccttggggaataagggatgcctccacggagctgagattcagcacccgttggaccaccatcctcaggtcctcagggacccaatcccatttgtgcccctgatgggtcctcatgtagtcctcggacccggtgtactcccaggcgccccgggcgcgccgctggagcggcgcaatccggcgacgaaggtagtcgccgtacaccatggcccccgtcagcccctgggatcgcagacccgccaggcggtcaagaacggcgtcgtagccgtctcccagatctactggcgcccgccagctggaggcctgcgccgggggctggctcggaagtcggaggcgcacttcatcggcgaggggggtgtagaaccagtcgctcttccaatcgtcccacttcttgcggaggacgcagggaatgtagcggttcagcaccggcccccgcggctggaagtagcagccaccgactaccgacggcggcgacaccggctgtacggtgaagaaccaccggaacagccgaagagatgggcgcaccccgataaacatctcgcacaggtgcgcgaagatggccaacgtcattaccgcgttgggggtgaggtgcgccatctggagatcataaaactccagaacatccatgaagaaagaagagaatggcgggaccagtcctgccattgcgaaagagagaaagaagacggaccgctccgggtagtgtggcgccgggcgtccctcacccagcgcgaccacctcccggccggtggcagattccggcatgaatcggcgcggcagcccggcctgcctctcgctcacaatgcgggaaggcggcagcacgctaccgtcgagcggtgcggagccccgtgccataacaccggcggaggaggagcttgagaacgagtgagtgcggcaagggtagggcacaggaaacgaggagttagggcgtaagcggcgaaggcaagggggataatggcgagaggaaggaagcaaatatcttcctcggcgtctttatacccttgccaacgctatgcccggttcctcgcttcccgcgcccactatctcgccccctcgtttctcgcgcccacacctccactaatcccactcgctcgtttgcggcgcacgaggcggatgtgcggccgtggcagtcgagatgggacatatcgtgcgcgcgttaactacgctcgccgaccaaagcgccatcatcatatctccaggcgaaacgaaccggctcgtcccgattcgcgtgctactcgagtaatgtagcggtcttgaagagaccgctcattatagacagtcggttttccgttgccgatgtgcgcgatttgcgactgctgggttcctgcccgcctgtagagaccggccccacctgtcaccaggcctaaggagtggcgtcacgcccgagcgtttccctcgaggggggcgatcgccctggcataacgccgggggctactgtcggtgacatgggaccgggagtatcatgactagaggcttgggcagccgcggtcacccacgtggcctgaccccctcgggggggtcgggcccgagggtgacatggccaccccttcctctgtctccccgaggggtcgggccgctcccgtttcggccccgagggctggggcgccccgaccccctgtggttttggcgccacgtgtatgggttaggtgagcacggcggggctcacctaaccgcatttattgcgggttggacgagcgcgccacgccgcatttaatgcaacgcagcgcgctcgtttatccggtccgtgaccggtcgcagtgtgtgaccggtcacagaccggtcagattgcgggttaggtggcagcaggcggcctgtcacacgcctcgccccgt

SEQ ID NO: 3448 - DNA, 4750 bp, Oryza sativa
tcttattttatttatcattcccaggggaatttttcaagcgatcaacgtgataggctacaatggtgcagtcggggtgagtttatactgtgacagcatttctcgattatgagatgggaacagaaaacaatagtgcaatttgcacatttcaaaatctaaaaataatttaatttaagcaattgctaacatcttcaagccatatctaaaagaaatctcaagctttaatactagcacccacaatttatacgcataaatgtggtcttacggtaggaagtttaaatatggtccatggagttatgctaacctaaatctattgaccatttgttgaacgagcacaatcgcgggtgagtgcttgcgggatgtgtgtgagtgtaagagtgttgatgtaccatgtgtggatggacatttttctcataatggaaggaaaaaatattatgatgttttcagactggaacaagtttttcaatatatatatgaaatgttagctacaatgaggtacctggagagttcagagagtagttgtatcaccttaatgtaattaacttagattaataaatcgttaattatctaaagaaaacaacttttggcaactcctcaagttagtaccataaaatcgttctttcaaatacagtttcacttgctatatttattttgatagaaattgttagccccgtcggttgccctaaaaagaataagccaatgcgaaactttgaattttcaaacttaagttgattttaacatattttcattgtaatttatttttcaacattaactgttaagtcgctaagaacacatatataaacaatttacacataaattattttatatcgctaataagccgttacaacttatagttagcttttggacaaccaacgaggccatacataatactcttttattacaagattagtcctcagtttacataacaagatttataaaaaaataagcttaattttttttatggatcggggcagtgtttcatacctgggtccttattatacttcagatactagttgtacgactgaagggatacaattgtgttagttgcactagttccctctttcaatgctttcataattacatgaactatttccgtctttcagatattattcttcatgggtttcgccatgttcgtccttgagacgttgctgagcatatgggtcatgcaggtaagcgcacacacacgcattaattaactttgcctacatatataaacccagtgatataacttccttcaagacagaatgttaatcatgggaaaacctctgcttctacttgcagaaagtatattggtatttccgcgggaaagggaaggaggccgagatgaggcctgatgctgcagcaggcggctcacggttctgacgacatagcaaccctgaacctgaagctgcagctaaggatagacaagatcaagcttgaaattgttgtgaagttgtaagtggatttgttggattgttgtggacttgtggttgatggaagtgcaagaactgatgatgtacttatagatcagaattgtttcacttgtcactcacatagatattttgtttgctcaacttactttccttgtctgatagtctgaaactacagttcctagaaaagaaagtagaagcccaatctgtgccttgttcagatgctagctagtagtagctgctacagagaaaatctttcggcaagcatatactactccatccaaaaaaaaaaacatttctagcaacgaactatatccaggttcataggtaagatagtttttttttagggagggggtatgttgttgcatcacgcatatatatactttctgtctttcttgacatcatgtcgcaatccaatggaaagaacagatacggggaaggccgttctcgcaaaatttcagctatgaactcgcgaaatcttgcaacatggatgaaattttgcgaatatctagtaaagtgtgtaatgtagaaacgtacgcggtcgctgtcagggtgggtaagggggcggcaaagtgagagaaaaacattaggccgagtctgagtcgttgcaaggctgaggtgtttgacggcaacaaaaaaagtaaacacgacgggctgagcctgagcctgccaaatccacgcggagtccgctaaaatttttccactggttctagatgatcgccatcgatgatgcaacgaccaactgcttcctctgcggaatagctgaataaattcagagttcaggtccatctaggctgctgctgctgctcttcgtctttgctgacctcggcacaggcagagagagaagccaagaaaagggaaaagagaggaagaagagagggaagaggagaagggagacgcgcggtgatcggaggttgatccatggctggcaggtcgagatacgacaaccccttcgaggagggcggcggcgacgaggtcaaccctttcgcggtaagctcgccggcgagctcgccatgtttttttgtttccccgtcagaaaatattcagacccatcttccgttcctccttgattcctcgagttgctttacttgtatatatagatatgctttacttgtagcaaaattgattcggtgatcatgtctgcttcgaatttagttgcacccataaaaacagctcggcaaaacaaaccaaaaaaagaaaaaggagagagagaatatggttttatgagaaaaaaaaatagcaggaacacaagtgacaaaaaaaaaattgtttgtaccttgactggtatgtgcagagctgcctttgatttaggtcctgtctgggatttttaaggaactacggatgatctaaaagtgattctgtgtcctcttcatgtgttgcaattttgcaactagggactttatttccggattcgactgtggcttgctagttgcttgcgaaccctgtttcttgtgtcatgggagttttatcatttttttagataatatgggagttttttttaacatatatacaatcaactgcatgttgagctcacttcatatattaaggtttgtaattctaattcattttttaaaaattttacttttactggagagaagtgcatctgtccaaaaatgtagagttcctttgaattgagtgaaaatttgctcaaattcagcaaaaatattttcagaatttaaaaattttatgaaagttatttttggtttttcatcacctccaaaatcaattttgcatttcgaaatgtaaaaccctgtatatatttaataactctcacagcagaaacatatgtttgtgcaaatggcaagttaatttttttttcttgcaattcagtatttctgctttgatattaggcggaacgctgtttacaaaattaaaaaaagggactacaaacaaataattcttcaggcaccaatcgcaataatcttactgatttatcttgctcaatgctcatctatcaggataaagcttctaaaggaggatcagcaggtcaatccagctattccggaggcgcattctatacaacagtgagtttgcactacacagaattttacttacagaaattataaaacgatttatttgctggttgatcatctgtacgttgacgcaatcatcttgatgcagcaatacgccctagtgctccaccggccacccacctttcgcctcttcctcctgagccagctgacttctacaatgacttctcgaccccggtggatattccaatggacactagcaaggttactacactactctgaatgatgtgatgaaatgttatttgacatgattcccaaaagtaatttacctgcgtgttaaatatgcataatataggatatgaaaacaagggagaaggaacttcttgcaaaggaagccgagctaaacaggcgagagaaggtaacctgaacatgatgcagaacagtgttagctgcatgtacttccttgaatttcaattctttccaactatgttggcaaagttgttgtgccaagatggatttgattatgtgtaacatgctgattgtcgcttacgctgtataggaaatcaaaaggagagaggaggctgcagcacgaggtagagcttctgttttgttgtcatcatttttttctttcttgttgccctttgccttcatccctgtagatttgcactgctgatcttactagttttgcagctggtattgtgttggaagacaaaaactggcctccatttttccccatcatccataatgatattggcaatgagatacctgtccacctgcaaagaacacagtatgtcgcatttgcgtcactcttaggtacgtgtttctttgatttgtcaatcctccaatttgctatgatcacaacagcaggaaaaagaaaacagatcataccaaaattattgtttcgtactgtactactaaaatgtacctgagttcattgaaaaaggatttcgtacacaatatacaagagctcatttcctcttttctgttttgtaggattggtcctgtgcttgttttggaacatcatctgtgttacggctgcttggattaaaggggaaggtgtgcagataaaagtccctttttttctgaaatatcattttgtgaaactacactatacaatttgaggtgttgtacgcactcaactgtatataattagaacttatttatatttactccttgtttcttaatgcaggtcccaagatctggtttcttgctgtcatctatttcattcttggatgcccaggtgcctactatctgtggtaccgaccactttaccgtgccatgaggtaaatgaaatattactacttgtcacacattataatttgcattttttgggatcattttttgtgaggttttctgttgtttagttcgaactaa

SEQ ID NO: 3449 - DNA, 9355 bp, Oryza sativa
ttggtcaagatagggtgggtccccacccaaaaaaaggggtaggtagaagtgttgcatgtggtatccccttgagatataaaaggaggaccttgcccactgaaaaggggggatcaaaaaaaaaagatcgtagcttggagggggtagagagaagatggtagctgggatcggagagaaagaagatcgtagcttgtagaggagagaaagaagaagagggtttctagagcctggactttctggttctccggctctctataaatccttcacacacagatccaccagaacacaggagtagggtattacgcttctcagcggcccgaacctgtctacatcgcccgtgtctcgtgcatttgctctctcgcgaatattccacagatcgagggtgaagaacctcacttagcgcccccggccgaaccggcaaaggggggcctgcgcggtctcccggtgaggagccctaagctccgtcaactatgattaaaagttactccttcatggattggaaattatttccatttcccattatccaaacaaggcctttaggttaatgatgttgggatcccacattgtttgtttgctcattatctatgcatttcctttcgctgtcaatagtaactagtcagtacttggtctatttggtcttttctcccccttttcaaaactttataaggggaagatgctaatcactcatggttttatttattcatcaaccatatgcttgatgcagtccccataaacatttctaaggtgacttgaatcattcctttcccatgcccttctaacagaaaataaccttctcatacaatattcaactgtttagtttatagtaactgtaacgtgccactgatctaaatggtccagaacccaagcagcacgaggccgcaccacaagggcaggggtaggagaaggggactaggataatagattaatttgcttctttcttcattccttcaaatgactgccgtacctctctttatatagggccggctcctaacatccttatatctaacaatgcctaccaactaactgccgcccataacagtaacacgataacccagactgcaaagtaaacaatatttaagacatttttaagttgacgtggaagataatttacaggctcacacaattatcagatgtatcatctggtgattaagttcctggaaactatcttctgcacagatgttgcgggcaaatctggaagcgggaaaaaaaaaggaaagtttgctatatacacaatgttagataaaattggttattgtttttcatgcatcattacacaggtatgaatcatctgtgcaaaaacaataacgcatgcgtgacatttggccatagaagactatgcacatgttaatcaacagacaacacaatcttgaagtatttttcaagcattgcatcctttgagaagtcagtgaagtaccccttttcaacctcaagtccttgctctgctgctatctgttccacctgctgctgaacctgatcggcactgacatgatctggatccaggaagcatgcaatctctgtgcagtcatcaccatgggaaagggcaagcgcttgcactgtcgggagtcctccaccacgaccagtcacccttcgggtgatccttcttatggttgggatatccttcgatagtaccggcacattatagttcaggggtaaaggtgcagcaccgatcattatggcacctctttcacgagaaacatgatctgggccctcatctggcttcaccggcagaatatcagggagtacctgacccatccattggatgcccatgtaatttggctggaagtagcccagttcacgccgtactgcagtcacaggtttgccagtggggtgtgctgctccatacaagaatactgggactgcatacagggagaatgaatgaatgatcagaagtttttgatactacatctgttatttaagtaaagtagttgaaaatttaacgaaccttgtaagaagttgccaatgtcagaggccacagtcttagccagttgagcagcatcttccattgtggcttgattcaaggggtggaaggacatgtcatcaatgactccaatccttgggtgagttccagtgtgcgtttcaaggtttatggttgaaaacgctttctcaatcatctccaacaatactcgcctcattgggctaaatttcacttcaccagttgagttctcgttgatgatataagacgcaagcgtgtaacggacacggttgtagtggtcatcttcgaacttgctgagcaaaacaacctcagggtctttctggccaatgcgagtgattgcatcaacaaccttggcattctggctttcagaaatgtagagcttgcagcagatcacctttgatttcaacatgctgagctttgcctttgccttttgcaagaggtggacaagaaggtgaggatggaatatttgcaaggtttcgttactgtacagttcaaatccaagtggagtataggcatccaatgcctacttgcataattgatcggtaatctgaccagaaactggctggttttacctgatttctttcagagcttcgaaaaaacagtaagtcatggcttttctcacatatttataaaaattatattgtgtttaaaaagcataatcctttgttggatcaacaggtattgaaaaaatgttgtttgcttatagcccctgcactggattgtttttacttagatgtatttcgtgttaccaacgttactcagaccagatatcaagaaagaaaatgtcatgaatgtctcagaagattttctttttttaactgaactatgaggttgatatagattgaaatatgggattttccacattgattgttctagcatttatccaagaagatagattttatcatcagggagtcaggactgtggagattaggttctggaaacataccttgtctgtgtgcttttgctcctccatgccttcttcagctctccctctccttccctccctcttcctctgtgtgcgtctgcggagtggtggagtggacctatgccttctctctctctctctctctctctctctctctctctctctctctctctggttctatgtgtgcagctgacccagctgttcctctgagaagcggtggagctatgccttcttatagaggtaagcgtcatgacaattacttgaaagaaagccttttgtccttttatttcttgttttcctctgagtaaataagtgccaaaccatgaaaaaagaaatgcagcatgtgctcatcagctttatgactcatcagtcccctgcatcttgtcccaggcggcaacttaaaagagttaaggtcagttccacttcagcatccccaccactccaaaccattactttgaagcacatggtaatatcttatttgcctcttaaaccgtgtcatccattaaatcccttggttcatcatccattaatctttgtattcttgtctcttgctctctggctcaaacctccctctttttttcattattcatgaaatcttgtctgttaccatctagtggccagtacaatgtcattgtccgcattgcagcacacagttttggtgaaaaccaaaataaatatctagaagagaggataattggtccgtgcatctcagatcatttcgattttgctgcatatgaaaatatcttgtggaatcaggctgcgacgcccagcttttgtacactagtctagcaatcaattcccatacagtgacatgtaagtgaaactagttggatcagtgtgtacatccatgcccatcctgcattctactcagattggaaggatagtgactcagagcaacccacaccccccctattattgcttgccaacattactaatagttgaattgttttcctctttcaggtcatggatgcatcttgcttgtcatcttatcaaaaagatcataatctggaaggctctgaactgaagtagttagttacaaaggtacgttacttagcctagactagctgtgtgcatcacaaaagcgtgaaggtgaagatgagtcgatgagatggaagttgtgattaacgaaagcaaaccacttgcacgaggctctgattgaaaatctgatctgtattaggcggtgcagtgacatgcatacgctactaatccgtttcgctccctttgtggataggactgacattgcagctagtggctgtgcgcgcgtacgtggggatcacgtgcatttgcattataaaaggcattgagatctggcacggaaggagcggtcgttttccacgttgccgcgtgctacactgattggagctcgtgattaatctgagacttgatacgattgtctggattaatgggtttacgttacttgaactggattattctatagtctatatgcaacgagagaggtggtttgtgtgttcactcaaattaatgagtcagctcatgtgaacttgcttttcacattaacaagcgacccgacgttgagaactgcgttttatttcacatcagtgtgctaagctgttattgttcatcatcttggcaatttgccattgacttgtttggttggttgcttaataggggcctaagcagaactttattccacttcccatcaaactattcggattgccattgatggaaaaactagtcactgcaactaaatatggagtagttatctattccttctgtttctttttaacttttttcttcattaaacttttttttaattttaatcaaacttgtagataaatttagtaccatgtataacaacaaaattagtagaactaacttttattaaaactaacttttaatatatttgattatgtctttgttttgtgttaaaaatgttgctatatattttataagcttaattaaacttcaaaaaattaattaggaaaaagttaaataatatataatatgaaagtagggagtacgtataaaataccctcaagtgagtccttaccgtatgtactgtagaaacactatatagcattaatctgtaagtgtggcgttgatcaagggtatcttcgttcctgccgcacctcaacatgagtagggcgcacgaaaaacggagcaatttattagcgcataattaattaagtattagcttttaaataaaaatagattaatatgattttttaaagtaactttcgtatacaaactgttttaaaaaaacacactatttaacggtttgaaaaacgtgcgagtggaaaacgagaggggagacttggaaccggctggaacaaacacagccatagcacaaagttatcctctattcctcgagatttacaccgtgtttagataaagtttttcttcaaacttccaacttttccatcacatcaaaattttccaatacacataaacttcaaacttttccatcacatcattccaatttcaaccaaacttccaatttcggcataaactaaacacagcccaaagtaggtcctctatttaaaactaacaaattgatcttgtatacacgtggctcgtcttaatgtacgcgcagaagtggcaactaagtgccaatattgaattttgagggtccaggactggaaccgtgtttaacaatatcagaatatccaaagcatgatcgatatggagtactgtattatactacatctttggctaatagtagtgaggcgtaccgcgtatgtatgtcccgtttttttttgacaaattgacccttttggaaaacttatttcgaaactaacccctgccaaaaacttcaaccaaaaataggccgtcgcctcagcgccaaacacattggcgctgacgttggccgtgtcagcgccaacgggactggcgctgacattgtgccaccgtggcggccggggccgatccccagctgacgtggcagctacctcagcgccagccggactggcgctgaggtgggacttggccgcaaccccaaggcccagaccagcaagccttctggatggcttgcgggctgggacctcagcgccagccataatggcgctgacggtgggaaactcagcgccagccaacctggcgctgaggtggcacttggccgtttcggccgtggcccagcccagcaagccgtctggatggcttgcgggctaggacctcagcgccatccataatggcgctgaccgtgggacactcggtgggacttggccgtttcggccgtggcccagcccagcaagccttctggatggcttgcgggctgggacctcagcgccagccaaaatggcgctgaccgtgggacactcagcgccagcccacctggcgctgaggtgggacttggccgtttcggccgtggcccagcccagcaagccttctggatggcttgcgggctaggacctcagcgccagccataatggcgctgaccgtgggacactcagcgccagcccacctggcgctgaggtaggacttggccgtttcggccgtggcccagcccagcaagccttctggatggctgggctgggacctaagcgccaggtgcactggcgctgagtttggacatgtcagcgccattctgcatggcgctgacgtcccagccctgctaaactttagcaaaactttgcacacaacacaggcaaacatcaaatgacagaaatttacaggcagtaatatatccagagaaccatacaaaatatacatccatccatcaatcccaacatcattccatacatccatagaatccatcaatacatccatatatgaagtccatacatataagaaataaaaacatcccatcgatcctcgtctatacatccagtcgagtccatacatccagtccatacatccatcgaaccatgcatcaagtccatccatctatccatccatccattgaaccatgcactcacctcctcctacctctagtgcgaggacgaggcacgtcgggggtgtacctccagtcctgcgaaggagcccgccggcgtcgtggtcgagacgggccgggctgcgagatatccggctgtgacgactctggtgcgtcctctagctgcgagggaccgagctcatccgcctcctcttctctgtcctcatccccttcttcctcctcatctccttcctccgcctctttgtcttgctcgccctcctcgtcacccacctccccttcttcatccccctcttggtgggcatgagcatgttcgaccacatcagtcgacctgcagccgagccttgctgccaacttccgacatcgctgccgtagtctctgcataaaaaataatccatgttaagttatcgcttttggaagaaaacaccgtagtttcatctctttccaacgattacctgtagggcgttgcggagggtgccgccctctccttcggagccaggagccgtgcctagcgccactcccgcgtcgttgacggtccgcaagagctctcgagcctgtaggattgaaatgaagtatgtcacaacatatatggcattgaaatgaaataatatacaacattaatgctagaaactaaccactctgtcgcgaacaggtcccgtctcgaccgtggtacctagacgggtacgagtatcgtactcgttctgctcctcaacatcctcggggtcatccgctatgtcggctagtgtccaagccggacgtaggacaagacggtaggtcctgtggagccacgccaagtacaagtcgaactccgtcccgttgtgctgaccctggtctggtactccattctcctcgaacttctcccattgcgtgatatgatcctgatggtagtaagcccaatcagtcaccttcttgttcttccgacggtccaccctgcacgtatgcaaaatgtccaactcaaatatgtagtaaatgttgaagtgactgattgggcaagcaaaataaattgttaagtgaaattactaacttgtgtaggtcgatactcgtggagaaacggtgcgggattgtttgaagcctcccgaattgccgcatcacgcggtggcacatctggaactccactgcatagaagcagatcagtgggcaccgtagggtcttcaacgcatcctctatatggcacatgggattcagttctagctcgagcacttcctgtgcctgatatggcatccacaccacctgtagcaacaaaaataaaacacattgaagcacagttagtactatatagtaagaaaccatcttcatctgtcatagaaccccgaatagcttacatgttctggctgtaggtagtccatctcgtttgtgtagtggtagtacgccaaattcctgcggcctactactggagatgggaccgattcccacaggtgagctacagtgggacgtcggtctgcatcctggtgcggccaagcctgatgggtcctccacatgggccgaccaactggaagccttattggaagcttcataacacattcggggggccacctccacatccaaacctcgcaacttacaaacggttatcatgtgggagcatggcaagtgatggagctgagggaactgacaactacatgtgttatctctcgcaaccacgacgtagtgacgtccaccccattgaaccccagccgccgtgactccgccttgctcgctgacctcatacttcatcgaagggaaatcaaaacatgctgctctttgccccaaggttcgtctttgctgctcctccaacatgtccttaacttttgtgggccacttctttccacacaggatatctacagttgcctctttgtgtctatcgacaaaccaactattgcacttcgaaaatgtgtatgccacaatagctgtaacagcagtttccgaatgcctctcaatacattattgaaactctcggccatattactagtcatgatgctatgacgacgcccgttggtatcaaatgctcttgcccatttgaccttaagtggcatatggtcttctagccacttctttggcctctctccgaccacacccatgaggcgttttatctcatctaggaacaatgctttctcatttatttgacatatgcgctcaagatctttcatctgatcagtcgtagctccagctgtgtagaagttagcacagaagtgcctcatgcaccacctgtggtgaatggttaggtgatgaggcatgatgtggatgatggagttcaaaatgcagggtgtctatcagaaattatacacacttctctattaggaccgatcaacttgtttctcaacatgttgatgaaccactcccagttgtatgtattctccttctctaccagagcaaaagccaagggaacaagatgtaacccggcgtcgacccctattgccgtgagcaatgtaccttggtatttaccggttaagaaagtgccatcaattgctagcaccggcctcaagtgcttgaatgcttctatggactggccaaatatccaatatgcacgtccaaatactcgcctctgtactccatccaccatcatggacttctcgggatgagcctcaacacggaaatgcatggtagggttctttgctttgatggcacgcatcagtgtaggcaaccgaacatacgcctcgtcccaatctccccaaatgac

SEQ ID NO: 3450 - DNA, 582 bp, Oryza sativa
gttacttattgaatgatcaaaagaacaaaaagttttagtacaagaaagtagaagcataagcatctcttacaatcaccaagttacttattgaatgtcgttttgcccgcgcggtttggtctttaatccagtttgcttcgaatattagtttacctaatagtacaactcatatgtttgggcattggataagaagacaaccacacaatttgagatctttggtcttattaggggcaactaccactatttggtctatttggctttgcagaaatgatgtggtttttgaaaggaaaaacatatcttcccctttgcaggttatcttttttattacacattggctctgctcatgggctatccttcagaaggtcaatttgcggggtactatcattgcggcttgtcaacacttggagctagtggccatggagttttctaccccggcgcatgggtggcgttctaggctacggttagagggctcctgaagttctttttgtccctgctattttggatgatgagtttatcttttgtttctttcttgttggctgtgtgcactctttgggtgcagaagccagaggtgctctcagaataatt

SEQ ID NO: 3451 - DNA, 620 bp, Oryza sativa
agtcgtcgcggcttcgccgcagatccctgtcgacttgctcctttttctgttctgatgttaggttatttcaggaaggttgctttcgtagttcagttaactctcctttcttaaggatggctcttttgcttggatatgtaatggggtttattccctagatctgttcctgcttaataaagttgatgtgttttcaaaaaaaaaaaaataataaatctagggactattgcggtttgcttgggaatggcaaagtatgaatatataaacttattactataaaatcaaaagaaaatgatttataagattttatacaaccttacatacaagtagtagtaaccaggaagaaaaataggagaacatcaaggggtaatatttttcaatacagtcattttgccttcacagttcatgtaatattccccctggcctttgattttccatttaccattgatgagtaatggtaataaaaacgcatagaccagactgcattttgccaaatcttactttgaatttgcaggaacctaggcactcacagttcagagagtttctgagctttgactttgtgttaatgaattgctgtttttcctatatttgaaaagggagctgctatataccggtatcccgttggg

SEQ ID NO: 3452 - DNA, 514 bp, Oryza sativa
gtgctgtggccgagtgaagctgccccacttctactgctgtagcggagaaaaagggaaccccggcgactcaagctcataaacctgttctgtttctccccaagttcagtctgcactcagcacatcaagcaatgtctgaacactattccaccatgaacgttttcagatctcattttgtgttcggccgctgttctgttttcaagctttttaatcagtgtacacactttaaacccagcttggatttcaaaactccccttgtcaaaaactcaaatgccactcgtgacatgaatggatgcattctgtctgagacaagaaccaaatgtgtgcatgtgccttgctagaagaaagaaataaagggcctcatcttttttttgcttatgcttatgtttatcagctaaaatttaaattttcaaccttaaatttggagttgattttggggttttttaatcaaagtttatttttcagcccttgtttttagatagctaagaacacgtatataaaacaattaaagttgtat

SEQ ID NO: 3453 - DNA, 606 bp, Oryza sativa
gcctgcaggtcgactctagaggatccccaggagccatttcatgttacataggactacaacaccacatggggctgatgccttattatccggcaaaatccattggattgaaattcattgaattacaggcgtcattatttgagatctactaccattgtctgcataaaaacatacactgaacctttacaccttttctgaacataggaaaacctgcacttgcactatggaatttatcctttgcgacgtcacaacaaatactcgaatgaattgagaaataacctatgttaacactgaaacaagtctgaagccaatatcataagagcatgaaaatagagctcttatggattgaccttgattgttgcccacactcttattacaaccttagagcaaactggcccatttagttgaatacattctctcatctggtactgaagatactatggcactaaatagacaatgcatcaagagcatgaacacctacatgcttttgttactgtcagcatccaatggaagtctggagagagctatgattgaatgccttttcactaccccgccataggtagacctcccaagcctaaccatcttgttttgcacctcgagccgattgcc

SEQ ID NO: 3454 - DNA, 597 bp, Oryza sativa
actatagggcgaattcgagctcggtaccctggaaggtcaccgagcgtgttagggcagccgggttcccctgcatgaatggcaagctgctgatcgctgtgtgagttgatgcctttgcctcatcctttgactcaaaaacctttgcaagcttgcatcctctgccatgatctgctcccaccttgtcacccttgatcccaataagcgaccagatagagctcctggccacctcgtcgacatcgtcgatccgaaccgtcttcggcacccacaccttgccattacccttgctatccagttcctcatcaccatctctagggtgctttcctaatctgaagcagttggtcattgtggatactggagaagcagcacttgatgatgaaaccgattgggattgggactgcggtggccatggagcgttccaagctcctggaaccatgcagccccagtatgcagcaacagcagctgctgcagctggatagaatggaattgcaatgcttgaagtgtaataagcaggtggtggtgccacgccaaatggccacatggctcctccgttcatgcatgggtgttgtgcaacatttggagatctatctgctgaaactttct

SEQ ID NO: 3455 - DNA, 686 bp, Oryza sativa
ccgtacgcggaattctcatataacaacagttatcaagctagtatgcaaatggctccgtatgaagcattatatggccgaaagtgccgtacgccgctcctttgggatcaaaccggtgaacgtcaagtttttgggacggacatattgcgagaggcagaagaaaaagtgaagattatccaagaaggttgcgcgttgctcagtcacgtcagaagagctatgccgacaatcgtcgcagagatttggctttcgaagaaggagattatgtataccttcgggttacgccgttacgaggtgttcatcgtttccagaccaaagagaaattggcaccgcgtttcgtgggaccttttaagattgtgagtcgaagaggtgaggtagcttatcagttggaattgcctccgtcaatggcgggaatacatgacgtgttccacgtgtctcagttgaagaaatgtttacgtgtacctacggaggaagcagatcctgatcgtatagagcttcaagaagatttaacttatgttgagaagccagtcagaatcttggaagtaagcgagaggaataccaggaatcgtgttatacggttctgcaaggttcagtggagcaatcattcagaagaagaagccacttgggagcgagaagatgaattgaagtcagctcatcctcatctcttcgccagttcttctgaatctcgagga

SEQ ID NO: 3456 - DNA, 4212 bp, Oryza sativa
  unsure (1)..(4212): unsure at all n locations
cttgcttgtcaaaaaaactcattaacatttatttcttttcaaaaacacataacaatcactgaagcatggtaatggcgcactcaaattagaacacgaatgcacttcaagagagctgatttgaaactgaagaacaacagtggtggttcagacgatcagacagggattgagatccatctaacgtgaaatcagactaacggggatcttaggatctacatatcaataatcacgtcaggagtaatttcacgttagaggatctttttttatcagacagagcctgcagaacggaagagaacagcatgcccaagcaaacaaaacaactgtagaaagcgaagtgagcgtatctcaattattcagattttctgtggtgaaactaattcatccgggttcaagtcttaaacttaacacgagtgctcgcatttattgctaattatttcaactgtagaaaaaaacaattaaaaaaagaaacacaaggatgggttttgtggcaagtgaagcatgcactcatgaagttgcagtaaccgcacgacagaactccgatactcatcaggctagtacaacagcgactgcactcaaattattgcgatcctgttccaaacgcaacgcacactcccgtcccgtggaaaaaaaagaagagacgctgtaagcagcccacagagccaatgggcaactcgtggaataatcactggaatggatataggaggatgagaggagcagtagcagcagctgatgctgctgctcaagaaggtcaaaagaacaaagcttcacgcaccaaaccagaaccaattcaagggaaggcgtgcatttttcaaatcgaccgatcctatgtagagtcagtttcttcctttttgttctgctccaggaacaagtcagcaatttccagctatactagaaattatggcaaaaggagttgtatcaagttggctcactttgtactataagggactgaacaatgcttttttgacctgctaacccacagggatgtgaagcacacaccactacaccaccagtcaagattcagaaacagccagcacaggttgaaagcatgcacttctctgccttgcaaggaagccatctttgttctggtcaggaaagaacgattcaaaaatatctgtaaactttacttgttaaattgtaactcccatcgataactagcttgatttcttttggatcacacacacttgctaattgctatcgctgaatcaaaacaagtaactaggataccacgaacagaatcagcgcaaacatgtcactagtatgtaatttgaaaagaacctcccagttcccacattcatatttctacattccacgttaacaacaaagatggtggtatgacagcaatcaaattaaccaaatccccagtttaaaagagcaaaccatgtatacggttttgcacagaatatgccaagtaaaatgatcgcagttgttcatgtaaatgacagaattgaagcatgccaatgttaacataacaggggaaagatgttatttgaatagaggcctgagtctaatacacatgagcggtaacttgagacaagtttgtcccttcttgttccataaatatttatgtttcataaattccatgttcatgggcatccctgatgattgctcacaagcagcaaaaaaagaatggttttttacttccaaacagcacgaaaacagaaatattttaatatcaagtgactaggatgttttccagtgaactactccagttcaattcatgcgatatttgacagttcttcaatcaacactgctattactcctaatgcgaagatcaccacatgcaccagcacatatatgcaagtcacttgacaagtaacggaagaagcttttattaaaaaaaaagttttaccaattagttaattatcacagaatttagaattactgagagttacccatccaaaataagtttgcatgcagtcacgcaaaaaagaccccaagcctttcaaaagattatgatataaaaagggcagtggtacaccactatgttttttcactatagggcatttctaataaaagcttagtaataacncaggatagagaatgatattccattagtggtttactaaaaaggaatcaatgaaatgaatccgtcagagtttctgcggatcatcagtgatacgacaaacttatgagaaacaactaaactaaaacaataccaagcaaggtcagctctcagcccagacatgtttatacaaacaaaagtcacaactaggatgaaacatatcgttgttgctagtaaaaaacttcatgaaagacaagcacatcatgaagcaagtaaagttgataaaagaaaattataccagcaaacataaggcatggtgttcataattgatgaatatctttgttgcagccacatatgaatcgagtattgcttaacaggttgttcatcaatagtgaaaagccttctgaaagctgttcctagattattaatataacactgttttgcatagtctcgtatctttcaaatcacgagcagttgatccaaatgcaaatgttgaaatggattagcgaggaaaacagaagtattagaagaactcagggggttacatgactgctgccactcagcagatgcccagttgaatctgaaactggacagaaggcagaaatcgctacggagcatcaggactgaagcaattgaacaggctgcctttgtgcataccatccttcataaataatccaccatattgaatctttattcagtggattcaacagcccatcacagcacaattatacacgaagttcccagatggccgcctggcaatcaaattccacacaggcggccgctcatccggggtccatgaattaagctcaatcgtaccaccaatagaagtccttgggccgccgatgacaatcaaccgatcaccacatgctcggaaagcaaggccccacccattcattgacacagaccgttcaggcaacttaccaagagtgatccatttattgttttgcttgtcatacttcttcacatccttttcactataatcagcagcataaagctcattgttaacaacagcaataagtggaggagcaccagtcactccgttgagaccctcagacatgttttcgatcaccctccaagatcgcctcttcaggtcatattcctcaccgcatgtcaacaccttgttgttgctggcaacaccaccaaccacatagaacttgccatccatgaacaccccggagcacatcttccttgcccgattcatgctgggaaggggtgtccaagaatgtgtctccgagtcgtacatttctgcagagctcaatatcctgccagaagaatcagtgcccccagcaacatatgcctttgccccaacacttgttgacccaaacaagcaccgtggtgagatcatcggatcagcccgtgtccatgaattggttagaatgctatatctgaacacaatgtgtgccatcgcaaacacaagaagttcagtgcccacagcaagtgattccttgtcagaacacatgaagcattcatctggtggcatcttgggcacttggatccagcgctcgcgatatgggtcgtaagcgtcccactcgaggacgttacaggagaagtagacccagtgctctgccaccccactctggcgacgcaggcggtagatctccccgttgcgcacgagcgaccggaagtccttgttcagggaggccaccgagccatagtctgaccgtgacagccggaggaggcaattgatggtaaggtcacggccaatcgcaccaatgaggctgctcccgttgccatgctcctctccgccgccagaggcggcaacatggcgactggagccatggccctcagatatgtccggcgtgtgcggctgcggcgatggcggcttgctgcgcttcccgccgccgaagtcaacctcgtccatgtcctcggcttccgcatcctccggcgccgggcgcttgccgttgagcacctcgtgggagaggtacgcccactgggactccggctcgcaggagctcggcagggagcgcgagatgaggcaggagttgccttccagcatcatgccttctccctcgctcccgatttattcctctttcctcctgctcttctgagatttttgatacaaaaaaaaataaggaaagatctttcgctccctctctaatctccttgccgtgatctgcaggaatcgaatttataaaaggaggaaaaaaagggtaagcgaggatgaaatcgaccggtacaaatggatcaagaaccggaagaaaccgctgagatct

SEQ ID NO: 3457 - DNA, 5984 bp, Oryza sativa
tggttttatctgaatcttgatgctgttatggtctctgtacttagggagtgtttgaagagaaggggattgaggagattgggaagatacgcaaaacgaggtaagccattagctcatgattaattgagtattaactattttaaatttcaaaaatggattaatatgattttttaaagcaactttcctattgaaattttttgcaaaaaacgcaccgtttagtagtttgaaaagcgtgcgcgcggaaaacgagggacaatctctcctatctccacctaacgaacactcccttaatcatggctctgaagatttgatcttgtgacacaatcctactactactactacctgaggatactgatatgcagatatggacggcattgaccaggagttttgagtagaaattagagacagaattgagaattactagcagctaccgagcttactgagttgggacattttggattgtaggtgatccagtagttgatgaaaatgtgctggtatccatttatttggataactgaacagatgttggaatctcaacgactgcatttgtggtagtagtatcaagtggtgatcggttttagtttctgatgttaagtaccaggagtgctactgctaacacactcccttttgttcttggtcactggggctatgatttctgttagtagtgcccactgggttttttgcgttgattatccatgttaatgagtgggattaagggatctgccctaaaaagaagtgccctcccatctatgacaccaagtgcaaccaacactttatgctattttttcctcttttccttttctctctttctgtgcatcctttcacttggccaaaaaaattctctctctctctccctccaactgtacttactttaaagaaattggaggatgacgacaacttaacccaccaatcaggaataattctaaagcctaaactttctcgctgccttggtggaatcagtgaggaaaaaaaagagaggatagttagggagggtaaaaaggaaaagagaggcaaaatgcatcagccaaccagagaaagagagacgacgaagaagaaagaatatgattctctcgtgtcaatgtgaagaaaaattgaaactgcggcttaaaaagaataagaacatggcaacagtatatgaaccgtgtcactgtcctggcttgagctagatcaactctctgattagagttttatttgaccccgtctcagcttgtgccgcacacgattccaacgtgttccttttttacacggctagctatctaccacttgaaacaagcacaatcaacattattcttttatacaaatgcatgggagtcttttataagcctccgtaagaatcatcaccaccgttttctttgaattttccacactccacccaagcccttctactgaggccacatttaaatcgattatttattgagaaattccatgttagctgtggaagggcaaagaaccggatatataagaaaggctcttacctccttgactagcttttagggtgggaaataatatttacgatcctatgataagtaccagatcgagcctgtcaagttcaatatttttagctcgatgaacactagaatgtgaaggtctaatataccgtggatttggagagagaaacactggtgatagtacgattttgcccctgccatcgtttcgtttacagtggactaggggtgtgtttgaggattggggagattggggagattggggagattgggaagatacgcaaaacgaggtgagccattagcacatgattaattgagtattaactattttaaacttcaaaaatggattaatatgattttttaaagcaactttcctattgaaattttttgcaaaaaacgcaccgtttagtagtttgaaaagcgtgcgcgcggaaaacgagggacaatctccccaaacactcacaaacgaacggtgcctaggtctggttcaaaccaagatctccagtctcactcccatgaatccccttccgctctccccaaaccctagaaattggggcggcgctgtgaagtactagcggcgatgtggtcaacgatcggcgaccagcttcggtgagggcggcaacggattgaagccgcgcatcgctgaagttgtgagcccggcgtggcctcagcaatggctgggacgttgcccgctagggtgatgtcgcccaggaagaagacactggggaagaaggtggtggcgaagaggtcggtccatgtgatgagcaccgaatccccattcaagtccttcatctgccagctcagattcgccgctaccagcttcaaaccaccacgccgcagtcgccgccactgttattcctccgcggtcaaaatctagggtttgtgatggggggattgatttatgttgtggttggtttgaaccggacccagtcgtgttgaaataagcatgcccaagggcaaacttgtctttattggcatttctctctccaaattcaccggagtgtctaagagctaattacatgtttttttatgcccgatagcaaattctcgttcttacggtgtccactaactaattacacattttttcgatgccccgtagcaaattttgtctacatgatacatgcacatttggtagtagtaggagagaggtgtaatgtacgtgaggtgaggctaggcgagagcaacccatggatggggaagaaggagccacatgcgtgatggatcgtggatgagctggtgcggctgtgcccacccatggatgcatggatcgatacccgcggcgccctaaagctatttgtgcttgcttcacatggctaactaaccgctctccccccccccccccctctctcttgctcgccgctgttgcgatgtgatatatttctttctacacaagcatgttcaaggcccacacacacactcgatccatccaccatcatccgtgtaatcacgctagctgagagataagcagtagggagaaagagggagagacgatttgctcatttgcatgctgtgttagctgctgctggagtagtactactactaccaccattgcatgcagggggtccaatgattcgttcccacgcttagacaaaggctctctctctctctctctctctctctctctctctatctcgttgcaaattaaatgtcacttcaagtgaaggctaactactgggttggttgcttttcgttgatcgatccgtgcggaattggtgaacggtgaagtacaagagggctttctaggatggcaatggctccttaccgatcccttctccttcccttccagttgaagccacactttgggactcaatttattgcatccaagacacgcggttgtactaactgtctactcctcctagtaccattcttctccaccggagcatgtagaagttggagtattagctagtactctactaccgtattagccattttaatctgttcaaattatttacacacaacattaccaggaacatatactcctattgtctcaaaataattcaacttaggatattatgtaatatatcttaggacaatgaatttggataaacttttatccagatttattattctagaatatgttacatcatcatctatgttaaattattttaggatagagatagtatatgtgtacactatccattgacaagtggagtatcaactaatctgcaaatagtagtataaggtcttgtttagtttccaaaatttttttctcaaaaacgtcacatcgaatctttggacacatgtatagagcattaaatatagataaaatgaaaaattaattgtatagtttgcatggaaatcatgagacggatcttttgagtctaattagtccatgattagtaataaaatgctacaataacccgcatatgctaatgacggattaattaggcttaataaattcgtctcgcggtttccagtggagttataaaattagtttttttttcattcgtgttcgaaaaccacttccagcattcggtcaaacatctgacgtgacacccaatttttttttcgcgaactaataatggaaaagaaatgttggcttttcagtccggccgttattgatgtcaggattcaggttcgtgacaggttgaagtagtattagtagtagtggttggagtataatgctacgggggatgggtcactcgtagcagctggcgcccagcctccagccaaggcgattttggtcgcatgctgcgccgtgctggctggccgcgtacgtgatgattttcctcttcctcccccgcgcccatgtccaatctgccgcgccgccgtcgcgccgcgaacgaccgattcgcttctgctgctgctgctgcgtcccctttgcctcctccgcgtatggaccgccgtcaacaggggggtccaaccccaacacccgccccccccccccccctcccccccggcgacgcgatcggcggcggcgacgacgcggattgctactactactagttcgtctgtgggtggggttggttggtttggctgctgcgagctttgcgaggggctcggttcacaccgcgacggatgggtggatggatggatggatggatgggatggagctgatcaatcgtgcggtcacctccgatggggacgtcgcacccaaccatacatctcacgcccagtccagcccagccgcagcaaacgtacgtactccccatagtaggccatggtgacctggtatgtacaaaaacgtcaaaaaaaacgtagaatcgcccatacaaatacgtatacctacaaggctactactccctccgtcccataatagatgacgtttttgactttttattagcaacgtttgactattcgttttatttaaaaaattagtgcaaatataaaaaataataagtcatatgtaaagtacttttgataataaagcaaatgacaaacaaaataaataataattctaaaattttttgaataagacgaatgatcaaatattgacaaacaaaaacttacaaagataagtaatatgtaatataggacggaggaagtataattcaactgctgattagttgggtcgtacagtcgtacacccgtcaagtaacgaccgtaccacaggtgaaacactcatcgaaatacttctccataccgtaatactatatactagctgaaaaattcaggggatacagctataatttaggactaaggaaatgggtggcagagttaatggggcagttgtgttggttcctgaggtctgtttagtctcaaagttttttttttccaaacttgtaactttccatcgcatcaaacctttcacacgcacgactttttagtcacatcttttcaattttaaccaaacttaaaaactttaatgtgagctaaacacagcttgaattctttgatgtgcatagcatagcagcagcgctctgtagtactactactactagcagctgatgaggcgattaggcgtggtccatgcatttgcatttgcattgcgttgcacgcacgtcctgatgaaagcgcagagaaaacgagaacacaaggcgcatggtccgtccgactgacaatcaaaaggcgtaccgctgctgctgcctgctgctaccatcgctttgctgttttagggatcgccatgtttctgcccacctggctccccttctctcgttaatatactccctactaatcgcctcgtgactgcaagggtggtggttgcaggtagcagctgtagctaagcctaatattttcttggtttgacggcgacggctgtacgagcaagactacagttagggcctgttccaacccgatgaggatgtggattaagcgaaggcacatagcactagaaagtcgttaagatatgattaaagttttaggattagttagatagaactcaaacttttaaatttaaccttagaaattgggtctaaaattaatttatgaagctgcttaaaacccagctttacctatcctgtttattttatgaaagcgcttcagccatctccacttattttttaaggtgaagttgaatccgtttggttgtgctcatcctcttgaagctgtgtcaaacaaacacttaattgttataaacctgaaaaattaattactttcatactc

SEQ ID NO: 3458 - DNA, 5110 bp, Oryza sativa
tgcgtatgcccaagcacgcaagtggttaatgtcatgtggtatagtgcatctctttagtaaagtatcaggcgttgacatgaacacctgacggagcaagtagctagtctccttattctgtaaaaacgactcgactgacgagccgtggacttcatcttcatgtgcaagctgtgcattttatgtaatttgtggccgggcacgttttgtcaagtgcatgcctagttagatcaacgctagtcaactggcactgggtatctaaaaaaatacacaactggatgatcataaattacacctgaagttcaaatggggtcgcagagaaaggccaaacttcattgtctcgcaaaacatctcttctatgttatgttcagttctaagcaattctcttttgaaggaaagttccaagttccaagtaggctcactacttaaaaaaaaacatttttagaattaggtgggcaggccgccctaacaaaacggccgcaaaaaatgtagccatttccacatgcaggtgtgctaaccaagcaattgtgcaaatgttttccacgggtgaccagcttaaccaaactgcttgcagccttatggggctatctgcgcaggcgaaccacttaaacgtccacatgtgaaaacatgtatatttctataggtgatcactttaggctagtgaaatgcagaaaattcagttttatgagtggtcggtgaacagacatatctcttttgtcatgttgcacagacagttgcccttatggacaacatgtatagtcaatttttttagactttttttatttttaaattttattaatagactattccaaaaggtatttctgaaaactgaaccttttggccacatcagccgagtggctggcgtgtccaaacaatattgtgtgtggcgtgacagagttatttggctagtctggcgtggccaaaagattcagatttgaaaatactttttcgaatggtctattaataaaattaaaaaaaataaataagtctaaaaaaaattgtacagtccgagggggcatcaacgaaagtttgattttttttttcttatataatgcttataaatgattgggccaattcaattttaacttaaagtgatttgaagaagtttggggacacgatcttaccgcggtgtcaataactagagtaatgaacacaacccaaattaaaagaaaaaaaaactcccggaccagtaggctgagtttaaggagaaggggataaagaagattgggaagatacataaaacgaggtgagctactagtgcatgattaattgagtattaattattttaaatttcaaagatatattaatacgattttttaaagcaactttcctataatttttttttttgcaaaaaacacaccatttaggagtttgggaagcgtgcgcgtggaaatcgaaacaaacaaactcactttcacctctcctagaatgcagcaaaagcacaacttcaaaacatcatgtagcagtagagtatatgttcaatttaatttggaattacaatgcaagttttccggtaaaccattttaagcactcgagtggacgcccacctattttttgcatatcaattcaatggttatgaaaaaattttcaaattttttttgataagatagattaaatatgaaatatatcacttcacaaacatacaagtttaaatttaaattctacaagttttttagaaaataacaaatttaattatgagtatatacgtatactagttagagtttagtttgtcatttttattacaacttgtagaaattaaacttgcatatttgttgagtggtatatcacatatgaaactatgttgtaaattattttaaaaaactttttaataactatttagtcaatatgtaagaaacaggtagacataaacaacaagaagattaaattaggccctgtttagattccaacttttctcttcgaacttttagcgttttttagatcaaaggcttcacacctggctttactgagataaagcgtaacaaggtaacttctaacttttccgtcacatcgaactttaatacacacaaacttacagcctttttatcacatcgtttcaatttcaaactttcaattttaacgtggaactaaacacaaccttaatctccaagttttccaaccatcaggaggctctggctacatcatcatagtcatagatggaaaccagaaacaagctggaaacttcttcggtcaaacaggcgctaagctatacagtatattgcttatatgcaattgacgtgacgctcctactgtttggtcaaacaattaaatagatacatagttgcatgatgcatacttctttgcttggcaaaccgtaacaagtgtgaccacgtaaaatacgtacacggtcattgctagctgttctcgtgtgctgatttttttttccctttagaaacgaagcctgtgttaatctcatcacttgaagcattgcactataaataggctgtgttgatagaactcttcctgcaaattctcaacgtgaacgtacgcagtacgctctagcctctagcataacacacacattgacacacatagcacaagctgacagcaatccactgaacgattagcaacgtagtacacatacatacacgacatgaaaccgtcgcttcttctccttgctctgctcgccacgttcgtcgttgccattgccaatgccgatgactacaccactgccgcgccagcgccaagcccagaggcagaggcaagcccgccgtctccaccgacggaggccagcccgccgccgcttgcgccgccaccgtcggttacaagctctccaccaccgccggcggccggccctctgatgcctccgccaccgccaccgccgtcggtcacaagctctccaccaccaccaccactaccaccaccaccaccaccaccggcggccagccctccgcctccgccaccatcaccgccaccgccgtcgccggttaagagctctccaccgccaccgccggcgtggtcgcccgtgacgaacgtgaacgactacacgatccagcaggtggggaagttcgcggtgcagagctactgcctcaacactggggcgaagctggtgtacgtgaacgtggtgagcgggcagacgcagccgtgcagcggcggcggtagcaactaccagctggtgatcaacgtcgccgccggcgtgaggacggcgcagtacagcgtgttcgtctggggcatcctcgggacaaccacctggaagctctggtcgttcacgcccaagaactgatcgatcgatcatggcagctaggcacacgttgagtgtggccgtacgtaaacgtgcgcgtcaaactcaacaatgtgttggctgggctacgtcgtacttagagagatatgatgactgggtgtttgtattttgccttggttgttcatttgctggagtctggagtctctgtacgttttttgttcagcgtggagttgttcgtgtttacccgtaccctgcaatgctgcaacgattgggtggcaattttgttcatcgtctcaacggcgattgatgctgttttttgcgcgttcgttaaaaaagaggcgttttttttactgacgatcgatcattcgatcgagcgtgactgcgtgactgcgtgaggccgcgagtcgtgagtcgattcgagtttttaggcctcgtttggcatgggctaaatccggcccagcccatacatctgtcgtacgggaggcctgggcacttggatgggccggacttgagggccatcaaacgaggccttgagacaaacccaagtttggcgtgggcggagatgcggatcggcgtgaccttgcgcagtttcgcgggtccgttggatcgatggaatagcgcgatgttcggtgtgtacgggtatgttagacagagatccaacttctaaacttagttcagtaagtagtttagtctggattagaattgtagagcaatctaaatctagctttacctctctaatttattttgtaagagctcgttacctaacgggccgttctcattttaggtaaagctgtgataaacaagccttatacatactccactagattcatgggatcggggtgtgtgtctcatcacacacacatggctccaatagcgcagcagtgttcctatacacgaccacattcacacacaaaagatctatatatctcaatcaacctcatgcaaaggaaaacatcttactactactattatgttttctagaacttagcagtaggtcccctccgttttagtttataagacgttttaactttggttaaagtcaaactgtttcaagtttaactgagcttatagataaatatattaatatttataatactaaattagtttcattaaatcaataattgaatatattttcatctacctccgttttaggttataagattttctagtattgccagtattcatatagatgttaatgaatctaggcacacatatatgtctagattcattaatatatatatatatatgtaggcaacgctagaaagtcttataatataaaacgaaggaagtaataaatttgtcttgggttgaaaatgttactacttttttctataaacttggttaaacttttttaccaaagtcaaaatatcttataacctgaaacggagggagtaatagagccagtggtgtatccagaaataaataacagtgggtctgagtaaacagtcccctcctcccatttatatatgctaaaaattttagtggagttttcgtggggctctcataatcttcacgctgataatgggggctcgagacccgccaccccatactggatccgtccctgagtagagctgcttggtaggctgaaaactgcggctacgactgccactaggacgcagccttgtgtgtgtggcactattggtgctggctgcagcgcatcagcagaacaatctgttgaacaaccccagtactatgttagatctgtctgacttgctgagttgggcatgtttaactcgctgctcggtcaccgcggttcggtacttggcaatggcaaattggcaatgtatatataagcatccaattaatgcgagtacgtcgggtggtgcatcaaattttatcttgggctccaacttgtgcgtttgagtcttcgccgtcggcccttacccgcgtgcggacaaatgccggaccggactgtgcgtgtcaacgggcgttaatcca

SEQ ID NO: 3459 - DNA, 2716 bp, Oryza sativa
acttttatattccaacagttatatgttgatttcgagtttaattatcttggttggtttgattacttaattacacctacccctacgtttagtgagtggtagactggtaggccggtgaatgaactggtagagattgcgaaaaggtttcagttttttctggtaaagcaatgtgtactccctccgttccaaaaaaatgcaaaccctggtttccatgtccaacatttgaccgtccgtcttatttaaaaaaattatgaaaaaaattaaaaagacaagtcacacataaaatgttaatcatgttttatcatctaataataataaaatatgaattataaaaaaaaattatataagacggaaaaacctaggttttgtctctttttttttttggggggggggggggggacggagggagtaggagtggcagtgttgaggcaggaggaccaggaactttttctgaccctttgtcacgagagatgcagtaggttttcccagctgcagtctgcactcgcgtcgcggttgttattgtcggtgtcatccgggatttaccgcagggtgaaatgctggcctttttacgaggcaggcagacagcgtcttcagtttggccctatggggatcttcttacagtctgcactgtgggagtactagcattgaattctttctgctagttgtactaggttttttttttcttccgtttaaggccgtgtttagttccatttcaaaaattctttcgaagtatacttacacatattttaagtattaaatatagactaataataaaacaaattacagatttcgcatataaactacgacatgaatctattaagcctaattaattcgtcattaataaatgtttactgtagcaccacattgttaaatcatgacgtaattaggctaaaagattcatctcgtaatttacatacaaacaatataattattttttttaacatcaatataaatatgggaaatgctaaaatgacttacgttgtgaaacggagggagtatctttttacagcttgagagttctatcgtttgctcggacgcatgcacaataaaactgcctgactataacactgtgttcggcagaagccgattgagaagaaaagttcctcgttttttacacacacgttttcaaagtactaaacattatgtgttttcaaaaaaatataatacaaaagttactttaaaaaacatattaatttaatttttaagtttgaaataactcaattaatcatacactactagttcaccttattctaagtatcttctaatcttcttcaatcctcttctcacaaaatggcaaaatgatgtgaagaaaagaaaattcaggttgcattttgattactacttcaggttcgcgcagcccatgcatgtcattaatctggccttattagaagattcagaagcccatatatagccatcgctaatcttcttcgagcaggcctaaaccctccattggcagcccataaatcactccaaaggcacataaatatagggcctgtttgacacagctctagctccagcttcacccctcttggagctggagctcagccaaacagttcagctccactaaaactgggagtggagttgggtggagctctctcataaaatgtattaaagttgtggagctagatttaggcagctcaacaactctactccagactcaacttctggagttaaatttaggagttgtagctgtaccaaataggccctactctctctgtcctaaaaaaatatgaatctactggatatgatatattttagtacaatgaatctatatagagatatatttagattcgtagtaacaggatatatcacattcaatactagattggttttttatgggatgagaaaagttgttctcacttgaagaagggaaaagacgaggcaaattccaggtcggcacgcactcgtacgtacggtacgtatcttggggcgtatcatcagcagccgcagacgtggacttggacggtcagtcagacggtctgaacacacgaggccaccgttcctcgccgtcgatggaacagcggcctgccgtgacggcgagccgacggcgaccaccggcagagggggagaagtaatgttggggttggcgtcatggcttgttcttttctcaagaatggattagcgcaacacgtgtttcgagtttcctttttctccttctttttatttagaacacggcataatgaagtcagtacaaacgtcttattgtcgacagatacgtcgtctaacactaaaagagtaattagccgtaaatccagataggctggttcttccacacaagaaacctaatcaattgagttacgctcacttcgccgtttttcgagtttctagacggtatgattttcgtaaaagaacatatctacacatgaatttcttaaatacggttatagatcatatttttttttaatttacagtagttaattattcgtttgtatcctcacatagcgataaaaaaatcgttcatgtatttttttaaaaaaaaaataattaaaggtcccccatatggaaaagctttcctgcaacttgaggatgaggggacgcaccaccgggagcaatgattctggcgtctccagcctcgcgtacggctgcgctcgcgtccatgcaaaaaagtggaggaaaatgccaaaagaagggggcttttcagtggaaactatcctctcttttcttttttggaatacagttagttctcaatatttaagatttgaggtaggctcgtttgaaa

SEQ ID NO: 3460 - DNA, 694 bp, Oryza sativa
ttcaggaacatgttgaaactgtaaaaaacaaaaacttactggatcatccatggtacttttttcttgcatagaatttcttagaatgaagaagtctatgtatattccagcactaagttcccagtcagcaatttcagacttgtgaacctccaaagagcttgtaatgtcccagatctcttgatgcttagctgaaaaatgggttaacagaacgtctggttgaaaactcataccatgatgacaaccatgcaatatttatcaacacaagcagaaaaaaaatctataagacaccttcatgaaacatatgaacaaaaaatatttaaacagaataacaaagatatctgtaagaagcttcatattattaggttttggggtcaatatagttgtacatttatgtacaggaaacaaggcgcaaaactgaattagagtatttagaaaacctatttgtttagagtaatgtatgaaaaacttacatgacagaaacaaagaatgagcaatggatgtcatgaaaattgtatgggctttcttccagttgccacacagaatataattctccagtgcgctttgctgatctccatagtattcattgtaaagagcctgtataaagataatcagttacacaaggttgaagtgcaatattttcctggtagtggcattcttaagaatttgcaatgctcatttcacttttaaagctacatgc

SEQ ID NO: 3461 - DNA, 7456 bp, Oryza sativa
tggtgataagagtgaatgataatatcaagtgatgcatcaggtgatagttgataccacattattaaaccaaggtaccgtttccagtcaattgatgaatctaccaacgcgccttgtacattaccagaaagcaactcatatatctttaacctgtcttcctgaatataatcaaaatccagaccatttgttttccatagatccagttgctgagaaaggtcagaacgatttagcattgacccacctgcctggcttagcaaaattgccagtcgaacatcacccctaaaggcagcaacttctgtggctgtgtctaattgccgaccagtcaaaagcagaataatatgttccagatacctggcatcatttaaggagcccgcctctccttgaacccgatgacaaacactgtcctgtaaccaattgctaaagtctgctcttctaaccaaagggagtgcttcaaggtctatggcaacagtaccttctttcttatctaaaatcatcccctcctggtcctcatcaccagtaggctctaactggttaccagttgctctttctgagaacaagacccgaataagctcccaaactgtaacctggtgcattaacagcacacgagaagacatagataaatcactgacttcaagctgcctttcaatgatgtcaatataagatctgcaaatatctggcaacacaaagcgacttgccacaaccttctgaagcttcaatttaaacaagtcagactcagtctccagatattcatgatgaagcctcctatggagatccagcgggtctgagaagcacagatcagtcagctcctccttaattttgttcttctcatcacgtacaactttgtcgcctgcaactttctctatgtgaataacagaagatagaccagttccgggtctattgacaagactgccagaatgtacaaggatgccatttggtccccaaccaacacgaaatgacctgcccataaataaagcagcatccacaacacaattggaatatacgttcccagccacaggagtttcctgatcagatggcaacttaaagccatcaccttggtcattctcactggaaatcccttgttttgcccagacataagaataccatgagaagatgggccatgttctgaagaatttacactgtattccagcagagcctgtggttctctcctaccaattacaccaggtctcctgctgactttcagagaagaaccatgcaaaggagagagagaccttagcctcaaacctttagcacttgagttcggtgaatccacattcatcttctcactgctgaagtatctctgatcagatgggaatccatcctccatatcttcatcaccttcctcattggagaacatcgtcatccgcatttcatgcatctttgcagggtcaagcccaagatgagcaggcaacgaacgtgaaagctccagctcatgaccatttgcaggtgggtctcttacttccgcaataggctgccgaacaaccacttcatccatcacaacatcctcttcttcctcgtccacaagacggaatcgactaaaatgatcaacctcgaacttccacctgccgctcgagtggttgaacgaaacgaacctagcgccttgctttctcgtttgacacttaagcaactccccaagagcgctaggctctggaagcacgctcaaattcagcatcaacgtcacttctgctggcttattaagaccttgccctaaaggcggcttgctagcctcatccttgtaaacctccacagagtgcctaccgaacttaacgatcccattcaggtccatccccctcacatcagtgtcaccggggaagtgaattcgcccatacccgaccctcccgacgacgaaatccgggaccctgctgcagtagccagggtcagccgcctccctctccaccagctcatcgatcgacggcttggtgaagtaatcgccatggcggagcacggggaacaccgggtcggaagacatggcaggccaatgaggcaaccgagacagaatcagcaagccctagcgccgccggacttcatagcttcatgcgcagccaagcccttcgctccaccaaaccactccagattcagattcttctcctcacttgggaaaccaactgctgcaaacaaaatcccccaacaaactgcagggggttcgagaggaggagagattcggattagatttgaacaaggggaatgaactgcgggtggatctccgcgcggagactgcgcagggggtcgggaggggaggagggctacgggaggagagcggttaccttcgagggcgaggaggttcgccggcggggaggacccgccgcagccgccgcgagggggaagaggaggaggcggcggcttgagcggagcggagcggcggccggcgaggaggaggagaggggggagctcgcactaaacccttcgcgaggatttctggggcatccgaattatcgtgaccgttggattgagtgatggagcatcatcctgccgttcatttcccactccagcatctcttcttacgctttcccaagtgatccgaaccaggggccaaagtgaaaagtatcagacctgtagtaccaacgggagcggtccaaataagtaataagggggtaaagcgaaaatttatggatcattgctaatggtagcgatcataatcacttaaccaggggctaaagtaaaaaaattacggagcttgatagtgtactgctttgatagcagtccaaataaaaggactaacgtgaaaaatgttgtggatcgcgtgttacaaatgcgatttagaaatggactagtttgagaacttccatgctgggggaattagcggctcaactcggcagcgccggcgagaaggtcagtctagatttattattacggttattattagtctttttgataaatttattttataaatagacctctaaaatattccatgaatataccatttttctcaacaccaaagcttattggcaccttggcgtcaatgacacttctaccgacactcttcctaccatggtagctaagttactgatgtaaataaggtttgtgtcaaagagactaacactgaaggcttatttgtaaaaggattcgaaaaaaggtttaaattttctccaacaaaagcatcggcatctttagcatcaaaggacctatatttattataaaaatattttataaataggtccttacacctctacatcttggctgctaggggagcaagggtgtcggcacccgcgcgttggcaccgatacgttggacctcgggggctagaaaattgtccattttcctagaataatttttctatggtctattgtaaaacaagttttcaaaaaaggtccacgtaaaaaatctaggtaggccgggcgttcgccaacgatccatttggcagacagcggcccatgcggaatcaagtcttggactcgggttgggagaactccagcgaggtaagaatattatgaaatgttcatcgttttcagaaatgtttaagacacattcgactgcagtctgcaaaaccatatcttggtgcacagcaagcatatatcttggtgcacaacaagcatacatttattagtttttcttttggatacacatgttgcccctaaggccaacactgcttacaatcacccatggccttctcactgttgcagaactgccacttttacaatgggaaagccacacctacatggtcctttccttccatcttattcttgggatttccacacctacatggttctgccaccgttacacaacacatcaactggaactggaagcatgtacatggaaagagttggctgggctaccggtagcatcatgacatgaatcttcttgcgttgaggatggcagacggctttggtattcagggtgcagctctcagagccctgacattgcatagtccatggcatccaccaggtaatctgcatgaaagtagaatttcctttagttactctatgggcaatgcagtaatggcaaagttttgtttgagacagttcatacgaacctgcatcatcccttgtaaagcacattggtggttttatcctgaagacattaccatgcagaccaccttttccaactaaaatgttgagatctggattacaaggatgaagaggcaaagtgttaacagggctttattagtataaactaataatgatgcgatcatggaaaagagaaaaggaataaggaaagcacccttgagtttctcaaacaataaattggtctcggccttggcaggtgtcttctccttcctatcggtaacaagctccaccccaagcatcaatcccctccctctaacatctccaatgactgacaacagaaagaccaaatgatgggattagacagattaatcaataataaatagttgagtgaaaatgttactcagatgaaaggcatcatcaactaaagcaacaatgttgaatcaagcagaatgtaaactggcgatgttgttatacaaatataaccaaagattgtagattttactttcatgcttttgctggagctcttttagacgattcaccaaatgagatccaacatcagcacaatgtgcctggcgtttctccttgtcaagaaccttgagcacagcaagtccaccaacggagcaaacagggtttccaccaaatgtgttaaattggattttttgcgccagcacatttgcaatctcgggtgttgttacaactgcccccaatggtagaccatttccaattccctacaaacaaaaaaaaaacatcagcaataaataatggcaacaaaattaaacctttgaggcttatttttccaaggtccattcaaatgtatgtgtgttgggtgaagacctttgccattgttacaatgtcaggaataacatcttgcgtctgaaatccccaatagtgacttccagttcgaccaaatccactctggacttcatcagctatacaaacaccaccagccttccggacagtgtcataagctaactttaaatatccaggagctagttcaactgcacctcccacgccctacattcatgttcatgtatcaacaagatcgccatatcagtaagttctttcagataaaaagctgaggaaagctacaatctttcgattatgtaaaaagtatcatataaaaaatcatacttggaaagtttcagcaatgaaacccgcaacccttccggaggtaccataatttatttgttcttcgacttccttggcataagctacagcatcagaaccgaaagttccacggtaaggatcagggttcatgacatgatgtatttcgccctgcaaatgttgggataagattttgcttcattttcatagataaagactagtttgctactacctccatttcaggttataagactttctagcattgcccacattcatatagatgttaatgaatctaggcacacatatatgtctagattcattaacatatatatgaatatggacaatgttagaaagtcttataatatgaaacggaggaagtactttgctatgtatagatagacagttcaaagtaaaaatcaatttgcgcaaatataaccggtggtttaaaatcagcattatgaagaacaaataaaagagggcatagatcgaaggaagttagctattcttgggtaacacaatgaactcggtaagtgtacagctgataaccatgcttattttgttatagacgtgtaacaccacctaaataaacttttttctctttaaatggatgtgtatagctcctgccattttactgcttcaaaaaaatataataacaacttaaagttaattcttttccagaaaaaataaatgaagttagcttaggtgctgtttgcttcgagagttttcttccacgatctgatcacgctattacttgtttgcttcgagtacaatgggatcaggtaccttgggaaacaatacggacctaatacaaactcattacctaccgcctgatatcaagcgttttctgaaaacattacagcgtaagtgatcttccgctcgaattcaaacaaagcatggtatcacttgctctgtttccattcacggtgtgatatttacatttgccttaccaagtttcaaccaaacagcaccttagatgacttgatgaaaaagagtaggaattgcacttatgcttcactattacttgtcggtactgtgataggaccattctcagctacagaccatcttaagctagagtgcattaattgaattgtagcagtagtactggtattattaacagaacacaaacctgagggattgggtacttccacgtctgcaaacccgtcaatcctattgttccagcactaccaccatgataagcatttctcaatgcaatcatattgagattcccactgtacagccgagccatcagcatcgccagttcattcgcttcagtcccagaattcacaaaatacaccacctgcaggcatcctcagatatgaaacaattatttccatgcaaatcaatgagttgttttacaatttacatcatgatcgacttcaaagtatctttgaccttgagatttcctggcatcttggacgcgagcgcttctgcaaactcgacgatgggttgattcaaatatatggtggtcgtgtgctggagcagcttggtctgctccaccacagcgttcacgatatccggatggcaatggccgcatgaaactgtcacgatgcctccgaagcaatcgaggtatctcttcccattctcatcgtacagatactgcatcttcccttccacaatgttcagctgtaaaatggacaaaaaaaaatgcattccattttaaaatgaaaaacagaaacacatgcctttcgccatgattcttactagtataacagttttttttttttttacgaaagagcatgtagcctagtgattgtagtgatttgagtagtacccaaggccctgagttcaaatttccatataaacaaatttcatatagggttgttttgcggggctaagttctatatttcaatagccgtatatatccagttgaatatagaggtttggtaaaaaataccctctctaaaaaaaagaacagattattttttagggcgtttaaacacattagtttattggtgaataaaaaaaaaagggggaatagatacgatcgaatcagggtttgtaccggcttctggtagtagtagaacacagacgatccaagaaactgcttcctcttcgcgaggatctcatcgccgctccacccggcgtacggcctgggccggtgctcgaacggcggcatcaccggcggcgaccgcgccggaaccttctccgccggcgccgcctccgacgacgacaccagcctccgcaacgcctcccccggaccccaccgtctcccggcgccgccggtggctccgcggcggagcagcagcgacgacgacgacaccgccatggatcaaatcacgcacggaccgattcttccaccaaaacaacaacagctcgcgatcgagagttggagccgtgcggattactgcggaattataatggattctgctactgtaggtcgggttggtgagattgagattggatgagaaggagac

SEQ ID NO: 3462 - DNA, 4782 bp, Oryza sativa
  unsure (1)..(4782): unsure at all n locations
agtagttcttgaagtaattttcaatcgaaactactcctttggatctccggtactttggagtacttcaggcaactttggagcttcacgtacagaatgcaggggttggttggccatgaatcattatcgtaaaatctcattctcatagtcagctggtttttttccctcttatgtttcacttctaccccaagggaattacagagtgatccaaggattaatccttttttttgaacgcttccaaggattaatcttgagtcaaatacaagtaattagatactacaggtaaaggagaggtaaacctgcgcactggaagccggattaaaccagggaacatatcttatgtgtataagtttgagcaattctacggtacttgaggagttaccatgagatatcaaaatttcagtgtaaaatttggtacctcatagtacctagataccaagagataccaaatttacaatagaaaaaatggtacctcctcaagaaccataaaattcgtataagttttgcatgcacacttcgtgcacattaagtagcaaatcttacgaaaatttctaaaaaaaaagacatttacttctaataatattacacattctgcaaagtcttatattcaaattcattatattttagccgtagaaaaaaaggaaaaataatttttcattttcttaaaaaaaataaaaaaaatcattttttatggctaaaatataatgaatttgaatataagatttcacacaaaagtgtaatatttttgaaagtttgtgtattttttttaaaaaaatctgtagtatttgtacgaagtgtgcacgaaaagtgtagtatttgtacgaagtgtgcacgaaaagtatgtgtgcatatgatatcttccattcaaccaaagcatgtgttcgacggcaaggtgccaaatttctgtactgccagtagctccggacgcgcatgcttgtcacctcagttgcataagctgttgccctgtcacgagatgcaacagttagctcggtcgttagctgttcaggcgctgttgggcttcgaggctgccgatgccgtgccaaagattgcagagttcgttagttaatcgatcgtccggcaagggcgcaaggcggcaacacgtccgcacgtcgtttcattttctccgaaaagtgagtgaggccacctcccggcccgtcccatcaccaaaacaaacaaaaattttggttgccgtgtttagttctaaaatattttttcaaacttttaacttttctatcgtatcaaaattttcctacacacataaatttctaactttttcgtcacatcgttccaatttcaaccaaacttttaattttgacgtgaactaaacacagtactgtacttccgaaacttttttaagcacaatttgattgccatttaaattccaatcaaaatttagtgtataattgatttgggataaaaagggtagaaagataccccaaggtagcgaggtccggctagaagccggcgacgaccatctccaggcacacgcgctgcagcaactttatcttgaagttggcggtgaaggaaaggaggtagaggtcccagagcaggtcgccgttggcattgcggcagccaaggcaccgagaccgctgactacttctgcttctactgcggtgacggagaagccattggggcgggcctaacgggaggggggggcatggagcctcagctgaacaactcccccaaatttcgttcaaagcaaactactattaagcccaaaagagaagctttcagatctaccagagaagctgagtttgaggcaaagaaaaaaaaggaacaacgaggaagaggatgctcgtacctgtgctcaccgacaacgaggcggtgggaacaacgtgcaaggacggtggcgctggtggctcgcgggaagcgggtgacgaagacctcggcgttgctcgacgcgggcagagatgaggaacttgtggggagtcgagacagagtcgaggcagagttgcctatggcagaggagagagggatacagaggtgagtgagtatgggagtggggattaattgatcccgtggcaacggaatcccgtgggttagtttttatgcacttaaatagtttaaaaaaattaagaagaagtattaatatccaatatatcattccacaaacaaacaacttaaaatttgatttctacaaataaaaacaaattaaactagagccagttaaagtatacccactcccatacacatacccgtcctggcctgtgtccaccgtgcgtgctgtgctacgagatccggccgtacgcacatctacccaacgatgcattctggccgggccaggctccctccccccctcggcgcgggccatgtcgtccgccggccgcggcaggcagcagcgcgcgggccagccgcggcgccggtgcgaggggactagatccgacaccgattagatgcccatgcccatgtccattgctcctcgccgcccacctcggtccgcccccggcaaccaacctggggcaacccaagccccggccgcgcgcgcatgcgtcgctcgctcacgcccgccgtacgccgacccacgcacgcgtcacggtcacgccgctcgttctcgtctctctctcggctgccgacttgcttggctcgtatacacgggccgtgtgtgtgccccaaagaacagcgcgtcgtactcgtacgacgtcctgcccatgtctcgcgctgccggggcagacggcagagacgaaggactgcacgacgcagcctgtcaaaaaaactcaaaaaggactcgtatcgtaagtacccctccgttccaaaataaatacattttcactgttcatgtgtaatgttaatggttcgtcttctttgaactgttactagataataaaatatgaatatgactatgttttttaaaaaatcataaaattttcaaataagacggatggtcaaatattggacacggatacccactactacatttattttagaacggaggtagtacgtgaaagatccctttctgatgatgcctgactgcatcaacccactgtacgacgaataatcttcatcagacttctgaagcagcatcgcgtaacaaaaaaaacgtaaatattaggaaatgacataatatcaaataattagaaagggtaaaactttaaacccaaatggtctagcataccatcttataaagctagaaaaaaaaacccttgagcgtttctcagcattgcctaaccatcttatcacgaagctgggactcggtacgtagttgttggttgttgccgcttcgctcggatcgaacagcgagcggctggggccttgcggcagcgaggccggccaggcccctaccaccaccactgccgttggcccagcgctgctgtcccggcaagcggatcgccggggaaccatcgatcgccatcacggatcagttgccaaaccgccggtgcagtgagcgggtagcggcaaaaaagtgaccaaactacagcgagctttcactggaacaccagggccacaccgtgcaacgcatgcaaactgcaaacagcgagactggccccccggcccccggatctgagcgcttcttactgccacgctcgattggtatcatcaaccgtgcatatatatatccactccgttgtgtcatacattcgtaggtgcaatcaaaaaattgtgagatgtacttaatagtgcagtattaatagatgtgtagtttcaatcctaaagtgttatgttcaatcccaacacatgtataatttcttcttaaaaaaatatttagagggatgtctctcagatttcgctatgtggataagttattatcggctgctccttggcttattagttgcgactaaaatttgaattttagcacttattttttaagtagatttttgaaaaaaaaatcatattatattttctagctttatttaaattataaataatattatatataaaaagttttacctataaattattttaaatgttttgttaatatttctacagcttctcacttcacctatcagacactataggtatgtttggctacctcagaggctatcaaacaactgcccacgttttaagttgagatacaatgcaaacgcacatatttatcttgcgtatttacattaacaaattctaacaaacactgatatttcgcacagttcacgaatttaatttgggcccttgttagcacagcaggggtcgttttcgctgcaccttgtaactagcagggggtagctcgtcgatcccctgcatctgttgacctgaaagagacgagacaggcgaagcacgtttctagggcgccccggacacacctccttgtaacgtgggcaccgtcctgccccttgctacctgctgcaaagcccttcacgtcgcagacagaaagtttgtttcctcctcaaatcgctcctaaactatatccatcccttgttaatccagcaggcacacatttctgacggattctagttcccagctctgctttccatagccccttccagggttttggaactcatcaatagaaacacacacacacacctctttgaagtcttgatgactgaccgggctaacaaagccggttgctttcttgatctccgtcttctcaggcccaaaacttattttcggattagaatggttttttatatttaaactgtgcacgttctccagcacagttcttggactgtgcgtgcgtgagccatttcctaagtgtgcggtttaacttttattttagtatctgccaaggtcttgataaatgcgagagttaatcctgatgatccattangataatcgccatgctggatggaggattttggatgtatctgtacagtacagcccctgagattttgactatatgtacatatatatcct

SEQ ID NO: 3463 - DNA, 1580 bp, Oryza sativa
gtcacatgagcaaatcaagcgattagatcacgagatatcagagacaagagagtgacactgttcatgtagtggcatatcagtttgctgaatattctctcctgtcatgaaattaataaaaaaacaacatgagctaggagctatagtgccattgatttggcaccatcagacgcctctaatcaagcctagcacaatccatatgtactgaaattttgtcagcttaaatatactaatgaactgaccagatgtctgctagtctagtactccattttgcattttcaacagcttggagatcttgtagcaattgacactttgcagggccccatgtctgtgactttccatggtctaatttaatttgtgaagccccagggccgagccaaaaactttgaccctctaggtattagggcctagtacatttgatcccaataacctgcttaatcaatcaacctctcttttatagaacgtgttgccccttttcggagtcctaagccacgttgcaattttactattgccgacttcgtctccttcgatatccctgctcactttacaattttacatcgatctgttcttggatgcatcgaagaactcgagctgtgtacttccactacgttatgtgcgcacgtacgcgcgcacgagaggttttaattttttaaaaaaaaaattttgcagattgctttggccttagtagcagtttgtcggtttgatcattaattaccgtgcaaatatatttccaagttgtctgaatttttctattgccagaaacgaaaaacagatcaacaacatcaaattaattaattgttcacaaagtagtgtggtgtttaattatccgaattggttgtgcgtactcgttaagattgtcctttggatcaaaggcaaaaggcaatgcaatcaatccacaaaacaagtaaacaaacacctctagatgcatctctgaagcttatcaaagcagcttaagtacagtagtagtacgtctacaagctaaattaagtagctaatctagctactaataactctactagcagctaatagaaatccacatatatcgatctctattagccctggtccagtacataccaaacaagacaaccctttttcttctcctaaacaatgcaggggccttcggtgattacctgagaaacaaacacttttcccttttcaggagagatcgaagaaagaaccaaagaagagcaaaaaattcttgtcgtctccctcctcaatcgctagctagcaagctcgtcctccatcaatcgtcgtcgtcgctgcagctactgatagagctaggatcgatcaccggagaaggctccggatgatctcggcctgcgggctgttgttgtccatcgtcgacatgagctccgacagccggtcggacaggtcgtccacctcccggtgcaggctcttgatgtagctgcacgtctccttgagcagcttcgacgccgacgactgcatcatccaatatatttctcgtcaagatcacaaccaaaattaccaaaccgaatgtctgaataatcctagtatcctgtcagactctgctagctatagctagctaatctgcattgacgaatcgtgctgcgtgtagtgtacta

SEQ ID NO: 3464 - DNA, 579 bp, Oryza sativa
gaaattgtacagctgaagctacagatacggccttctgcacctctgtaaaagcggaacattggcaatacatgaacattgagcctgcggcacatctccttttgttcattggagttgaccataagaaactgcagttccggatgcatgccagccaattgacataccttttgggacattatgcaaaaaggtgttataactattcaaagtatgaaatgctcttttttcgttaatttatgtttgagaaaattgtttaataccatgcatgtgttcttttaccttagggtgtagggccttgcaagctccacaactaggggaaaagaagtgcaccacggtgagcttatcgctggccaacaggagctgcttgtcaaaatcgtcttgggattcaatgtttttcatgttgcaggatttcatgttcttttcccaccatttagtcttcattggggtgtgaacagcctaacaccacgacaatatatctcattgacatctcttttgtgcttgagcatgtattgtcaatgcatatttgagttttgttatttgtgaatttcgaaagagaccaacaatttcattttctgtgcagatttt

SEQ ID NO: 3465 - DNA, 1817 bp, Oryza sativa
ctctcaatgtcgaatgacagctagctagcttcgtgatcatataagttgatgcatttattctctctgtaatattgtaattcaggtcaaattaataactaatcaaaattcaaacaggtttttgaaggaaacgatgccagcacacgtagcacgtttcatgcaggaaaacattttcttctagagactgcaagaaaacagtttcttagaccgtgtgcatgcagaaaaatttcgggacttcggtacatgccaaaaaaattcatgcattattcgatttctggtcgttgatgaaccgggatcgatattggcatgtgtatattcagctatgctacatatagccgcttaatttcgtcaaaactcagtaaatttgtagaaaacataacaatattttcagaactaaacaaacgtattatttaaatatatttaatgctagatttaatcaaactaagttagatttttggatttttagatttgctaaattttttctaaatttgattaaacttaataatgtttgactagagaaaaagtgacagcgacttgcgatatgaaacgcatggagtagtattgttgtgttaatagttgaccgatactcaaattaattaagcagttaaatattaattatagttatgaacagagtgagtatatgtatattagtacgagcttccatgttgaagttctttctgtaaaagtgatgatcacgattttcttgtcgttctaagtcaaatagtgtcctaaatctgtcctaatcaaatatttttagatttgaccatcatttttttagaaatttgtgtagtttaaaatatgaattataaattataaaaatatttggtgaatctaaaaatataaatcttattatgttaaacagttgatatactatactacaactagggtacgatatagctaaaatacatctaacgtagttaactttttactgcgagagaaatcatcgtactatagcactaaaacttttactatgactactaggtaatgaaaaggtgcaggaatgaatgttcgggggtgatttttctggcattaaagattttactatgctacctcataataaaaaggtatgggaagagatatttcagcatgatatagggcttgttcggctggccgatacagccgctgcacgtagccgtagctgctgcagctgtagacacaacacattgtttgtgttggctgcacaacagtgaagttgagtaaagccgaatagagccataactcgtggtaacaattttactgtgtgaggagcgtgtcgacgtttgatgtcgcgattccggtatttacatagtatggggatcgttgggactagggtatatgcgagactgaggtaaaagagatggagacagagatttttatacaggttcgggcccctgaattgtcaggtaataaccctacatcctgttggctgaagccggtattgctcttattcaccataatcacaccagtacaatatttggggtagcctatctaactgttgttgacatggcggtctgaaggtctgactcgtagtcgacaacaaggtagtcttcctcctcgagttcgtgcccggcgagatcagagatagcgctttcgtctctcctgacagtatccggagacaccgtaggggactagccttacttatccctgaagtcgatatccagcgtcttgtcttggcatatgttggcttgtatgttgatcttgtgtcttgatctattgtttcgtgtcttctatggtggatgtgtcccctctcctcctaggggtcttgtatttatacccataggtgtccccttgtccaagtagaactagggaaaccaatatggatacaatccgagtagtacttg

SEQ ID NO: 3466 - DNA, 14183 bp, Oryza sativa
cttctttttgaatctattctcaggatttgttctcaattttgagtatgcagggcatgcttctcgaagatggcagaggagctgtgcgagctactaatgaactcccccggcgagggcttgacgccagatctctacatgggctgctttcagacgatgcttaacgctcctgtgcccgacgaccacaggtcatcctacctgcaagaggcggtctctgttttcaccgacatactttgcagggactgatgcatgattgcttgaagatccatggcattctatgatatctgcagaattgttggaagtttccctgatctatctattgggttttaacctattggttattctgatcatacacgggatctgggtgcacaagaagctcccggctgccaagtcgcaagtcagtaatacagtgaagagctccaaaagttcgtcccttgcccgagtgcagtgaggaaatgtagatcagctattgatggtgcagataactgccatgctcatcaaactcctgaagaatgtataagctgtgtgctaagctgtaccaatcaactttcagatgtgagctgtacccgtcatctttgttcgtttttgtactgtaatactgttacaacggaaagcagcaaatcgtgtacggtgtatgttgtgctgaagagctcgacgaagataaagcatccagctgggcccaattctcggcaatacatgcacgattccacccttccatggacgtgggagcaagctgcatatttctcttcttcagtcgaggtactttttcacagcttatgatgaggttatcccgaaaatactgtggtgtactttttcagagcttatgggattattccgaaaatactgaggttttacggagctgtaggcctgtaacaattgcaaggggatatttttttttctcatcacacggaaaatgcacaaagcaacaaccccacacttgcacactcgtaaattggactgtgtcagtgtggcaaagatttgagagcttaggtagaatatttcttctgtcgtgcacgcgatgtcgcgatgaaatgaaaaatcacaatgttggagtgagccaaaactgcttttgcagaaccatgtgaagctgtggtttgtctgaggagaaacatccagagtgcccaaaaccgtggacagctaacgtgggttccttgtattcttctgttttattttcccctgcttaatttttggttttctcatatatatgtaccttttattccgttatattgagcggcgttcctggttttgtaggacccctgatttcgttttctcatcgtgcttttcgtcccgtaatcattcacgcgcatgaatagcagggagacagcaacgtttcccactcgcaacatcgcaaaccatactgtatcttcactcaattattctgcaactgaaaccattattaaacgagaaaattttgattaaacatactaatgcgtctgattctgaacgcaacgatttgactccaaacttcgtccttgttgccggccggtggtgcagtagtgtgagccgcatcaagcgtaggcgactttcacgttagttgcatatacaaacgaccacttgtctcagagtttttgtagtcggctgcacatggaaatgatagcgctatacccttacacccagttgcctaagtaaaataaaaacttgggtgaaaactcgcaatcacaaatctcgtagtacaattgtacaaatcagcaggatgagggacgtacaattaacctgtctgcctcaccgaggcctgcaccactcaaacgcgcacgggaagcacaagcaggagcagagcacgatgtggtgtgtactggtgtgtgcctccatcaacggctcaacgctgggcaaagagagagaaaggaaagatatactactgctgccacgacatgtaacatgtgactgttcacggtcattttcatcccaaagactatgcgattgtgcgatggtaacgtgcgattgtgcgaacgattaaaaaaaaaaacttatctcaaccccatgaggccatggccctgtgttagcttttaattcagttggttattttttttcaaggggttaggggcttctcctaccactcgatatcaaaaactataaaaaaatattagtgtgtgtttatcggtagatgctggatatgtataatgtataccattttcattattaaaaaaaactctcttacaacttcgtgtccaatcacccaacaactcataactccgtagtgatcattgtgacaattttgaaagaaagaaaagaaaaaaaataaataggttattgaccaaattattatagtgaattatctacattatatatatatattaaatgtatcgataaatgtattaacttatgattgattaagttttaattattataaacttgaaaaatagattaatatgatattttagaataactttcgtataaaaagttttcgcacgaaacacaccatttagtagtttgaaaagtgtgccacgaaaatcttaatctccatctaactcttgttggagaaaagaacataacctacagcagcagtagtatttcactcgtcctaaaataaaataaatcttatgtctagtactacctccgttccatcccaatataagtacagtgtaggttccgtgtttagatagtccgtcttatttaaaaaaaaatattatttttttcttattacatgataaaacataaatgatactttatgtgagactattctttttaaatttttcataaattatttaaataagacgaatgatgaaacgttgagtgcggaaaaccacgacggcgcgtatattgggacaggatgtagtactactcaggcaccaacaggaggggaaaaaaaaaagaatccatttgctacagaacgtttcgcacgcaggaatgaaccatgaccgtggtgtcggtccaggaggccactgacccacccgccaacggaattgaaaagcgctagaacaaccaacgtgaacgtacggccgcacccagagccgcgtccgcaaaaacaggcaaagcgcacccagtaaacaaggaaaacccaacagcgacccatccactgatccattccaaagccacgagcccatcgacttatccgcacccatcacccagcctcctctccacgcaaacgcaacccaacccaaacccccctataaaatcccttctcccacacacagaatttcacaagccacccacagacacgtactacgacaccgagtttgagctttgagctttgaggagtgtgtctgagagtttggtcatggcggacatcgcgttgctggtgacggaggagttcgagaggaagctcaagaggggggcgccgggcgaggagggcgcggcggcggagtccaggaggaacttcggcgccgtcatcaaggtgtgcagctcgtgggtcgacgccgccgccgccgccgccgccgccggggtgacggtcaacgtcgcgctgctcaacgtcgaccccaagtccgggcccgccgtcgccgccatggacggcgccttctccgcctagtcgcttcacagttttttcttttttgttcttcttcttttttactcaaaaaaaaagataagttaattaggaggaggaactagtctattatgtatctctcctcctttgatacagctcggtcaccgtgttgatgtaaatatagccgcttaatttttgtcttttgatttgaaacaagctcatcattcatccattcgttttggtttctctgaatttgtcgatttgccatgtgttcgatcgaacccacaggaggactttgaccaaaatatccatattttttttcccgtcgcggtctcgcgcaagtggcaggatggaagagctgacaaaattctctttttttttcctttttgagaggaagggcgcacacattagtagtagtagaggctatcaagcaaacggcccagttacaagttcaatggacaagtggcccaaaccacaagcatcgtagcagtagaatcagcttgatttcctttccatttggttagattatgatgaagaaaacgaaaacaagaggaactccactctctgtggatatcaacgctttctccggttgtttgatcacatggccgatatctcggtgacaacctgggctttgtcggcctcgaactgctgatcctctgcaagaacagagcaagtgtcttagcaaaccggttttgatttatgatttatgattttatcatggaaagaagtgatcacaaaaggtacactttacctttttctattgtgaaatctgccaagaacctgaggattttgctcttgtttgtcaccagtatacccacgatctcaggtggcttcttcggattgcaagtgaacagctgaatgtacatgcaagaagatgttcagtattcgttttgcaaactgacgaatttttcgtgcgttaacacgaattgtaccttgaaaacgcgaaaagcctcaacttgaatggccctgctttgctcctggtaatgacaacacatcatatcatattaaaataaactcatattagctacgagattactgaacaaaggaaaattaaggaaccaagatgcgacagtactgttgtatttcaattttttttgaaagttgtatttcattttttaacaacaaaaagaacatagacggccttaaatatagattgagattaggacacaaaaatggtatatgagatatgagatcttacccttaaaaggttcattagtattatgaggttatcctttgagctaacatagcgcaccattgctgttgtgtttgacttatccagaagaatgtctcctagtagctgaaaaacatatcatgtgcatatcacaaatcatcaaaattcgagtcaatcatcatgtaaaatttaggtgaaatatacagctaacgcaagaaaaaatgtgtacctgagtggcttgccttcgaatgatatagttggatgatgacagcaattttgagttaaattccggaaaaaactgtcacatgaattgcaattatatgtcaatggaggtttgtcaaaggtcaaaaatagaagttgatgaatactaacatctccgttactagcaatgagaaatcttacccaatcgtaattatttgaaaagaactcagcagcacttgatctatgccttgtgaggagttcctgttaaaagttaaattgagcacaattgccattatcaacaccaaaagacatttgttcagacaacacactatgatgattgctcatattctgttaaaatcgtttacgagtcccaacaaaggcagaagggagcataaacaaacatgatctagaaaaggatgagtctctcctttggaataatcgtcattcatcaaggagaagattaaaagtacaagatggacgacataatcaccttaaaggtcttgaaggcatcagatgctatgttgaagtctggatattgtatataatcaaaaaatttcttcatatgctgagactctaatacatacctgcaaaattatgaagtttattaattgaagatcatgagaaagtgagtggtaactggtaaccatataaataattcgccaagcaaacaatgatatattggataaagaaagaagaaacatgatattaacggtgatgctttgtcctgtgaaatttacttgctatattatatatattttttaataaaatgtatatatttttttcataattaattaaaaatagtaatgtaaatcatggtcttgttaccttgcagcgacttggtgccgtatgcagtcccttagaattgcactataatgtattgcaatgtccatgttgtcatacctgtacacaggttgtgtaaatgtaaagaatgaagatcatataactgttttatgggttgaatgtgaagaatgaagtccataacatttatgtcctagggaaaaaaacatatcatagaaatgcatggttaaggaagaactaactgactacttacccagacattagaacatccaaaagatcctggttttcttccaaataatcagaggcaaccatcctataatctaccttttgcctagcaaattcgcagtaacttgagtgacatccttctgagtctgagtaaaaacgaaagaaaaaccctcttaaattataagaagttttaaattatatgtgttggtgcagataagcttcttgaggataaagtgggtcatggtcctatatgggtttcccttatctagagaatttcttaaacaataacttagattaaacaaaatgcagcatctaaattcttgaaaaatatcaaatatatatggatccctttgacatacttccaggtccatgtatggaaggcaaacaactagtagatgaagactattggtattctccttgaagaactccttcgtcaactgcgagcaagcttcatcgactgggtctgcctcgccatttccataaaggatggatttcatctccccgatgcttttggctagatctaccatctacatgttagttcaagtgcgtatttagtcacaaatgcataagatccccctatatatgatgatatgaatgattaaacgtataaattgtagtgtctaaccttaacacaattttggacaaacacaacttccccctacatatgtttattgttttgttgttatactaagttcctgctcattttgatgaaagcagagcgactaatataatcatgcctagttattctagtcaaatcttctgtttaattggcaacaggctcagctgttaattgattctacaataataaggtggtgttttaatccaaggacttaactttagtccctatatttagacactaatttagagtattaaatatagattacttataaaactaattacataaatgaaagctaattcacgagacaagatttttaagcctaattaatctataattagagaatatttactgtagcatcacataggctaatcatggattaattaggctcaatagattcgtctcgcgaattagtaagattatggatatgttttattaatagtctacgtttaatatttataattagtgtccaaacatcctatgtgatagggactaaaaagttttagtcccatctaaataggtctaatacaatctctggtttgaaattaatgtggctttcgaatatgcgcagacaaaattaaacactttaatcaataatatgttaaaaagggggttcaaaataatatgttaaagtagtttctcttttttcctacctgcagtttttttttctccttcccctggcataggcctatctggttgattgtgctgtgtaacaaaaactcttctaccttctaatatattgacgtgtaattttttttatacgttcgcgaaaaaaaagttgaaaaacatcgatgtatcgtgtgaaagcgacattggtaaattgtcatataaaaaacttccatatcgttaaaattggaaaacgttttcacgtttgtgttttctatttttttagaagtgtatttttttacctggcctctacatccaactggatatatgcaacctttaaacttttgcgttttcagatcaggctttaatttaggacatatctcgtcatctctcggttgaaacggaacggaacgagcgaacgatacatgaaaaatgtgtatcacccaccttgtgttcgcgtttgacgtcgcgcttgtcaccgcacgcgtcgtggttctcggcgaggaaggcgaggagctcccgcgcgtgccgcaccacctccacggggcccctcgccttcgaccggaacaggctccccgccccgtccgccgccgcgccgccgccggtcacgcacggccacaggcaccccgccattaattcacgcgaacgcggtcgagctcgctcgcccagcagccggtgctaggcgccgtacgtcggcagtgacgacgacgacgacccagattatcacctcctgcggcgctacaatggtgatcggtatggtggccggccttcttcctcgcacgtacgccgccgccgatgcgccggcgccggcggccgcgtgctcggccgttcgtgtgtgcgtgcgctgggtggcgagatcgcggggagatgaggaatttgccgaattggatggggagcgacgggcgcggagcgggcagcgagctcacgttgcgcgcctcctaaagttttaccgattcggcgctatttttggatccaaaccggccgcgattctgattcgatggatcaaaaccggggtcacgcgagattttcgtgtggctgggccggatcagtatgagttgggctcgtccacgttgtcgtgtccttctcggttctcctctcgcccgccggcccaattatgttcttccgctgtgctatctagtacgagttgagagaagaaaaaccgtacatatcttcttcgaattgggcaaagaaagagaacaccaatattcacgatgtgtacacatttgcgtaatgatcgaccttattatagttcaacgaaaatgagatttcctaccctctttcgtacttaatatagcaatgcagtattgaatatgatatatattaagtactacaaagttaggctcccatcggatggcctattcagccaaagaaaaagccaaaatttgaattttcaaacttaattttgatattgattttgagatattttcaacgtagtttttttttcagcattgacttttaagtcaccgagaacacatatataaaaattttactaacaaattcatttttattctctaataagccgttttggcttattacgaaaaaagccaaacgatgaggccctcaccgtattatagaatgaagggagtagctgatataagaaacaaatgacattttattctaccagagcgaaattgagaagggattgagacacacatcatcactacgatcgcttgggagtgaaggagcggaaccaccagtgggtcgtcgtcccggggatgccccacacgtcggcgtcgtacagcgtcgtcttccagttcgggccgccatacacggtgaccaccagccggtagttgtagccgccgttgtacggctgcgtctggccgctcaccacgttcacgtaccgcagaaaatacagacgtgtgatctgcctatagatccacagggcgaactgccccgcctgctggatgctcttgtcgttcacgttcgccaccgccgtccaccccgcggccgccgctggcggcgccggcggcagcgagcttgctagcgcgacgtcggcgttgttggtgatggcaaccaaggtgacagaaatgacgacagctataatgctaagacgggacgactgcctcatgtcgcgagtacgtatatacctagagcgggtagtgctaattgtgagggtacgagatgattaggacgtgttggagttgagagctagtttgtgtggtgacctagtatttatagtggtgtacgatcgtgccttgtctcagacgtacagctagaacatacacggttattaattagtagcgttgacaaattttagctttaattaattagacaacaatcatactttaatttgttcgcctgtactaaatgtaaatgcaaatgcaaatccttttaatactatctccgtcccaaaaaaaattgcatttctagctccaaagctttgtccaaaaaaattgtatttgtagccatgtgtggcccagcaaattgattgatctagataagattcctaatacgagcagcaaatttttggtgccaaatccatttggctctaaagcatgtaatttgggctgctaatgcatgtaattaagtatgctaattatatgggttaattctctcaaacttccttttaatcatttgtatatatgaaatgtgtgcatgcagtgggttcattaaataaggccattatggtcatttttcaatcctactgttttatactaaattagctggaaatgtaatttttatgggacggagggagtattaaattggtgtttggtggttttgttgaaggtttcaaacaactgatcgagcgtaccgcgcgcgaatacggtcaatatgtcagttaggatcactgcgagcactttggttcgaacatgcctaacgatttccagagcgcagacgactttattaggtataatttgatttaatttcttaagacgcgattctgcatttatgctccagttatagcccggtggtgcttaacttatctccttagtcgggatctaatcacatgctaattgattaagccctaactagaaagaaacccgcaggaaatttacaagtccatgtgtgcatgtgtacaacatctacaactaaccgacatctacagctagctattgaagttcatggccttgtgatcgaggcccgtttgttccacatttccacttccaaagtccacagcgggcctgagggcaggcccaagctggaccccagctggacatacagatcaaatctagacacggctagttatctacgaggaagcagcttgacaagccacggcagaagaggatggattcagtggtaataatcttatcttggaaaattttggaagaacagaatgggcatatttttcaggcagtggcactttgttcccgcggcgtccctgtgctagctgcgtctgtaacactttgctctcttatctaataaaatcgattggtgaccagcttcaccgaaaaaaagaagggggaaattaaaggacaaaacacaataacataacgttaacgaatttttgtttcagtacttcaaacgttcatatgcgtgatgtgctcaatgcaaacgagaatttaacaactagcactagaatatacatgaaattaacatgcacatacacagtgctctaagcctctcttaaaacaatagtctgatatgcaggggtttgcacgcacacattacacatacatgacacacatcgatcgcgatcactggattcagttggctgctagagtgaaggacaagagcttccagttggtggtgccgaggatgccccacatgagggcgtcgtagcgcgccgtggtggcgcccgggccggccacggtgaccacaggcggtagttgtagccgccgttgcacggctgcgtctggccgctcaccacgttcacgaaccgcaggtacgtcttgttcgtgctcagcccgtagatgcgcaccgccgactgccccacctgctggatgctcttgtcgttcacgttcgccaccgccgtccacgccgccggcggcggcgccgcggcggcggccgtgacgctgccgccatctgctttggcaacggcaagcaacgcagcggtgaatatgacagaaaggactacggtgctaagggatgacggcctcatgtcgtgcctttgtatgtgtatgcagcttatgcttaattatggctgcctactaatgctctattgcacttgtgacagtgagattgtgagcttaattgtgcagtactgcagtggcatatttatagtggagtgactgaacaaactactccagctaattaacgtagcagcggtatggccagcaagatgcaattgcagagaaaacaagaggttaagattgactttattagacccagtacatacgagttcatattgttaattagcgcactcgtagctgactgctcatttcgttgttaattataatacacgtactacgtacatatgcaaaacgttcaaatcaagtttcaaacaattaccgcgtacggtcaatactgtcagttaaaaacttgcatttacacggcccaacatcgtgcctaacatgtatacatttaattactaggactaagctaaggtacgccggtgatttatatttattttcgagcagaaaggtgacgagctgatctcccgagttcagacttcagttcaagccatacttgggccgtgtttagtttccttcaaactttcaaaaaatcccttcacctcaaatatttggagtattaaatatagacgaaaaattcaattggacagcttgcatgtaaattacgagacgaatcttttgagcctaattacgctaggatttgacaatgtggtgctacagtaaatatttactaacgatgtattaattagacttaataaattcgtctcgcagtttataggtagaatctgtaatttgttttattattagtctatttttaatattttaaatgtgtgtctgtatacgttaaaattttttttaggaactaaacactgaattttttcccccacccctaaaccgaaaaccccccaagacagtagccagtgcatttcaactagtcagacaggattaagctagttaatcctagttactcctccgtttcaaataattggtatttctcacttcctcctaagtttaaaacattacatttatatatttgaccattaattactataaattcatatggtttaacatggatgcactaaaatgcacttaacatgctcagtaacttgaacacgctctgtcagaattatggatactacatatctcataatagttgactaaatctcggtaggacccaccacataccatgtcctatatggaagcaaccttcagatatggagagagttccggataaggaaagacgactagagttctacatggaaacgacaagtactactcggattgtatccatattggtttacctagttctacttgacaaggggacacctttgggtataaataaaagaccccctaggagaagaggggacacatccaccatagaagacacggaacaatagatcaagacacaagatcaacatataagccaacatacgccaagacaagacgccggatatcgacttcagggataagcacggctagtctcctacggtgtctccggttactgtcaggagagacgaaagcgctatctctgatctcgctgggcatgaactcgaggaggaagactaccttgttgtcgactacgagtcagacctttagaccgccatgtcgacaacagttagataggctaccccaaatattgtactggtgtgattatggtgaataagagcaataccggcttcggccaataggatgtagggttattacctgacaattcaggggcccgaacctgtataaaaatccctgtctccatctcttttacctcagtctcgcatataccctagtcccaacgatccccatactatgcaaataccggaatcacgacatcaaacgtcgacagtggcgtgccaggtaggggcattttggtgcttcaggatttcgacgagatgggttcaagagggattctccaacaataagctactcgatgactttggctgtggggagatccaacctgtccaagtacatcttccgactagatcggaaccatcatcgtcatcgacaacttggtctatcgagatcatccaagcttcaagatacgcgacgtaccaaaggatgtcagatcatatgacgtcaaacgagtacgcaataaggtaattggtagattggtttttcaaattgatctactaatttcgtagatacatccggcatgtatctacaaaggtacgcaatattttatatgcaatttatcgtatctattcagatcatacagcattgtcagatcaataatttattatgtttacccagagcatgttttttatacaatatctgttgcgcaggtgtccccgatgttatatcgactacgatctaacgctgggagctcgctctgtcttcttctgtataaatcatgcttgtttacagtctacataatgtctgacattttctgctcgttatatcctgataatgctagaagatccatgcagttttttgagtacatactcgatattctctgctatatgtctcgtcttctagaaaatatttttcaggaacaattgagcactcgagtaggttgtggtcaagtacaccgcattatcgagaacggtctcgacaaatgtagagtcgtcgcgcccaacctaccaacgaaggccgacgacctatctcatagcaccggccatggctggactactactcgagaaaaggtcattaacggataattctcgcgaacgtcatcgacttgatcacccgacatgattgtgaacggacatccggatatgctataagttgggtgcgtgagtcatgctggccacatgagacgcacatgtaataaaccaactctagcacccccattggtgttcgagagataattctacacgttcgctggtcctcgaaccagtacgtagcaatctctcgcaccgcaacctccattggtgttcgagagataattctacacattcgctggtcctcgaaccagtacgtagcaatctctcacaccgcaacttccattggtgttcgagagatgattctacacgttcgctagtcctcgaaccagtacgtagcaatctctcgcaccgcaacctcagatggttgaggtacgactacatcaataacgcagcggtcctcacaccacgacttcaaatgatcgagagacacctactcattggttctcaaccagtcaattgtagcgatctctcgtacatttacttctagtgg

SEQ ID NO: 3467 - DNA, 1324 bp, Oryza sativa
ccttcccattattttggtgaaatgacatggctgaggtatctgacccttttgtttatgccagcttattgagagaattcttgatttctcacgacatcagatcattgattgtatggctgcaagtaacccaacctttcgagctctttacaaaccagctgaaaaagtcacaaatgatggtagtcctgaacttcttttttcaatgtttttgcattgttggtcttttactcttttgtgatctgtcagcaccttactcatttgtatttctatgcttagtgtatggatggatgtgttcattgtgcttttcatacttaatatttattactgagagacaactttgtattgtgggactaaaaatttattatttcctactggcctgtaggcagtaatttatttctgttaccgagctgactgtttaatggttgaaccttttatacatcacacagatttgcatttatatttttctttttctggttgggttcaggggatgaggatgaagaagtcatgggaaatggaccagctaacaaaaggaggcgtactgctaatttaagcatgagaaaatcttctacaaacaagtatcaaattttgctgttttagtttttctattttttgtgggtattcctgaatcactaatggagttcaattttccttttacatatcagagtttctgcctctatacattcagctgtacagaaactgtgcttgatattgggctttcttacggaactcctgacaacagtgcgcttatcagatagttgtattttgcaattagcaaaaacatgctttaccacattcctggtggacaatatgcaacttttacaattgaaagcaattggtgtcatttgcacggtattttcttttcctatttgctatatgttctgctctttcagttttcaaacaattttggttccttatctttcaagttcttacacaggttttttcatcatacacacaacacaggacatacttggttgatgaaacacttgttcttcttcgtaagctacagttttcaaaaaatgctattagaacttaccatctagcagatgaagaacatagccaaatccagatgataacagcattgttagttcacctggttcagttcagtgcaaatgttcctgatggtttaaagggaacggtgaactggagcactattgttgatgcatcgatagacgctagttatccaatcaaatgctatgaagcagcaacggaggcttgctgccttttttggaccaatgtgcttcaacgtttcactgctgctaaatctcaggatatgtcggaagccaaagggattatagataatcgtgtgcaggacttgctaactatactaaat

SEQ ID NO: 3468 - DNA, 3803 bp, Oryza sativa
atgtttccattcagattgtgtgggtgttgttagtcaggaaaacctacagtgtgattatgcctgtccattatgcttttgcaaacggcagctcagtgtgttacagtcatattatgagttgcaaaataaagagaatggcaaaagaaatgctgcctctcatcggaagaaatccactgtacctgatgaggtgacagctgtggatattgttcaacaaatacttttgacttatatccaggaaggtggtccacaagatgatggaaatttgtttacacgatggtatgttttgttgagtcttgctcttgtcttccaagcgtgaatggagattgactatcattttgtgtgcaggttctatctctgcatgtggtacaaagatgatccacattctcaagagaagatcatctactatcttgccagactgaaaactaaagacattctgcgggattctggcaatggtttggtattatccagagattgggctaagaaaatttgtttggcacttggccagaagaactcattttctagagggttcgataaaatcctttccctccttttggtatgtgattatgtggctgatttcttatatttctgatctcttttgagtttcatgttctggagttgatgctttataccctatctttttcaggctagcttgagagaaaattctcctgtaataagagcaaaggccttgcgtgcagtgagtatatggcttatgaaactatgccgccattcaccattttcatttaaacactagccttcattaccatgttcacaatttgtatgtaggtcagcagtatagtcgaagctgatcctgaggtgttgggtgacaaacgtgtccagtctgctgttgaaggaaggttttgtgactcagctatttctgtccgtgaagctgcgcttgagcttgtgggtagacacattgcttcacatcctgatgtcggcctgaaggtgagtagactgctgaagttaatctgtgccatattcttggatcgaaaaggtattaacgttggcactttgccctatgccgtaacagtatattgagaaagtggctgagcggataaaggacacaggagtaagtgttcgcaaacgtgcgatcaaaatcatccgcgatctgtgtgcttcaaatccaaacacggacactactcgtgcctttgtggagataatttctcgtgttaatgacgaggagtctagtgtacaggtaagttaatataaaaaaacgtttactggtgctcttgaaatcaaattaatgttgttatagcatatttcatattgtaccagaaatgtttggcatctctcattagtttcattccgcaatgttgtatttataggttgtggatctattgtgatgtgtatatggatttcatcattacattttgtacacaaatgtcgataacggtagctattagttactgttacttggcaaattgtctttcatgttaaaaaatcaaaaccataccgcctctttgagttagatagggtaagttgtggatacattaagaattaagactattttctctctttctttgcttttgcaaaatgttgaacctcctaatctaggttccttttattttcgccctttatgcatgtgaagtttgaacattgtgcttgaaggtccactggtggtcccttcattcatctaatattttttttcctgcttgatgtcttaaaagtgaagctaacaggttgaggcttatgatatatagcaattaacaaaatatgccatgtacatctttggaacagcaatattttgtcttttttttaacatccatgataattaattcaggtagatcttcatttccttctctgtaggatcttgtatgcaaaacattttatgagctatggtttgaagaaccaactgggagtcataagcacttggttgctgatggtagttcagttcctatggagattgcagtaaagaccgaacaaattgttgacatgttgagaaagatgcccaatcacctacccctcattaccattgtaaagcgcaacttggctcttgatttccttccacagtcagctaaggccacaggcattaactcatcatttatggcatctctaagaaagcgttgtgagttgatatgtaagcgcttgttggaaagaatactgcaggtaatttctgatggagtttgattaacaagatttcgcattatcgagattggttctcacacatttgttattatcaaggtggaagagggagctgctagtgagactgaagtccatgcacttccttatgttcttgccttgcaagcattttgcattgttgatcccaccctctgcactcctgcaactcaaccttttcagtttgttgaaacacttcaaccataccttaagaagcaggtcagcatgaatttccttctattgaactttatgttgccatgtgctcgtgtctgagtaacccacgtcaatctcatgaacttcctcatattaaaaaatcatttcataagcaaagattgaatgattagctagcattagtatgcatttataaatggtcatatccttgagtctacgacctacaagccaaccttttgcaatacattagcactgtatagatttctaacttagatcatgtaggtattctgttatgtgtagtaacctgtacgcctgtttggtgatgattaaagtttagcactttagctccccgttttgcctgtgctttttatgggcaattcgccaattcctactagttgtgactgcctggagtctagtgtcttgtggcttcacaatgtgagctctatgttgctgctgacagaacctaactctatggtaaagacttccagtgtcatgtttgataggtattgaactgttctaatagaagcagaacttgagttttgattatgcttattagaaagctgatgcaattggttaatgcacccagtgaattttgtacagcatgagttgttaatgtcttttcctgctgtacataagaatcttttttagtattttatttagcttgttagccaattgtactgtggagatatttatgttctgggtgttaatgtaagtacatttatttcatgtgaacaaactacaaattcctttgtttatcattttccctacagctagattttgcactgctcctgatcttgtatattgacaggttgacaataaatcaacagcccagttgcttgaaagtataatttttgtaattgatgctgttcttccactcatatggaagccaccacaatctgtggtaatagagctagagcaggatctgaagcagatgattgttcgacactcctttttgacagttgtgcatgcctgtatcaagtaatcatattccatccttctaccgtcagttttatttgatgatcatttgtccttatgtactacattttcacacactccatgttaggattgtttgctctttattttaaaagaaattttcatacaatatctcttgtatgggttcatctggtgactttctttattgactggaatactcgatgctagaaaactgtacatggcctatatgatttgcatagccatgggatcacatatggggtttttggtaaatatgatgcatatctggtgtgtaagataaatatccctacagctataaatagggcgatgctgcatatgttaatataatctgttaatagtttaatgttcataaaattgaaatgcaattataatttaaaacattttgtttatgaatcatcactatttgcatgtcacaattgcacacccttattttgttcaagcatcggtttattgaacttacagtcttatgtggattatcctaccttttatttattttaatcctttgctttaaacgctcttgttgaattatttcttcttgttcactttgatta

SEQ ID NO: 3469 - DNA, 2072 bp, Oryza sativa
gatttacagagagttacttctcaaccatgcaaaagttacttccaattaacattgaagttacttttattaaatgttaaacttacttgtgttggtgggtactgattaaatttaatttctagataaaatcatatttttatccctacaatgaattacttctaatatcgtgataaaattacttttgtgttgttttaagttacttttataatatatgtaaattacttttagactttattgaatttatttttatatgtctaagaagtaatttagtcaaatctaaaagtaacttatatatatatatgataaaagtaacttacgtatataataaaagtgatttacaaatataaatattttttcatcgtaatataatatgtaagatcttgttgtgaaagatttgtcagggttatggataccacatacctaacagtagttgactaaatctcggcaggacccactacatatcatgtcctatacggaagcaaccttcggatataggaggagttccggataaggaaagacgaccaccacgatcaacacacacaaaggatcaacacccaacacaatcgacatagaagccacaacatagaagcctacatacgccaagacacgccgccggatatcgacttcagggataagcacggctagtaccctacggtgtctcccgatactgtcaggagagaccgaagcgctatctttgatctcgctaggcacggattcaaggaggaagactaccctgttgttgactacgagtcagatcttcagaccgccatgtcgacaacagttagataggctaccccaaatattgtactggtgtgattatggtgaataagagcaatactggcttcggccaacaggatgtaggttaattacctgacaattcaggggcccgaacctgtataaaaatccttgtctccatctcttttacctcagtctcgtgtatatcctagcaccgacgatccccatgccatgcaaataccgtagtcgagacatcgaatgtcgacagatttaattgtaataaacataattgtaatcggattatagatcagataaataatttgagagaaacttttatttgaatgaagaggaaaaaggcatacatgatctattaaaaaaaaggcaggcaggcactacgttgatccttctcattgagccattagagcgcggccacgcggatgtacgtcaggacgacaagcacgatcgaacagctgtgaggcgtgtcgcgtgatacgactaaagcgagaagcctcttggtttagattttacgtaccacctaaggacctaaactaaaccggttttgtaagttaaggatctcatatattgattttctggttgagagacgattttatagtttgatgacaagatgaaggacctcgtacgtacttttccctatcatctaacagagcagcagcatgagatgaacccagtagattaaaagcccgcatgaaattaactatacagcgaccgaaacatttcggccgtgtttagttaaaaaataattcttcaaacttccaacttttccatcacatcaaaactttcctacacacataaattttcaacttttccgtcacattgttctaatttcaaccaaactttccaattttggtgtgaaacacagccttcgctcattggccggagaaataagttcatctgaggtcccttgacttgtcaacgaatccgattttcgtccttcaactgaaaaaccagatacaacaggtccctcggctgtcaaaaccagtgacataggtcccatagcggtttggacggtgtttttatctgacgtggtgcttacgtggcaattcgaccgtgaaaaataacaaaacctctgggacccacatgtcagcttcacacatacaataatttcaaaaaatggtggggcccacctgtcattctcaaatcccctctcttcttcctcctctctccctcccatatcccctcttttaatatctcccctctaatccctcctctcgccggcggagataaggacgtcctccattcccacccccatgggcctaccgatggcggccggcgcccctcttctcattgcccgctgcgcctgcctccgcctccggataacc

SEQ ID NO: 3470 - DNA, 638 bp, Oryza sativa
cctatgcatcagtgttggtgctgtacccaatttttctctgaaaaatggtgtgttatatttcaaggattgtatgtggattggtaccaatacagctggcaccagaaaaatttaacaaaccttcatactgctgcagtggggtgggcattcaggcattcatgttacttatcaaagagttaaacaattgtttgcttggcctcgacttcgctccacagtaactcaatttgtcaactcgtgtgatattggtcagcatgctaagtctgaacatgtcagatatcccggcatgttacagccacttccagttccagaacatgcttggcaaatggtatctcttgacttcattgaagggttacctcgctcagattctttcaactgcatattagtggtgggggacaaattctccaaatatagtcatttggtaccgtgggctcacccctttactgcccttgatgttgcagaggcttatatgcagtacattcataagtacatggtcttcctcagtctctcatttcagacagggatcggatttttactagcacattatggacttccctctttaaattggctggcacccaattaaggatgagttcctcttatcatccgcaaactgacgggcaaactgaacgtgtgaactagtgctt

SEQ ID NO: 3471 - DNA, 2680 bp, Oryza sativa
tgggcgtccaccgggaaagctggcgagcggggctggaggcgtgtgctctgcttgtcagaggtcacttccggctgtagactagccctcattgtaaaaacatgtttcctttcttaagcagctagaggcccatgtggtgacccctgaccagataaaaaggggaccaggcctagaagggggaaaaagaggggaaaaaaagagaaagaggggttctagagcctgaactctctctcgctctccggctctcggtattccttcacgcacagatccaccagaacacaggagtagggtgttacgcttctcagcggctcgaacctgtctacgtcgcccgtgtcttgtgcacttcctctctcgctgacgttcctcagatcgagggcgaagaacctcacttagcgcccccggccgaatcggcaaaggggggcctgcgcggtctcccggtgaggagccccacgctccgtcaaacccgtttttgaatcgggagtaagaataatatttagttccggttgaagtactgtattttcaaatcgggactaaatatgtttttactcaaaccgggactaatgtgattttttagtggcccaacaaagatcatttctccaggagtggccagtttcaactaaaaaaagatttaccccatttacgatgatgatgtgcaaaagtttgattcgatttgtctacttggttttgagattatcacctggtgacaattctgattaacattttctgattggcggagtcaatacaaaagagaatgctttattttattacagccacagtgtatttgtggaggtactaaaacggaattaggatggaattagtgtctttttcaacagtacttcaatgttggtctttcctgtcacattggctccttgctatggtatggtatatattgttaccttatactccatatttgaaggttcatggtgttgctattaacgccctgaactccactggaatattttcaagtgtccaacctatggttcagtaatcctaactacccctatatacaagcatcatttgtttcttcctttaaaactgatggcagatatatagaattgtgttttttttttacctaacaagaccaccaaacgactttgtttgtcatccattttcagggtgtgccctttaaagcggcaatcatgacaatcaagtccttcccctgagcaaataccatgagaactgatcgtcaccgtcgccgttctattgattgacaaagcgttgcctggagatatctactatgctcatcagttttaaagtaacttttgaatttgttattaatttgggttgtatatatcaaggccgatgaaatttttaatttttaacgtgatcatctgcatcgtatgatgcatatagctaaaaccgcttgatgtatgtgcacgattgcaatgttaggtctatgtgtatcatgtttcatggaaggcatttttcagtaatggggatgtcatatttgcaattatcaaataatgtcgtagcattaaaaggatgtccaagtaataaaacaaaagccagttgtacgtgggcgggtagattgctgattgagatcaaactggttgattttatggttaaaattattatacttgctcgataaattcacgtgtcagcagaaatccaatatacatacatgcatgtgccagtgtttgattagttttgtaggcttggttttagggtatattatgtaattattggtcatgttattttaatgtttttgttgcaacaaatttacctcaatgatttttttaacatcatttttctcattgagattttaatttactatttttttcctgcagcaacgcaaggcactcaactagttgttgaaaaaacgtgagaatgttaatgagattgatcctttccgatttactccattcgtctcaaaatataacaatttttagcttttaagatttgtcccaaaatataacttctccaccaactctcttcctaaccaatcacaaccctccaccattcacttttcctacctacctccactacctatttaatcacaaccctccatcacttatttctatctatttttttaataactatgtcaaattctaatacttcttatattctggatcgaatggagtaattagttatatcacatagatgtgttgggtctccatcgacacgacaagctttcccccacactcgcatcacctccaggtcagcacgggttgccggcaccagctgagcagccaaaaacccccgcccgcagtttgctaagacagcagcagtggcttctcgggtagttagcgcgggcggattaaatttgtgataaatgtatagctagtcctactatagctatgggatttagatctagaggtgtaaagttacgacgtgtttgggtgtttggacaataataaaaaaaactaattacagaattcgtcggtaaaccaagagacgaatttattaagtataattaatctgtaattagcaaatgtttactgtaacactatattgtcaaatcatgaagcaatctatctatctatctattatatactaaaagtctattaaacttcctataaacactctcaaaccgccaagtggcaccctataaacgctctcaagttgtcaagtggcactctaataaataaaaagaaatccaaccatctatttttacttgaattggtagacccattattttggatggtttgatctattttgtaaaaaaacatccgaaaccaacata

SEQ ID NO: 3472 - DNA, 4432 bp, Oryza sativa
ggctttgtttggacctactataacaggcatacagctccatcacccggcgacggcggcgttggagctcatgccctgctagtggcgacgcaaaaaggtgcgagcgaaggcagtgaagtttcgagtcgtctgaatttaatgtttgtcttctggtgtatttaatatcgtatcatttatatacttatatcgatgtaccccaatactctcagaatatgatctatgtatatccccgtcgacagattaagctaaatattttattaatacaaatatcatagctacatattttattaagacaattactatataatttaagtagtcaaatttgttccttccatgttgaaaaccaaatacaaatttatagttactgggctaaatagtttattattattattattattattattattattattattattattattattattattattattattatttataatttaagttcccagtttgatcaaactaaaataaatttaaacagaccatgtgatattttggaaaaagaataatagaacgagtagagtcgagggaggataaatagaaaacacctaaaaataaaaaaaaaatagaaaaagcattgaaccattcgtgctaggctgctagcaccactttgtttactttaggagcctgcataaaatattttggacgagctctcgtgatgtgcaatttcattgcggacgttgtatctcagtgcccactttgatgtcattttttttaaaaaaaataatcagtttttgatatttatttttgaaataagttgtataaaatgattagattgtcaaaaattcgagaaggggacaatcgatcaacgcctgaattgtatcggtgtttccttttatcgtcgttttgtttggttgaaactacgagtactatacatgtaccaccggtggctgcgtgtacgtgcagaggtgcagccatatcgtaggaacgagagtttgtgaaacttctttatttaaaccgcatggtgttactataaagatacgtagcacaatttggaaaacgtactttaacttttaaaattaagttttcaaatcccttctttctatataaagttaagacccaaaactgctatctcctgcctccacgtcaccagctaattgaatccgttggatcaattcatatcagctactgccaagcgtaatattaagcaccatgatctctcttcagatgcactttggaggcccatttctcagtttaggcccaattgattgcgagctcagagcgcaagagaaccttcatctctttgttcgaggtgcctgtggctgcagcctagagcgacgacgcattgtcttctctcaaatcaatggcctcgctaattaagtccgttcaaatgcatggcactacactaatctacctcatcactacagttgttttgtgtgctcatacactgattcaataatccgaatagccattttttttctttttttccttaaaatgattcaattgaaagaaacttgcttttatagtttcattcataagttcacagggtctacagtataatgtttgtgatgtgcaataaactgacctaacaaaagaaaaaaagatgtcttcgtgcatgtctgggattgcatgcactttggcctgccaacacaatgcaataattatatatgcattttgtgaacgaatgttctatacatcctccccatctctcacaggtaatttggctatcttgatgacttactctaatggatcaacatgcaaatacaacttcaagttctttgtgtcatatcttattgatatcttattgctttctctttattattattattttttatttttacaaatatacttctttagtttaatcaagagaaaatttggcttcaatcaaatccgctctaattcctgtgccaacgtttagtgtccaaattgcctgcctctttcttcttctcttacgaaaccaaaacaacataaatttgtcttcagatgattcatctatattgtttcccttccttttcctctctcataaagttacatcaccttagttttgcttagttttgcttttagttgatcaatctataatttaaattgtcataaaccgtatcatctaaattgcttatagcttttttcaactatcaatcaaagatgcaaattttataaagtatataaaattatgttgtctagctactccctccggtttaattttaattgatgttttggacaatggcacggactacaaaatatatctttaaccttatttttctatcataatatatatattaaataaatacatgtttacttttgttatagtgctttgaaagacaaatctatatatatattgttctagtttctttaaactaaatatttttaaagttattaatggtcaaagttataaaaatttgtccctaatcttgtccaaaatgtcaattattataaaaccggagagagtacaaaacaaatcctaccattatcatgcaaaataaattctgcagcaacgtgcgggctttcatttaaattataaccgccatttgtaagctggagggcaaatgacggggagtcccctaaaaagatcaacaaccttgctacttgtacagtcaccgtcaggtgggccacgccactcgctcggatccagggccccacctgtcattagcactggccaatatccccaacttttcttcttttttttctttcccctttccctctcagaaaaaagaaagaaaaaggaaaaaagattcatctcttcctcctcgtcttgtccccttccctcgtcgaaaccctagctaggctcgccgccggcgacgcccgcctcgccgatgcgctcccccacctgaccgctccgcctcgctctcccgggtcgtcgttgcctcaccgctgtgcccgcccacccccacctgggcagcgggcgggatccagtcccagatcggcgccatgtccaaggccagggtctacaccgacgtcaacgtgctgcgccccaaggagtactgggactacgaggccctcaccgtccaatgggggtgagtgcctcccactcctacctcgctacctcgctcttgcttccaccctgtgttgtcgcctctgcatctgcgtgggtcagtttagattcagtgtcggatgttgcgtgctgatacgtatgataaagctttttagttacccgtttcatgactttgcaatcgccggtgttatcatcaagttattaggattgtaaatagaattgtttgtgaatcaactgctgctcttgttgttattggagttccattgtttcaggttgcatgttagattagtgatcttgtgcggagagctgtcaaattgtttagtttagatagaactcggtcttatttattgttacagtcgatttcaattaattatttgttatactccaacaatacaagccaaggattatgcaatatacagagctaaattgaagaatacgacttagtgtacactggtaaaccatgtcaatgaaatgaccgtgtagattataataaacttctcctacatcaaataatcataaattggatctatgctaatatgtattctatcactggatcaaggaaaccgcctgattagcttggaatggttttattggtactgtattcttgtattggtgaaagatgatataattaagtgtaacaacctgatatgagctgggctccatggcctttgtctagtatatgactaacagctatcctgattgattgtgatgcaatatgctgtatgtctagagtgcaacagtatattaccctctcaagtgtttgttatggtactagtgtttactgcttgttcttcatcttcctaagaaacgacaggaagatcatgttctgtaaaagcggccaaacaaggtcctgggactacgaggccctcaccatccgatgggggtgagtgtgtcctacgtcgcaattgcttcgcgcccacccacccacccatgtgggcagcaggccctcccgcatttgttgctgcctgtgtatctgcatgcggtgaattcatccattcagttagattcagggttggatgctgcatctggagtgtgtgctgttggaattctagacgtcggtgatccagggaaggtattgttgggtgcgagcttgattgagtcgtgcgattttttttattcgcatatattatattgggaaaatggatatactccctgaaatcattgggacaattgattacttactaataatttctgttcactagtggctacttaaattacccattttttgacttgcgattacggtgtcatctacaagtttgcatcgtaaatacatttctctaaaccacgtacatggaggcaacaataacacataaactgctgtcgttctcattgaattcccattgtttcagattgcatgttagattagcgatgttgcgcagagggcatgttttttagttagtttcaatctgtcgaatgatttagtttagatagaattgggctcatcatttggtgttacaatttaatttactttgtaataggaatccaaggcatgca

SEQ ID NO: 3473 - DNA, 10641 bp, Oryza sativa
caagtccattgaaatgactatatatgttataataaacttattttacttaattaaccatgacaatggacctttgtcaatatgtattttatcactgaatgaaggcaatcatgtgattagcttgaagtgtttttattgctactgtattcttgtatggattaaagatggtatgaattaagtgtaataacctgatagtactttggttctttggcctttgtatagcttgaaaaatagatatcaggattgattgtagtgcattatgcctagaggttatagctcaacagcacattaccctcaagtgcctggtctggcactggtgttttctgcttgttcttcattttctaaagacagaacaggaagatcatgtactctaaaagcaacccaaaataactttggttgtatatgattactttagcatgacgcatgtcttctccccacaaatataccagtgttcatcacttactgttttgaatagtgtacttatatctccagtcaattaggaattcatgctgtgagtgagctcacaaaaaatgtccaactgggcacttatattttcccagcctatcctgttaacagtatctgaatttatgatctctttgagcagtgagcaggatgattatgaagttgtcaggaaagttgggagaggaaaatacagcgaggtctttgagggtattaatgtcaacaacaatgaaaaatgcattatcaaaattctcaagcctgtgaagaaaaagaaggtagttcatgattcatgaatcctgttgtccatcctttttttccttttcccctgaacatgctcttttactggtaacatggtactgtttccatcttacacctagctttgtgtcaatggcattagtgtttattattttaaccatagttttcttttgtatgcagatcaaaagagagataaaaatacttcagaatctttgtggaggtccaaatatcgtgaaactgcttgatattgttagagatcagcactcaaaaacaccaagcttgatatttgaatatgtcaacaacacagatttcaaagtgctatacccaaccctgacagattatgacatccgttattatatctacgagctactgaaggttttattctttctcaattttttgttactgtaacattgccaacaagaaactacttattcagcacttttccagagtatcgttcttgttgaaatgaaatctttgaaatttgcaactatatgcataatatctaacttctagttccaacttatgcttaatactatttttcttccctgagggcttctctgtgtgcatgaaggctttttctatgctagtaacgagatgaagaaatctttgcccatgataaaagcaatgatatcatgttctttttcttctataggagaatccaagtcatacatcgtttggtttgagcaatttttggctgatccaattatgatataacacccttttctgttgatgggtgcaggctttagattactgccattcacaaggcatcatgcaccgcgatgtgaagcctcacaatgttatgatagatcacgagcttcgaaaactccgattaatagactggggccttgctgaattctaccaccctggcaaggaatataatgtccgtgttgcttcaaggtaggggcacatactgctctgttaatgggtttatcatttgattttcttatagagtaattaacaacatgtattaatcttagtatgtttggtgaactatttaagttagaataaactggcgtgcagtttatttgatgattgttttgatgatttactgaggcaataggcaaatctaattcttgcggatattggattgtttgcgttaatgatgtttaaagtactatgaagaacagaaaaatgccagcagcatgagcatataatcacgtttaaagaatgttttctgtagctactatgtttgctgtgcctgtactactctcattccatattttccctgttgcatccctttctttttttttttttggttgacatgttctgtttcactggaattcaggtacttcaagggacctgagcttcttgttgacttgcaagattatgactactctttggacatgtggagtcttggttgcatgtttgctggaatggtattaccatgacatttatacattactttttctcatttcatcaattttgtaatgcaactgcctttttctataaaagaattaactggtgctgattcgctaataatgtgttgttgagtgcagatcttccgcaaggagccatttttctatggtcatgacaaccatgatcaacttgttaagatcgcaaaggtgatttctcagcttgtttatgttaaaagatgatgttcatacaagaatgaaatgcatttcatgtttagcttatcattcatactgtacactatggtttatcttatttcatttgcagctcaagttatccatgtttgatgttaggaattgtttcatttgttgttatgatgcgattagttctgatagtaatcaggagcaacagttgtaacgctctcctgcgtgttcgagaaaaaaaagtaacagttacaactatttttctccgctgaactttattctggtcaaacttagtcactaacattttattcaaacttgcacgttaactatggacacccttcctttctgttgagtactgcttcagtaaaagtcttattgaacttgagctagatatgtgataaatcatctttagttatttgtgttgtttccctgactccctgcattcacaggtacttgggacagacagcctgaattcatacttgaacaagtaccgtattgagcttgacccacagcttgaagccctcgttggaaggtatatgaattacaattatatgtgatgcaatgcaagacctctagttttaatatgaattaaaattttgacatttttttttcatatgcaggcacagcaggaaaccttggtcaaagtttattaatgctgacaaccaacatctagtatccccagaggtatttccagtgccccttcttcagaggttatcacaaatgtacctactgtcattaaagtattaatggttttcaacatgatttcttttctatgttaggccatcgatttccttgacaagcttcttcgctatgatcaccaggatagacttactgcacgtgaagctatggtaagtaacttgttctgcacttcctttgatttccttttttctatgcaaaatatgcgttttactagtgtacaacatcatgatattttttttgcgattgttcctgggcattattggtctctgacctttgatttggtgtaccattgccatgcacttatataacattggatgattgcaggcacacccatactttctccaagtgagggctgcggagaacagtaggcctcgtgcacaatagacaaaagaacgggactattgctgactgtcgattagcagcagtcatggagctgcaccgtattagtgacttagtccagtcacttgtattgggagtttgagattcggtaatggttgaatcacctggcaagaggattctgggagagcatgtaacagctcatgtgtgcttaaccgcaaacgtggattgtgatttactcgtgctgtttgtatctttgtttctgacgattgattgaaacacattgttctcgttgagtataaatgtttttttttaatttgcgagttggtccgttttaagactgattgtaatgatcaattagctgtaccttaatggttttatgcaccttgacttcggacatcatcgctgaaccatttcaattccctatattaaagttgtcagctatccatgctaactgaaacgctatttatgcgaactgaattcctctttagaatgggcgttctgaattctgatgaacaaattcgattctttttcctctaaactgacccaagttaggtttacagtttctagcgaagtattccagaactaacctattccagaagttcaaacatgattagcctagtaaatctgaagaaaattacgcttgctctcacctataaatcagaggttacaggtcgatcctggcttataaatgataaatggggtctatactgtaaaagttgtgggccaatcctgtatttcagatgcatacaaatgtacttgagcccccaatactctttatgttagatgcatacaaatatacagtagtaggagctcatagaagatcaagcacagaactatatctactactacgtataaacaaggtgctccatggaaaaaaaaacacgatggcataactgttaaagaaactctgggttgaagcaatgacttgtaccacaggagacaccggaaattagtgaagagtgatgttgcaacataacatattgactgaacacaggcagcaaatccacacaagattaatatcgttgcacaagaggttgatagagcattacatatttagatgaggcacacaaccaaagaagcagcagcagctgaccaaagtttagacccatacatagggcaaccagtcattgcatacaagatgatactagtggattatggcagcttctctttttctcttctgattgagcagagagatgccaccgccattatttcttgaggtgagggaagcacgcggtgaggtcgctcttcggatgcttcgcctcagcatgctctttgcacttggtctcagaggtggtgcagatgaaagtctgcatgcatatcttgcactgcattgagatggaaccgttgttgagtacaccagattaagaaaaaagattaccacaaaatcgtacatcgtgatggctacaatggaaaaattcaccaagagaatgcactagatatcaatacgactacagattcgagaaacaacaacgctaggagcacaaattcatgctttacatatcttaaccagtgaagccatcggcaaacttcggcttaatacataactagtggactgatgaaagatacttaacaatcagttcattaatttgttgaggacataacttccatcacatatattctaacgattacacaacaggataatacctcacaaggattgtcgatgctattgctacccgaaggttcagataaatcatcacactgacatatacagaactataagagtacatggatctcaactaacaaaacctggaattagatccaggcaagcataaagctaacctggaatcattaacagcagcctatcttgtgaaaaataaacgattgttttacatcagcagttcttttttcctttataaaagctcaaaattaacagaactttgagaacataggctgtcgatatatgtctgaacagagccgaaggaattgaacccgattgatttcctgcgtgtctacacgcgcgtaatcaaaaaatcctccctaaatcccaccataaatcgtggtcccaaaacacaagcaattgggggaaagaagaagatgaggaataatagaatagggttaggtggagggagcgaatcgggaggggggaggagatggatcgggtgctcacctggatgttcatggccttcttgttggcctcaagctggctccctgcgaaaaatcaacagcacacacaacacacgaggatgatgagatcaagaagcaagaaacacatgaacaaggaccaaatcaagaccaaatcgaggcacgagacgattgggaggagaagggggtaggttagtatacccttggcgcccttgttcttctccatgttcctctccctcgccatcttcgacttctgcccattgccgccgcccatctcgtcgacctcgaccttcctctcccccttcgccgcaacaagagaagagaagagaagaaaagaaaacgagttttttttttcttttttggaagtgatgaagggaagcgaaggcaaaggcacggaatcatcgggttttaataggaggaggtcggcgagcgtgtggggcccacacgggctgatctgggccgtccgttttgggcgtcccgtgggcctcacgggagagccggtccgatccagccaaccgtctactgtaacgaggagtaatgggcgtgcctaacctactactctttgctttgttgactgccaaattggtcaaaaaaaaaccaagtaatgataccaaaaataaaaatacaatatacccaatcccatgattattaccaggtaaaaactaccatcatatttaacaaaagataataatgcttatgtgtggactagtattttttatgagcttaatagagagccagaatagcaaacccctcgactacaggagtaatgggcatggctaagctaacgttttgtttgttgttgatggatttgccatattggtcataaaccagcaaacccaataataataataaaataatgccgccacaatgatgtatctttcggtgctgtaaaaaaaagtgaactttcgatgctatataaccaattttacctgataattattagtcctaccaaagtaaaaaaaaaatcatcctacaatgtcgtgtaaaacttaagccatgtttaattcccaaaacaaaaattttcacgctgtcacatcgaatatttggacacatgcatagagtactaaatgtaggggaaaaaccaattacacggattgcgtgtaaattgcaagatggatctgttaaacctaattacgctatgatttgacaatatggtgctatagtaaaaatttgctaatggtggattaattaggcttaataaattcgtctcgcagttttctggcggaatctgtaatttattttgttattagactacgtttaatactttaaacgtatccatatatccgatgtgacaactaaacctaaaaattttccccaactaaataaggccttattaagctgaaatctactgttaaaagtaattatatggtccgacaccgcatatgatggttatatatagggttttataggtatgactcctttaacatttatggcacctataatcttatcatcgggcatagtataaaaatgaagttgactaggctatgttcttttccacagctccaaattacaacttgctcatttttcgttagcatgcttttcaaacagttcaattgtatgattcgtgcaaaaaaaaaagaaactatgaagaaatttcttaaaaactcaaataaatatatttttttaatttttatagctatcccgttctacgttgccgctaatttgctcatttatattgttcaaatggtcactaccaccagcttccactccctaagtataatacagaggatatatttaacctaggattaacagtgtaaagtagcactacccttccctctttattttctcactgggacgtgggacccacatcaggtaaaccgttggaacaatccacgttctgttaccgtggcagtgaaccagggagagtggccagcagcggagaaaaatgtcaacgccaagattgtgatcgagtcgagtgccccccatctttgactagcctctagcttagctggaggagcgaagagtaattaagggtatatttagattgtagctaaaataaatcttatcaaattttgataatttgacaatattacaaaaatttagcaggatttcttatgtgttttactagagtttggtaaaaaactaaatggatacatatatttgacaactttatctaaaaaaaatttggtacggtttaatatgacatcaatctaaacaacccctaaattaacaggtgtcttgggattgctaactaaattttagccttagctatagctacagaagaattgaggcgtctttattttctttgccgaaagaaaaaaaagattctagttgtagtacaaaaataattcatttcttttcaactgaacaagaatatggtgcttgggaccaatgaaatgaaatagctaaacttagagcacctgcaatggtaaagtaaggtgctctctataaaacatgtacatctcagcaatagattagattaatagtaaaccacctcaatagtatgtctatatgggtatctatagctctctaatgcattgcctcgtttttctctatagactatctccatgttagtagatagctttgctctctctcttcatttaatctcttctaagtaggaaaatatgctgacatggatatcttgtagagagcctatagataaccattacgggtgcccttagccattgtgagaaatgaaatagtttaaggaccaatgctcatcgtcccacctataataattagttgagtaatatatattgtttatgcccttaagattatacatgtatttttttattgacaatataataatctagtattatatgagtcacatttaatagttaacgtactttttggacaaaaaataatcttatgtagtagtaggacggttcgttggcagacgaggtgaggtgagatgagaggcggctttgacacaagtggagtgaagagaggcaatctcagcttgtggctggagattgacgacgatgcgctggcatggcccacgcagccaccgggtgggccccaccacccatatgtgatcatcattatctaaagagtattttattttattaatttataattgtttttttttactttttacggaacacactactacgtttaaataagaagtaattattaagaatttgggcattagagggagtgtagcaccgtacttcctccgattcttataattattatgttttgactaatgctatggtcaaattttttaatttagaactctgtatcaataattctaaaaatattaagtttaaatgtgctaataaataaataaatatcattatagaaaatatagttaaagatatattttaaaatatagtatatcgtcatttaaaacatcacgaaaattcatggaatcatttaaatgtcatggaatcatttaaaggcagatcgagcgcgtgcaccgacgcggaacggcgttgacgttgacagaatcatcagcgcacttattactaccagatggaccccaccaatggtaaattaggctgagagaagaagcttctggatcttgtccgaacctagctgtacacacctgtactccatcaaccaggagaaactatacctcgtcaaacctaggtgtgggcattcggttttttctgttaaatcggttcggttttatcggttttctaaaatgtcggttttcgtataatggcaaacagaaagcatacagaaaagttaaaaaccgaggaaaaaagagaaatatgttttacattttttgatggattcagtaaatttggtcagaattttaaaattttgactagacgttgtcctaaacaccaccgatttataaccggatggagcaggatttccagaaaagcgtggttattaagatatttcagtgtttgaatgaaaataaagaaaacaagttaaagtagaaaaacaaatgagaaaatatcctaataaagaagggatgattttcgtcaaaaagaaaagtatttccacatatgccgctaacttactgctcctaaatggggaagtagtgtattttccaggatcaaattgtttcaacaggccccctattcagtataggtctctctccctgatagctgggcctaggcccatgatggagaaaactgaatctgtcgtgggccacgaattttgtctggggtgggccttcaggcccattagaaggtgtagcactgttgctagggcttgtttgaggaagcttctagcaactgcagtttctcctagaatctccagctgccagaagctcctccaaactgtccagctttttactagattctgagaatctatagttgtagaatctagaaaataagctagaagttagaagctgggaaacctagcttctccagtttctcactatctagcttctcagaatcttggcttactcggttcttggcaatcctcacaagtcacaacaaacactgagctcaaaactgtcacgccatttgattgctattatgctatatagcatacatgtttgacagcatatataacaaatgatccatcatcatattgcgagctccaagtgaaacaaattttcagcagccaaaataggaatttgcatagccgttgggctcgtgatcagaagtcagctaatttaaacaacagtaacctcttccaaacaataaacctcatgattgattattgatgccgttttactcgatgaagttgtattgctcaatgcttggaacagtttaataaataaatttacgtacgtattgcgacgtacccgtcaacagcgagacgcctgtgatgacttcgtcaatctctctagaatttgccggcccagtcttcgaaaatgctcatagggatagggtttacgtacgtgtgttcataagggtgagtgcgtatacgttgtgagtatctgcattgtactgtgtaattctaaaaaaaaatttacgtacgtattaatatattactcttgcatctgcactcaccaatccaagatatggctacatgcaacatttttttttactttgacaggactttgtcgaatagtttttatgaatacagtaggctttgtcaaatatgatgccaccttcggctagcatagcatctcagagaatgagaaacgcaccatggtagtagccatgaacgaacgaaaacaagagcaataattaatcatcaattatgaaaaaaaaaagaatactccctatatcttggtcgtcaaattaacatttgcgaaaggaggcagtagtagctatttcttcctagctagttgtatatatgtgcttgcttgctttcttgcagctccacttttgttcttcagcttattagtccaagctaaaatttactcttaaaacttaattttagagatgattttatagtttcttcatca

SEQ ID NO: 3474 - DNA, 1398 bp, Oryza sativa
aacacactttttgataaaatttgctactctaaactcccaaatgacaaatgccaaattgctaacttttgctactagtgtttagatccattttagcaaaaagtgttttcaaacagtaaacttttgctatttttaaggaactaaccagggccttattagagggcgtatatttttttttaatgataagaccaaggggtgggtgtaggtggtggtggtggtttctttgactgcatgtgcatgctcaagtattactgtaattgggtggatctgtataccaaagcgttacacgcatgtatgaagacctaacatagaagggcacatttggaagaatcactgcagggaaacccatctttaatgtcggttgggaaccctctgttgtcccggttatgtaaccgggacggtgaatccgggactaaagatagtcccggttaaaataaccgggacaaaagaaacatcctctagaacggataccctcatctcaatcgggcatggcgtctgtcacaggctagaagtcactgatgtgaagagctatttcaatcggtcaaacggccgtcacggatgattctatctcaatcgggccctaagtaaagcccgtcaccaatagttttgacccagacgaccagtcaaactatagcccgtcaaagatgacctatctcaatcgggccacaactagcacccgtcacagatgacccttatctgtgacgggcattaactatagcccgtcacagatgagggcattaattatagcccgtcacagatgagtataatccaaaaataaataaattttattttttggctagccctcactcgtgtgcacccacgcgggaagttcaaacttctcggtcggtcacccatcccgaaatttactcatccaaaaataaataaattttatttttggttagccctcactcgtgtgcacccacgcagaaagttcaaacttcctggtcggtcacctatcccaaaattgctccagaccaagcacacttaacgtcaaagttctttggagattggcttccggaaaagtagttgtaacatgttggtatgagtattctattaatcatattatgcactaggccaggatgtcaaattaggtttattaaatgatttcaaatggaaaagtcaccaaaaccaaagttgtagaactcatcgaggtgcaaaatttttattttggtcatttctccatctgactctatttaaacaattcgaaatttgaaattcaaagtttgaaaagttcaaatagaattttagatcagtgaacgacttcaactgaaaaagtcatcaacaacaaagttgtataactcatcaaaatctataacttttattttggtcatttttctatataatattttttgaaccgtttgaatttgaatttgaaaatatgacaacttcaaacatcatttt

SEQ ID NO: 3475 - DNA, 3725 bp, Oryza sativa
aaattattcatgttttcattccccatcattttaaagttgtaaacaaatattaaatttgttttacttaatttaatttaaattaactaagttttctaatctttttcatataattttctatctttttctttctcatctcttttatcacaagttttttttccaaattctaaataatcaaatttgattataaaataataccacaaattattcatgttttcattccccgtcattttaaagttgtaaacaaatatttaatttgttttacttaatttaatttaaattaactaagttttctaatctttttcatataattttctatctttttctttctcatctcttttatcacaagttttttttcccaaatgctacctaaacaaaatttctatattatttcatccctacacaaactttctctctcatcatctcccattcccaaatttccagaggcagaaaagtagaggaggatggagttgctaacctttagactccttcaaattgtatattttcaccaaaacaaaatcaccaaaaattttggcagcacctccccttaaactcaacaaatttatgaagccttctcgggctagctggaggaagaagaagactttatatggatggacttttagtcccagtttgtgttgcctgacacaccctaacaaccagcgaaccgggactaaagacgggactaaatctttagtaccaaccgggactaaagatcaaatcttcccgttgaacttataaactgggactaaaaattgtttttagtcccggttttttgatgaaccgggacaattgtggtttttcccctacccgataaagatcacttctccagcagtgatttatgcctaacacagaacggcagaaaaaatttacgccctctaatatgggagggggggagtagtatagtaggctagtagctgtaattaagctccaacagtgtgtgcaagtgcaagccttgtcaaagtcatagccattagctagctttcactagtcaagatgtatattcatatataacacgtgaatcccatacgtacacaactagtgcataggctcctgcttcatatatgtacgtgtatattggttcatcagaacatatatttatctttggcaggacgatggccctatgtgataaagcacatagcaagctgataacagcccatcccctacttgcctccgttttcgcaattgtttttgttcctttaagagatttacacgtgttgggctgttttgcagaaagctcctcatttttgtacgatatatcgcataggtctttaaaccgactaacatcccggttgtttttttttatctggaaaagctctcgtgttttagagaaatacaatgcgaagtagtgacaatctcggttttagggaatagcgctgtaaacatgggaaatagagaagtgttcttcaaaaatacgtgcctttgtcactaacagatagatctacctgtcggtgacaaagatatggtgtctttgaagacagaggatctaaatcccttccatccacgggccgctgctccctgttcccctcttccatcccattcatttcaggactccatcacgtaccaacatgcaatgtatgtgtgtcacaaagacttgcagacttcattactccctccatcccttaatataagagattttgacttattacttgcactatttgaccattcgttttattaaaaaaaattgtgtaaatataaaaaatgaaaagttatgcttaaagtacattggataataaagtaagtcacaaataaaataaataataatttcaaaaaaattttaataagatgaatggataaattacagtgtaagaaaaagtcaaaatccattatatgatgagacggagggagtagatagttttgcaccggcggtccccggacaaaaaaaaatcgctaccgatccctctagcatatagaatttcagagaaataaaaaaggaaaaaagaaatcgatgcgacgcaccggagccatagcatagggtttaggaaatccggctgactcgcaccgcagcgcgcgcgttagacttgcgaagccgatttgattcggcaattccatctcgctgttgccgatttgatttcacgcagatcgcggacgcaggccagcaagcggcaggcagcgagcagcgtctccgcgagatagtgatggcggcggcgacccctggacggctcatgtctggacgactcctctcgccatcgtcgtcaggaaaggcgatgcatgtgggtgtagcagcaggcggcgtgtaggcgtggccggcgtcggggtgcatgtgcagtactggcaacaacagcatccaagctgcgcgcaacgaatcaaggcaagagcaggtgaattaatgttgattatatatttttcagtttcgatccctcacatcttactgtactgttgactgttgtattaatatagatggttgaaatatgaagatagataatgattaatggacacattttattggcattagaaagcctagacccaacaagaaatactatagcaatctagccatatatgtgtcttttaagataaattattacttcgttgataattttaaaatggttataagatgacttattaatatatcgttgcacttttggccaattgtattatctatattagtattgtacatattcgcattattgtttttcggtgctcaaacatattttttagtcggaccacccatacactaatgctagatacaccactgtagttttgtgttattgtgcacgtgttcgaagaaattaaagttcggttgtcggtttcatggaaaccgtagagctgaaatcttcagtccaaagaattaatagtgtttttttaataaatgtccaattaagcgttgtcaaagtcgtcgccatatatagcatggcactactcaagaaccaagtcaacatctcactcgtgagtcccacacaactagtcaaaacacggatatgtttaatcagttatgcttaattaacacatggattaattaaatatatattatacataaaaatgttagtactaatatcttaatgttattagcaatattgacggagaaagttttttataattaatgtgaataattataaatctacttttgaagcatgatataaatagttaatgtgaataattcactccactattaactagtagaaagaaggcggctttagcccctattttttcttccatatgcatgctgataatacacgtatgacatattagaaaagaaaggtgaaatgtttatatatatgttctttagtaattcaaaaaccaataataaaacaataaactatgttgaatttttttttaaaaataaagttctaaaatttaaattctggcagcgataattctatatatatggggcaatcagtgggagccttagtccaactaatttgacaactagatggtagctcgtgtcatttttcttcacgaaaaatgtatataaaccaccacaaaaagcataagtcgtagagatctccaatgcaaagtattgtcaaagtcgtcgccattatatatattagctcaagatattgcatgccctatagtcaagacctgtcatggacaccaaacaagtagttaatattgagttaattagtcaagagccgccgtcagctccagagcttaatttttgacataattccatccagtaatcacgatagcaccgtggccaacatgaacaatctttctcttcgctccagactaacaagcaggcactagtaaaagtcaccgccatctagcagtgatccagaaaatcgatttgttgg

SEQ ID NO: 3476 - DNA, 994 bp, Oryza sativa
gtgcagggtgcagcattcatgcacagatattccctccacttctccaggtgttcaagcctttgctgacagaaggaaaggtttattatttggattcatatcgtgtgaaaacatccaacaaaagctataggccagtggccaatccactaatgatgactttcactaagtggacatctgttgagcaatgccttgatgtgcctttcaatttccctactgttgtatacactctgactcctttgaacgaggtgtcaaactttgtggacaagaatgagtcctttgttggtaagacctcctggggttatttgttttattagctatttagactaatcaacttagattgtgttaatatgttatatccttgtgtagatgtcatcgggttcattactgaaatatctacacctacgatgctacgtcctaagtcaagggatgctagcagcttgaaaaggataattcagatatgtgatgcaaagtaatgtttcctatatagctcaattcttagttcatgtttacttaattttgttaactactaatgtctaacgaaaaaagttatcaaacaaggctaacatccactctaataaagtttacctatcttcttaacatatctgccacattatctccttctatcttttacacaaatagcaattctaccttgaatgtatctctgtgggctgaacaagcactggcatttgatgctgagagtatacacaaagctggacaaagtgagcctcaaattgttctgtttgttgggacccttgcaaagaactatcctggcataggtaaaaaatataactacagatgtatctttgcttatgtagagcactgcaactaactattttaacaatacagggttagctctgtcgagaggctctgcatgcaagtggtacattaacataaatgtacctgagatggttgatctaaagaataggttggtactagatactaaatgtactataaccatctatatggtcaaatttatttaaatgttctctgatacatg

SEQ ID NO: 3477 - DNA, 3937 bp, Oryza sativa
  unsure (1)..(3937): unsure at all n locations
gccggagaggagaggagagtcagtgagggagagggatctaagggagagagagagaggtgagggagaggataagtgagggagagaatgtgacttagaaaaaaatctgctcagaatgggtctatttatattgctcctcattttttcgcaggcaccgcttaagtagtctgcctgcgaaacagcaaacatcaccccaatttatatttttgtaggcggtcatttggctccaaaagtcatgtccgactgcgaaaataagaccccaatgttgaggaaaatgctttttctagtagtgtggagcaggacggtcagaaatttagaatatttgtatcgtgtatataaatttgtaatcttattttcaaaagattttctaaataatttatacaagaaaaaacagggagatatatgttctcgaaggtgtaaattgttttatttctccccgttgtgatttgtgaatattgttaggggttattatgaatttggatcgaggtactgacgaagaggatgaacagctgggcacattagaatttggatcccttgcttagaagggattccaaactacacggtcacggtctaatagtctacttcatccgttttacgttttacaatgtaagactttttagcgttcctcacatttatataaatgttaatgaatctaggcatatctatgtgtctagattcattaacatctatataaatatgggaaatgctagaaagtcttataatattaaacagagggagtagatcatactgctaagcgatacagtaaacccagtcaatgttactacaggattttcggcacagtaccgtgcggtggttactgtagcatacggaggtcactgttatcacaggggaactctatgttgtactgcagatgatccggatccggttattacacacatatataatatatatctcatcatctaggaaacccactcgcaagagcattggtggagatttgaataaaaataattacacatctattaaagtataaaattaatccttcttaatcttttctaatccctatctaatgaggattaatcgaacaagcctttaccttgtgataagttatgttgtctacttcgtggagaaaccttgcttagttatgagatggtattgctccaaatcttgatcagtctgaaacgaactaacccagcctgcacaaaaaaggtccataataaatcaagacttgcatcaagagtcgccgtcatatccggagctttaatttggacataagatcacaaatccagtgaaccaaaaaacatcaattttctttgcttcgaactggatttacaaacgacgaattgtaccagcaacaactaacagtagtcactacctaacctcgaacaactaacagtagtcagaaactcgaacacacttttcgtcgaaaagtgattaaacactcgaaagtacgttgtgttgcttgagatttatatggtgtgtgcgtatatatgttgtgaaatccagcttaagcggtagtttgctatgagcacgttttccaaattgccgaacggtatctttggtgtataaaagaaaaatcaatgttgaaggttttttttaaaaaaaactaaataaatctaatttccatgtgtttcaatagttaatggacacgggagaatctttattttttttattacaattagatcatgttagcatatgtaaataaagcaaatttgtaggcagaaattaccggagtaatttttttctagattcacaaataaaatactaattgatttgtaggtagagaacatccgataatttttattctggattcatcccctaaggactcgtcttgttcccgtgttagaataagtcaagctcatacaacactgtcgaatgaatacttagtcaaaccgatttaacagccagctggaaataaacgaatctagccgaatgagtgtctgtttatagtctaattttgttccattttttcccttatgtaaatcaaacttgatatttcaaatttgtgtaaaaaaatataatattccataatctcgtattactccataattttgtcataacttataaacaataaactggtactctcgattgaggggacaggcgcatatgctctcgattgagggggttaaaattaatttatttctcactttgtttagatgtcatggtttgacaagtcctgtctgcttcatggaaacaatcatgcttatgagttgctattgattaattgctccaaatattcagtctaaaatggactagcccaccttaagaaaaacattaatcgatcgggacttgtagcaaaagtcttgatttttcttcgttaatcgcagtccagagctttttgacgtaattgcatcaagtaatcacgatcaccaccgaacccgtgaatccaaaacaagtatagccaacacgaacaattaatcttgggtatttttcttcgcttcagaccagaccaacaagcgacgacttctcaccctactagtagtagtcactactacatatagctggagcagaatggtcagagagatttggacatttttccgtgtgaaaaaaataaccaaattactacctacattttttataaagaaaaaaaaactatgttgttgatttctagacatgattttcaacatcaaacttactgaaaaactatacaagtatcatttactttgttatgacttattttagtattaaagttttattttcaaaacatgacttataattttgttatatttgcgctaaatatttattaataaaaactgtcttcaaacgttatatttaaaaaatctacagcatgatatattataaaatagatgaaaaaggcaaacagccgagagctagctatgcagcaaaatatatatagatccggccaaaaagaaaaaaaaaacgataccattaagataagaccgaggaacaccgtgttggaattattggcaacaagtccacaaagtcaaaagtcaaagctcatcctccccatgctgttgcagtctttgccacatatatgaagccaagcaggtcagtcacgggcttcacgtcgcctcgccggagaagaagacatcgccaacatataccccccctccctacctagactcagatcagatcacctgcccatcgacgagcacaagagcgatccattcctggtttgaatcgagcttggtttgtttggttggttggtttcttggagtggatgatggcgaggtggtgcgtggggtggccggcggcggcgaggggtggtcgggatgagctgacgtggcaggcggagctgacggcgcacgcggcgggggagttctccatggcggcggcgcaggccaacgcggtgatggaggaccaggcgcaggtcatggcgtcgcccggcgccacgctcgtcggcgtctatgatggccatggcggccccgacgcctcccgcttcctccgctcccgcctattccctctcatccatggtgcgtgcgctcgccggcgcgcggcggagctcgatcttgtggtttgatttgaatacgttggcaacaatccttagctgatttgttggcgccaaaaattgatgagcagagttctcgccggagcgcggcggcgcggtgnacgccgacgtgatccggaaggcgttcctggcggccgacgaggagtacctccagctgctgcggtggtcgctgccgaacatgtcccgcgcggccgcctcgggctcctgctgcctcctgggcgccatctccggcgacacgctctacgtcgccaacgccggcgactcccgcgctgtcctcggccgccgcgcggcggccggccagaccgtcgccgagcggctctccaccgagcacaacgtggcctcggaggaggtccggagggagctcgccgcgctccaccccgacgacggcgaggtcgtggtccacgccgcggcgcgtggagggtgaaggggatcatccaggtggcgcgcgccatcggcgacgtgtacctcaagacgccggagttcaagcgcgacccggcggtgcagcggctatgc

SEQ ID NO: 3478 - DNA, 1843 bp, Oryza sativa
ttttgttctggggacatcttttttctgttctgcggtctgttccttgtgttgattgccatccattcaagcgggtaaatcagatttgatggtttggtggataaaaggtagtatgtgattgttcagcacggtttagcagcgggctagctgctgctaagatttaacatcgatatggaagtttgagaatcggtggactctaatacttgtgcgtgcttccgttgctgccaagccatattgcttattgtctgaatgctcgctcttaaccatttcatgtgctcatatgagcaatctgatttttgtatcaaatatgttatccctccttttttttttacaatagcagatagtgtttatgtgtgttaattgtgaggtcaatttttttttacaatagcagatagtgtttacgtgtgttaattgtgagatcaacttgtgcattacatgtatgtacatgtcactggttcgaacatgttagactttccttgttaatggtgatttttctaagccagttaagtagatggtagcagataaaagttctgtatgtcgactgtagaattaaaatgttcagggcgtgatctgtagaaagatgtagtaggggtggctggcaggttgcagattcaccagcactgttccttttttcccccaaggagtatatagagaggaacaattagcttgctggagaattttcctatgatacgtgtaacatgttttatgtgatctgtcagaaggctgttactggtgcttaggtctatatgtgatttattttttattttgtttgtggtgtcttgttacattgtgtaactggctccttgaagtgttttacggcctttatccgctgcatgtgctaataaacacttttaagttgcacaaataaactgtgggttccattttgtcttatatttttagatttactggatattgcttgggaatgtaagttgcagagtgttgtagtaaatgatattatggtttgttgttctgtgcaatttactctactgttttcaatggaagggttcatatacatgttcccaattatcttatttctgaaattctccgtattgaatcctgttatcctgtattgatttcatatgcactgttgtttgtatgacagaaatagtcatctcagctagtgaaaatggtgcaatacaatttcaagcgtatcactgttgttcctcctgggaaggacttcattgacatcatcttgtcccgcacccagaggcaaacaccaactgttgtccacaagggatatgctatctcccgcattcgtcagttttatatgcgaaaggttaagtatacccagtcaaacttctatgagaagctgtccactgtcatcgatgacttcccaaggttggatggcatccatcctttctatggtgatcttcttcatgttctgtacaacaaagatcactacaaacttgccttgggccaaatcaacacagccagaaatatcattgcaaagatagctaaggactatttgaggctgctcaaatatggagactcgctgtaccggtgcaagtgtctcaaggtggctgcattaggtcgtatgtgtactgtcattaagcggatcagtcctagtttggcatacctggagcagatcaggcagcacatggcgaggcttccatctatagacccaaacacccgtactttattgatttgtggctatccaaatgttgggaagagctctttcatgaacaagatcacaagagcagatgtggatgtccaaccctatgctttcacaacaaagtccctgtttgttggtcatgctgattacaagtatttgcggtaccaagtgattgacactccagggatccttgatcggccttttgaggacaggaacatcatagaaatgtgcagt

SEQ ID NO: 3479 - DNA, 688 bp, Oryza sativa
tatctctataatttatattcgaactaaacattgcaccggtggcaagttcgccctgcgtgtatgtacctacaacggagcggccagtataggttcaccagagagcagccgccggccaatctcataggacacgtatgcgtcgatgcaggcgtagttgacctgctcccacgtcagcgtcggcttttttatctgctcttcgtaatgtttttctccttctccatgtgggcgcccatcaccgtgagcgccagtctcttcagccccgccctcgcaagctccggctgaccgagcacggccgccgcagcatatctcagatccaccgcacaggcgaccctcaggttgcaatcattggccagacgttgcatgtcgttgttgactgcaacgccgacgaagcgaacgctcgggtcggcgaggaactccgcgagctcatgtgggaccatgttgccggcttggtagatctggaacaagaggcatcggcggccgacacagagctggagcaccgcgaccttgtaacatgttttgccgttgggcagatggtcagtgcgccactccgtgtcgatgccgacgatgagccccccctggggacgttcgcgggctatctcgttgataaattgggcagcgagggagtgcgacgacgtgatggtggtgtggatcggtatggtgtcgccatccatgaagacgtcgagcggttctc

SEQ ID NO: 3480 - DNA, 4746 bp, Oryza sativa
tgatggccatgaactaactgaagagcagcgtgaaatcttgggtcagattagaaagaagaaggcattgctcatccaggagcatagaatgaagaagagaactgcagaaagtcgtcctattgttcctagaaagtttgacaaagacaggacattcacaactgatagaatgggtcgccaactttcatccatgggttttgatcctagtgcagctatggaccgagcccgcagccggtctagaggtcgcaagcgtgagaggtcactgagcagagctgccagtgatggtgatgatatggatatagatggccagcagtccagcaagaaattgcgcgcgttgtcgaggtccaggtctaggtcgaaatcaagaccacctgaggaggttgttccaggagaaggattcaaggactctgctcagaagaagaaggcaattaagaaagctaaggattctgtgaggaacaggaacaaggaggctcgtcgcggagaggcggaccgtgtcattccaactttgaaaccaaagcatctgttctctggaaaaagttctataggcaagacgagcaggcgataagtgattcagcacagctgctggtcatcactggtttcaggtaggtggatgtggagcactacttataaacacataatttgtgacatgaactcaattatttctgggcttataactcatgttctacttgctcattttgtaggaagtgcagcatcattgcagcatggtgtgggaaattaggcgaaggaaggcctgattatccaatctgctggacttgttgtgctctgtttattcatactgtctgatggattgctgtgtatcccgtctcatcctctgccgagacataattttgttagcttatgttgtagctttacgctacattaatatggtttcgctagtattagttcgttacatggtactatgaaatactactcctgtaatggtgactttgttattatacttgaattccagtcctattcgttataattaattctttataataagatatcacatgattatgttttgacgaaaggaaaatatgtttcaaatcgttaaaacacgtttcatatgtgataacgatatgttttaatatatgttctcactgtatttcacaaattttttaaatgtttcatcatgtactactagggcccgttcgaatccaattaaaagggtggatggaattttgaattaaagtggcacgtttttcaaactgctaaacggtgtgttttgtgcgaaaactttctatatgaaagttgttctaaaatatcagattaatctattttttaagtttgtaataactacgtgaaacacttaatctttatcttcatcttcaggagattcaaacaccacctagaacatttgatcgcctgatattattttagaaaaatcgagcactgatattattttagaaaatcggacgctcgatttgtagagggttcacagcaatagatgtaatgttctgaaccaaattggataactgtatatagcccgttatcattcgcagaaataactaggactgcagatgagaaaagaaaaacaattactacttacaacgccgaccgaggtgaataggactgatgaatattactccctccattccaaaatactataaggcataatcacccataacccaaaaaccaagaaaataattattatcatcttgtagtttggatcatcctaataaatataatgtatgcatccaataaaattagagaacatgagagtgatgtatttaaaaaagtaataatttaatggagaagaggtcatatttaatagcctatatgcatgtatgccttatattatggaacatctaacaaaatgattgtaatggagggagtaataagaaagaaacatctgatccaagtccaagtgcaagtacagtatttggagcccatgatcgggcgggcatatacaaagaaagcccaaaactaccttagtttagctgctgggccgagtgctattgggccggacgaacacgcagacgcaacggagatatgtatctggagtcgaagcgaggccaacacgtagtggcgacggtgggaagctatggtggcgtggacgctacgacctgcggcggcgggcagggccatccggcgagccgcgtaccactccgacggcgcccctcctccccgcaagctccggggcccccgcttcagctctttcaataggaacaaccatgaggtgtgtgtgtgtgtatccatctcccttgataataacctagttcgttcttaggtttcgatctagagtttcccctcccaaattgaatagaaatatatccttttttttaagcctactgcctctgtgctaatacctgtttcatcatcgcgtttggttgttccccaactaggttaaaaaaagatggatttatttttgcttttcttatttcgaaattatgcccgtaatcccatatgttgagtatttaataaactactaaagatatatatgctcccgcgaaaaacacacacacaaattcttcaactaactagattcaggtttttcagattatgctgcctgtaccagtacgactgttatctgtttattgtgaggggaggagatggtattattccgtaatatgacagatcattctgcagttgtagatgatgcattattatgttcactaatgctcttgtgcttaaccatctcaacactttgctctagaattttgactgttagcactgttaaatttcattatgccgcataagagtgcaatccccctaagatgacaggtcattgtgcacacttgtttgtattgattattgaatgagttcgtatacgtatcattgcgtttcataatttcatagggttttagctgttatgatgttgctcatttgctgtagcatcttgacactacgcactagaattactcttgctgttaccatcgattaattaaagcttgtcttttgttcaagccttcatctctaatgttttagttttataacttcttttttagttttcccttccttttttattttaatttatttgtttggcaaaaccctccatgctctgaaaataatcctgtgttgttcagtattactcttgtctcccctgctagcttgaggggaaagaaagagagtgacatttttctgttcttacaaaactgtacctgttctcccgtatacttggggtttaactactctcaattcccaaacatttggttgaagcaccaatgccaaacctcactaaaagttatattcagtttttttttatcatgctgtactgttaaattatatgccaattgaagtgcactcctcttgatgaaaagtaggcacagccaagaaaaatggtgcttgctttccttcaactatgtcccttagagttcacattccccaggatgatataacatggatgagtttgtacaattaagtttgtttgggtcatgttccctaagtttgggttgcagaactcgtagggaatcgagtaatgcttctttgcttatgtagcatttgaatatcatactttataattttcaattctgaacagtgtgcttttagctgattaaaagcttggctcttgtaccagccttcacatccaatgttttttattcatctaacttcaactccttaccatagagattgtattaagaaccattaacaccagaaagaaaggcttggttgggcacagtgcacttgtgtaaaaggatatagattgccatcattcatattttgttttaattgaacagtgacatagagcgtgtggaattttaaggagaaactgaagttaaatatctgagtctttttgtacaagtctgatagtggatgtggattacaacagtacgcatgttgatatgcagatcgatgcgttgcttgaggaagtcaagaatacaccggttaacatgatcaccgatgacctaatgatccgaaccgtgcggcagtatgtaattctgtgaattgcagcttgtgtttttttggttctctatctggctgaccatcctatttactactgctcttccttgtctgcatgtgtagttcttttctggctcgtcaggagattctgtatcaaaatgttctgcgatcatgggtggttgtggcagcggtactcacagggtatagctgggggtacaacaaatttgctgaaagttctactgtcggatctgaaccaccaaaagaacatgaggggaagtagaagacttgacgattgtttttgctctttacggaagactgagtgtttgggataaaatgcagtgaattgtgcctcagaaactcgcttgtaaattggtcaatttctgttaactgactatcctgtaagacagggcttgggcgaccaatcttgctccgccttttacaatctccagctggtttggggtgtttcatgctctagataggctgctgctggtcgataatcaacggatgctctttctttttatagttaactcacaaggcagcttggtattacaactaaacaagtatatactgacagtgagaagaattaatttaaaaaattcagtaccagtaatgagtaaaataagcaaatttaaggcactacactaaaataaccaaagttataagtgtagcatacaactagctagtaagacagatacagtatgatgatatacaataatccatccatcttcagtggttgctctagcttgcttaatttgtattttaatgtatgacgccgttgactttttgtcaacgtttgaccatttgttttattcaaaaattttgtgcaaatatgaaaatatttatgtcatgcttaaagaacatttgatgatgaatcaagtgcacaataaaataaatgataattacataaatttt

SEQ ID NO: 3481 - DNA, 540 bp, Oryza sativa
ctgtcttgatgttgggtaggtatgcacttcagttctccttgtttgtgccttgttatgtcataatttgtcccttctcctgtttttgtcgaagcgtcgtgcctcattttttaattcatgattcagctgattaatctggtcatatagtttctaaacgcatttcatgaatcatgaataacaaaatgatcccgattccgataattttgctttataagtacattttactgattagtgatctaatactagtatattttttcttgtagtaccgaatggctgggttggctgctattgagattgcccagaaagtttccaaagcatggcgctttctgagaaaaattccaaagaacaatgcaagcaagtagttaggagaagggataagcttaacgcgtgccagaacaggggagggtattgcagcacaagtactttgtctggatcaccaacatccagtccaaatgaagacaggatttctctgaatttctctctctggcatgatgtctattactatgctgtaaatggagacaaattctgaaccttgtgacccag

SEQ ID NO: 3482 - DNA, 518 bp, Oryza sativa
attactcgggccgccataaatgcgggtaggtgggcacctggaggcggacacttaacccaccgtacatggtgacctaaagaggatgtcgggggagcccgacccctagtcatgggagggggcgcccgccgcccgacctcgggcccgatcccccctcggggaaggccatgtggcgcctggggcaaccttctccctttagtctcggccagggagtggccgccgccccaccttgggcctgactcccctcaggggagggccacgtggcatcggggggcagcctcctccatctaatctctaggaaggagtggccgccaccccacctcgggcttgattcccccccccgggggagggccacgtggcctcggagggcagccttcttcgactagtctttgggaaggagtgggcgccaccccacctcgggcctaacttcccttcgggaagggccacgtggcatcggggggcagccttctccgactagtctttgggaaggagtggccagcaccccaccttgggccttgact

SEQ ID NO: 3483 - DNA, 570 bp, Oryza sativa
cggagcggcgacagccgcgtccagctcgtcggcatcggtcgtgctgctgctggtggtggtggtgatggcatcgtcgtcgctcgtggcggacggctcggatgtggcggtcatggcgtcctcggcgacaatgtcgatggcgagtggaaacacagacgacgacgactcccgctgctcgaagtcctccaaagcccgcgccacggagcgctggacgtcggcggcgctgtggagggtggccgggggcggcacgggcgaggggcgaagcggcgaagttgaggcacgcggcgcggccacggagcgcgagcatggcggcgtcttgtgcgcgcgcggtggtgtcggcgccgtcgaacgtgccgagccagagcccagagcctgcagccgcggcgcccctcaaaatcaaattcatcagttcttgtaatcttgttctcctagaccctgacaaatgaaaactcgcagtggttcatctgaccaaaaaagaaacaaacagtgtattggtccttggtcgaattcagattcggatggattcacgagtcgaataatcaaatcaaacgcatgactagagtagactcgatc

SEQ ID NO: 3484 - DNA, 2444 bp, Oryza sativa
  unsure (1)..(2444): unsure at all n locations
catctacgagacacaagccatgccattattctatggcgcaaccggtacatcatcctccctgtgcgacaagcggcgtctcgtgcaccatgtgctccggctccgccatctgctgctcatgattctgcaccggctcctcctcatgctccgccagcaccgtctccacctcaggctccagcatcgactcctcctcaggatcctgcaccgactcctcctcgtgctcctacacctactcccccgcaagctcctcttccggcaccttcaaagtcaagggcccccccagctgcaccgcctgcccacacaagggcaacgaagaaggcgaaagttgacgccgccaagaacaaggacccggggtacgattgcacgcaagaggagcttgacgcttacgttgcatcagaagtcaagagacaattcaagcctcgaagtccagaaaagaagattcttatagaccccagtgtcaggaacttcttcaggggtatgtctgcatctgtcaaggaggccatcaagctatcggactatgagcgaacgctgaagaaagcatcttctggaaagtccaaaccagtccctcagcttggagagcaaccaaaacaggagatcgagccgttggttaccgggaaagaaatgacgatagaagaatttattactgacaccgatctaactacggatcaattgataggagtcgcaccaatcgaaaaggcggaagtgaaatacatgtacgaactcggtaaaccgcttgtcaagcttgagctgctgcagtccctacccacacaaatgtacaagttccatcagctgtacatggagatgagcgccgccggtagagagatgatcggagcgaggatcagggacacggacttcttgcaaggagatgacattctctggatcaatttcaagggaatctacgaactataccagctggacgccctcgacgtctctattatgagttgctggattttgtaagtatatcgttcggttagatttctactatacngtctcctttataaataggtcccttgtatataagtagactatagaaataatatctcccttttatcgttgtagaatgnagatcaaaggggcccgacgncggagggttttcgatactggattcatcgaccctcggagagtaaacgtcgcaatgctcgaccaatatccacaagaaacagaggacaatctcgtccatctcctgaaggcgcagcattacaagacgttcatactgttgccatacaacacagagttagtttaattttactgtcttcctacataccaaatttcattcccgtacgaactttctaagtgtttcatatgtaatgcatcccacgcacattgcagattccactgggtgcttttactcttcgacctggaggcctgcaccgtcaacgtatatgactcaatggataaaaaagagtctacgtttgacaaggttttcgaacttatagacaggtaccgtcataagttcctttgttaattaagaaaatcttgttatgttaattgctactacgaatcatatctttaaactccatgtagggcttggtatcggttccgtcatttggtccgcggcaactaaagagaaagacttaggcggaggttcaaatttcctgtgagtacacatgctctacatttatatttctccgattcaaattaatacatacaactgtatattaattagatctcacgccgttaatttgtcatttatttgtagtgcgcaaagcaaaagcagggaactaacttgtgcggctactacgtgtgtgagtattgccactgccttgcagaccaaatcatctccacaagagagctcgatgtacgtacaaataaattcaaaatttcattacgtaacgatttcttgtttaattactaatcaatttcatacattcatataatttattcgcatgagggataacctgaccacacacaagaaatttatcgcagcggttcaagaacaactcatgggattcatcaacgaagaaatccttgatcccaagggtgaattctactacgacggaaacacaattcaccggtccttagcttctgagctagcagcgactactactacgtcgaaatcgtagctagctaggacatataatggattgtaattaatacatgactacatatgtttctatatgcatgtgtacacattttctataatgtaaatatattttggtcatatatatatctatatacatatgcatttgcataacatatatatgtataaatacatatatattatgcatgtatatacatataatataatataatatatatatatacatatatatatatatgtatgcatatatatgtattcaaacatatatatgcatggtttatatatatatatatatatatatatatatatatatatatataaaccatgcagcaacagggccatgcaaaaaaaaaaaaaaaggtcagctcgatctttagtcccggattggtactcccggtttggaaac

SEQ ID NO: 3485 - DNA, 9075 bp, Oryza sativa
tacactctgtccaggtttctcccttccccgtctctcctctactgctactgctaacctgcgtctccctcgctccccctgcagcgtatggaatggagtatccgacgaccaccaaggtgaggaggttggagcaccaccgcagtgtcagcgactcactcaggccgccgccatctttccagatacaagacctccctgaggtaaaactctaaattggggcgccgggggagacgatctggcacaggcgtggtgtccgtcagggggatcctatctcccctatgatcttcatcctcgccatggattctctgagctccctctttgttaaggtagaagagttggggctcctccagccgctggggatccctcactgggtctccctctatgctgatgacgtggtcgctttcgtcaggccgacggttgccgatttggaggccgccacaacagtgccgcgcatctttggcgaagcttccggtctccacacgaacttcaacaaatgttcggcgcttccgatcaggtgctcggatgatgacctctccttgattcaatcggcgcttccatgtccgctagcttcgtttccttgcacatacctcggcctgcctctttccatcttccgcctcaagaaggaggacctgcagccgtttgtcgacaagatcgctcgctggctcccgcactagcaatatgatcttatgtctccaaccggtcgcatcaccatggtcaattcggtcttaagctcgattccaatctatttgctgattgcccttgatgcacccaagtgggtaattaaaggaattgacaagataaggaggggttttctttgggccggcaaagtcagtacccatggtggcaagtgtcgggtcgcatggggtggtgtttgtgctccaaaatgctacggcgggttgggggtaccggatttggatcgcatgggcatcgccttaagatcgagatgggtctggttgcagcgcacttcgccggataagccatggcacggcctcaacatcccggtttccttgaacgagcgaaactttgcgacggcttcaacagtctgcgttctgggcaatggggagtccattcttttttgggaagacatttggctagagggttcctccattcgctgcattgctccggctgtttgggcggctgtcccggcacgtcttcgccgtcgcaggacggtcgccgaggcccttcaagacaggagatggattagagactgcacaggggcgctgggtttgcaggctattcttgagtaccttcagctctggagcatcctgaggtcctctgtgcggctctctgaccaccccgactcttttatttggaagtgggaagcatcgggagtctactcttcgcgttcggcataccgggcactctttctaggtagggttcctttccaatccgaacccatctggaagaccttcgccccccctccccgagatgccggttctttgcctggttggtcacaaaaaggcgctactagacggcggaccgcctgcgttctagggggttgcctcacccggatagatgtgtcctttgtgatcaacatgaagagactattgatcacatcttggtcgcttgcccagagtctcgccaactttgatgggctgtcctttccagcattggtctaccgcagtgtctccccctgaatgaagactccttttatctctggctttgcaactcccgccttaaagtgggagcggctagcagaaggggatttgacacaattgcaactctaactgcatggacaatctggaaagagagaaacaatagggttttcaactctcagcaaaggccctggtcagagatagcccgagctatggcggcggaagcaactctctggcggttgacacatgcggtgctaccggtgctaatcatttaggtcttggtttaggtcgtttccatatgctggcgtgagaataggcttaagatctttgggtccttctcctatcttcccgtccccctcttattttcttgtttgggttcgtgtaaatactctttatttctcttaatacaaagatgcgcatcttgcgtattcccaaaaaaaactctaaatttccctgacttctctctatccggggtaaaaaaaaaagttcattttttcccctatcatctatcaacacctgccatgccttgcctgcctgtgtgatttttcacatagatgaaacattgggccttattgcacggatgagttctattattatagaatcaaagcacctacaaattgattgagcatgccttcgtttgttttctcttgtaatgacaggatattcagcagcttatagtatcttttatgccactcagagatgcggctagagcgagccttgtgtcaagaaactggagaatgctctggacatgccaccctaatctgtgctttgatggcaccaagcaggagcctactgatgagggtactctcaaaattgaccgatggtacttctctaagacagtaaatcatgttgtccgacgccacaagggaatagggttaaataagttcagcatcaactgtgacctcaacaaggatgaattcaaacatatcgatggcaaaggttatagatgttaacctacaatctcggcacagaaacagatggccaacacggaaacatctgctagaagatgtttaccacttctcacttgatgctttggatgctaagcatgaccctgctcttgagtctttgttcctagctgttgtattaatagaggtacatccaaatatttctggttttaccatgctcaaaaggctcgcgctgcagtatgtaaaaatagtgggggatcttccagacttgctgtcacgatgttctcttcttgaggacttggatatcagtgtgtgcactggcgtgggtgatttggtaataccatgccaacttgacaagcttcaacatctgcggatttggggtacggaggtgcagatgattgaatttcatgtttcctgtcttacgcgttttgggtatagaggggaggcaatctcaatcatgcttcatggttgcccaaaatcagtgaaggcaacaatcgtatttcttgaacttaatcaacttgaccatgtgttcactgtgcttccaagtgctttacctgtcaaggagcttagcttggatttacatatgtacgactatgacctaggacaggtttgtccctttgttccaaggaattcatcttttggtttgcctttttgtatatttgtttgcttgcttggtagactgccttaccatttgtttggttgtctttcaggttcatacattgacaagaccactgtggagattatgggtatcccatatctacacggcgatggtattcgaactgggtacaggatacctaatgtagatagaatatcttatctgtatctcgggtttgtttcttaacttgtgtatcaaggaaacaccctgagacttagtcggttacgactgtattttacctttatcttcatattccgttaggaatatagattatcttttgtaatccggactccttccaagatataaggggggtccgggcgcctctaggggcatatgctgatgttcccgaatcatacaatcaataatacactcggcggattcatccccggacaggagtagggattacttcttttataagaaggcctgaacctgtataaatcctttgtctccaaacccatacactttccaagcttgatagccacccccttttattattgtcgaaatctagtttcgacagttggcgcgccaggtaggggtagcgtcaagcttttcgccgatcagtgcaatgggttccgtcaccggcatcgacgacctcgtcttcccacccgggcagacgtttcggttcggcagcctcgacttcgtcaccaacaacttcggcaagatttctctccttgactcggaatcagaccagtcgggagagaatcgacttccagttccgtttggattcccaaacgcggcagaaagttgcttcaagaccatctcgatcgagtcggcttcaaaccactcggccgagatcgcatctactccaacaacgccagatcaagacgatgagccttacccatcgatcttgatgcagctccctgacgattcggcagccgtctccaccaccacgccgtctccatcccgtaggcctaggcggaagtcggtcttaacaccgatttcgcctagcttcagggaagtcggcgtcatcctccaaccactcggcacggtttcaacggaccaactggatggctactacagctctcccaccgtcgactcacgtcccaccgaaatcgtggaatacgatgagttcggttctcgctactacgacgacgtggatcttgacgacttcgacggaagcctagaagacaactacactcctcttttcttcggcgtctttatggccgacaatgaaacggaggagcagcgccaagcccgggaagccgaagcacgttgcgagaccgagcgccgccgactggagcaggagcgccaagcacaagagcaagagcgactacgccgggagcagcaggagcatgagcggaacgcgaaggaggctgaagaccgacggcagcgaaccttggaagctgggcgccgagcgcgtgatctcatcggccagcaagatgttgaagggataccggttttccgtacccctcagcagaatgcggttgccgcgatcaccctcctcgacaccctcctcaaggaaaacgagcacaaccaatctgatcatgtcgtcaacatcctgaaccagaccaagaccatgattgcggcctcggttccagttaactccgaaagcgtccacacgccgactggtagccgagttccacacttccgatctcaggactaccgtcatccaagcctcagcatcaccggcgcaggatccaatcgcaggagcaggggtcacgacgagcggtccgcgcactcgcctcccgactaccgtggggagcgccgagtagaacggccacgttcaccgcctcgtcgccgccccatcgatcttcgcgacacaatcatgcagcgccgagcagctcgaggccgtcaccactcgccagaccgctacgacgacgaccttgatggggtagcagccttcaccgacgacctgcgtcgagtggattggccagccggcttcaaaccgactggaatagagaagtacgacggtaccactaacccagaatcgtggcttaccgtctacggtctcgcaatccgcgcagcaggaggtgacaacaaggccatggcgaactatttaccagtggctttagcggattccgcccgatcttggctccatggattgccccgtggtacaattggatcttgggccgaactacgcgaccacttcatcgccaacttccaaggcaccttcgagcgtcccggcacgcaatatgatctttacaacgtcattcagaagtccggagaatcccttcgagattacatccggcgattttctgaacaacgtaacaagatctccgacatcaccgacgacgtcatcatcgccgcattcaccaaagggattcgccacgaagaattggtcggcaaatttgggcgcaaacctcccagaacagtcaagctcatgtttgaaaaagccaacgagtacgccaaagccgaagacgccgtcaccgcatcgaagcagtcgggtcccagttggaagccgaaaaatacgccggctacgggaggaggtggaagtaacaatcataaggaccgcaagcgtaagcctgaggaacttgttgcaaccgccgctcactcttctcgacagcgttcgcgcgtcaacaccttcgacaagattatgaactcccaatgcccgcatcatccaaactccaaccacgtggccaaagagtgcttcatctacaagcagttcgcggagcagtacaccaagtctactcggaagaactccgacgaggaacaaagcacgtcaaggaagaaggacgacggcgacaccccggctggatttcaagaccaccgcaaagagctcaaccatattttcggcggccccatggcttatgagtctaaacggaagcagaagttgactgaacgggagatcaacgctgttcagcccgacacgccccaatatcttcgatggtcagagattgcaatcaagtttgaccgctcggatcatcctgaccgagtggtccacccggggcggtaccccctggtactagacccagtagtccgcaacgtcaagcttcgcagaaccctcattgatggcggcagtgcgctcaatatcctcttcgccaagactttggatgatatgcagatccctcgctccgagttaaaatcaagcaatgcgccttttcatggagtaattccaggattatccgcaactccactcggccagatcactcttccggtcacttttggcactcgggaaaacttccgcacagagaatatcagctttgaagttgccgatttcgagacagcataccatgccatactcggacgcccggcgttagccaagttcatggccgtcccgcactacacgtacatgatgatgaagatgcctggtccccgaggagtcctaaccctacggagcgacatcaagcaagctgtcacatgcgacaaggagagttgcgacatggcccaaacccgcgagatagtgtctgcccgagaggaaatccgactggctgcaaccacggtgagcgaaggagaagtgcccgctgccaagatttcaaaaagtggggaagccgaagccgagactaaaaagattcccttagatccttctgatcctactaaaactgctgtaataggcgccgagttagattgtaaataggaaagcgcgctcatcacctttcttcaaaataataaagatatctttgcgtggaaaccttcggatatgcccggtattcccagagaggtgattgagcactccttacatgtcaaagaagatgccaagcctatcaaacaacgactccgccgattcgcacaagacaggaaggacgcgatcaaggaggaattaaccaagctgttagcagcaggcttcatcaaagaagtccttcatcctgactggctggcaaacccggttctagttcggaagaaaacagggcaatggcgcatgtgtgtcgattataccgacctcaacaagttttgtcccaaagatccttttgggttgcctcgcattgaccaggtagtcgactcgaccgccggctgtgagcttctcagttttttggattgctactcggggtatcatcagatccgactgaaggaatccgactgcttgaagacttcattcatcacgccctttggggcatactgctacgtcaccatgccgttcggattaaaaaacgcaggagcaacttatcaacgcatgatccagagatgcttttcaacacagatcggccgcaacgttgaagcctatgtggatgatgtagtcgtcaagaccaagcaaaaggatgatttaattttggatctagaagaaaccttcgcgagcatccgcgctttcaggatgaaattaaaccctgaaaagtgcaccttcggagtaccgtcagggaagctgcttggttttatggtgtctcgtaggggcatccaggccaacccggagaaagttactgctatcctcaacatgaaaccgccaagtacccagaaagatgttcagaagctgactggatgcatggcggcgctcagccgatttgtttcaagacttggcgagcgggggatgcccttctttaagctgctgaagaaaacagataacttccagtggggacccgaagcacagaaggccttcgaagatttcaaacaactcctcaccaagccaccggtcttagcttcaccacacccgcaggagccgttgttgctgtatgtatcaccaccccccaggttgtgagcacagtcttggtcgtcgagcgtgaggaagaaggccatgtccagaaagttcagcgaccaatctacttcgtcagcgaggtcctgaccgattccaaaacgaggtaccctcaggttcagaagctgttatatggtattttaattactaccaggaagctgtctcattactttcaaggtcactcggtaacggtggtcacatcatttccactcggcgatgttctgcacaatcgcgaagcaaatgggcggattgctaagtgggctttggagttgatgtctttggacatatcattcaagccccgcacttcaatcaagtctcaagcgttagctgattttgttgccgagtggaccgagtgccaagaggatacccccgtggagaaaatagagcactggaccatgcattttgacgggtcaaaaagactttcgggcactggagctggagtggttttaatttccccgactggagaaagactaagttatgtgctttggatacatttttcggcgtctcacaacgtcgccgagtatgaggcgctccttcatgggctacggattgcaatttccctagggataaagcgtctaatagttcgaggcgattcgcagctggttgtcaaccaagttatgaaagagtggtcctgccttgatgacaatatgatggcatatcgacaagaggtacgcaagttggaagacaagttcgatggactcgagctcagtcacgttcttcgacacaacaatgaagccgccgacagacttgccaactttggatccaagcgtgaggcggcgccctctgatgttttcgtcgaacacctttatacgccgacggtacctcacaaagataccactcaagttgcgggcactcatgatgtcgctacggttgaagccgactggcgagagcccttcatacgatttttaacttctcaagagctccctcaagataaagatgaagccgagcggatttcaaggcggagcaaactttatgttatgcatgaagctgaattatacaagaaaagcccttcaggaattctgcaacgctgcgtatctttagaggaagggagacaattgctgaaagacatacattctgggatatgcggaaaccatgctgctgcgcgcaccattgtcggcaaagcttaccggcagggttttttctggcctactgcagtgtctgacgccgacagaattgtgcgcacatgtgaaggttgccaatttttcgccagacaaattcacttaccagctcaagagttgcaaactatcccgctgtcttggccgtttgcggtttgggggctcgacatggttggcccgtttaaaaaggcagtcggcggttacacgcacctcttcgtggccattgacaaattttccaagtggatcgaagcta

SEQ ID NO: 3486 - DNA, 885 bp, Oryza sativa
agcgtgaggtggtctttgttctttacctgaagacccagctatcgagtcgttaccagcttctggtccttgcgaagtcgtcgtctgcgcttctacctcggggatctcttgatcagggcctgcgtccgactggtttccagtcgggggctcttgagttgttgccgtttcagttgttgccgactggtttccagtcggcggcaggtcactcggattggccctatcgcccgaagcatgggcgccagtcggctggctttcagcggtcggctggttttcagcagtcggctcggggtccttggatatattttgctctgtcatggcaggatcggggtcttttccagatggatctatatcagatggtttcctgcagagtgttctttcagtatttggcattatcttcatcggaaaacatgccgaagcggaaatcataccgagagatctaatacctggaagatgttctgatctttggcattgcacggccagccaattttttcctgggcatggtgcgctttgggggtttattaggcaagcccttatccccagatttatcatcgtcgccttcatcatcatcgagtaccagctttctcttgcgaggacctgtttgaccagtcaatttggaggtctgaggttgcggatctggtctgatcgttggccctccacctccctgcgcggtgtgttggcgaggagaccggcgctgagtgactggtggatctgacttcatcaatgcatatccctgaacaagatgcttccatagttagtcaactcagcatgaagataaaattatgttctgatcacggtttgagggtttccgatgtatacctgtggaggcggattgaatgcattatatggcacaactggcaattgatgagagtagctgactacaattgcatt

SEQ ID NO: 3487 - DNA, 3033 bp, Oryza sativa
ctgtgacccgagagatatttttgattttatcccttccttgtacctgaatttataccccagcagctccgagtccttttctttcacggttgatcgccaaaacagatccacatcaatgatatctttggtgtgacccctgtagaacttgccgtaccagaatttgacaacaggcgtaattctaccaaacttcatatccgccctcctcctcggattaggattccattgtcccatgataagcctccatcctgcccgatgtcgaaaagcattaggccagatccaaccagaaccagcacgattaacctgatcaccaacccaattacagatcgcagacgtgacctccgcagactttctgagcagatcggagagaacctccatccagatcctcctttcatgggaggagaaggctgccgcaacccagtcgcctgggtgccgcccagaccctaactcacgccaaaacatgtttgtacaagttaaaggcaacttgaaaacaatataggagtatatgaccaccaatcaaacttaaatcactgaaatatcgcttacctttcatacattcatcagttgtctggataagagtggataaaaagaaaacctaataaatgttaatgtgatgaatttgatgacaatgaccccgagttattttttcaaaacacggaagatgctcacatacattgatgcacatacacgcgcaccacctataaccataccggagagactgtcatttctcaatattgacaaatttattaccacagatagcaacaataaaatttaaaaaataattaatcgtaaatacgagcacgtgcatcagatataaaacttaataaaaacttagattgatagagttacagttttttttaaccccgcagtgtatacttgtattaaaggagaggaagccactgtatagtagccttgaggctaagagttaccgttctagtcaggggcggatccagcgtggggcggcggggtctcgagcctccactactactgatgtaaagactatgagagcccccacaaagaccccactaaaattttttaccatatataactttatctagtttgtttagacctcattgctatttctttattgatccgccactgattctagttcatgacaccataagttatcgatgtgatccgccactgattctagttcatgacagcataagttatggatcacatcgataaaaacatatgccggtttagttctcaaccgctgtactaattctttagctggtttcaaacaaaataggacaagcatataaagatgcgatggaatttgaaaacataagatgccaagtggcatatctctactgttttgccagtttgtccacgagccaaaagaaggctccaatgagaattcccccgtacatgccggggtggcgccacatgacaatgactgacaggctggccccacgtcctacctggctggccccacccctgctctttctctttctcttcttccctttcgtcttcgtcttcgtcgtcgtcgactcgtcgtggccgccggcaactcacgcccaccgcgcgcgcgcgcgaattaatacaaacacattaacacacacagagagagaaaattggcgcgcctcgcgctgtgcgccttcgaattttggaggcgacgcgcgggaggacggaatcggccggggattcgctgcgtcgccgcgcgagagcgagaggaggaggaggaggaggaagccgggatgggggtgtcggacaacacggtggggctttcgctggcggtggcgtccagcgccttcatcggcgccagcttcatcctcaagaagatcggactcatccgcgccggcaagggcggcgtccgcgcaggtcatctctctctttgctttgctgcctcattctcaggtcaaccgttgtttgcttcttgggattggtcgccgcctagctcaattggtcgcacggcatctcgcttagtttgacgacgcccgcatctcaatcccttctctggggaataatcgaacactttggtggatcttgattcgtatgcagcaacacctggaattatggattacgcagagcatttttgcaattggatcccatcctgtcctgatgattagggtggtttttttgtttgacaaatcgttgcttacctgcgccgccgcgattgggtggcggctgctgttgctccgcttctagatcttgacgaggctgcggttggttagtccaagtcgtaagcctgctcgtgcgtgcaaatcagcatcgcggtcgtcgccattgtcgctgtcttctagatgcaaacggaaactcttgctgtttcgtcttggaagaccttgtcaattcaaatgcttttgggtcggatctctaaaatttgaacccagatatcttgactttcagatgccgtgctccctatttatccccctgcgttcaattaccatggttggcattttggcaatgtaaaagcaaatgtttttttttactgtttcatctccgttgccaatctaaacatggattctttttctttttctttttttttacttactctgatgactctttgtgggtaattgccctcccatttcatcttacctgcttcttttctaacacattacaggtggtggaggatacacttatcttttggaacctctatggtgggctggaatgatgacaagtatgctcactctacacagcatttacagttagcttaattaaacttgacaatgcagctgaatgtcatctctgttgattgcacaagtgttgcttggggagatagcaaacttcgttgcttatacctttgcaccagccgtacttgtgactccccttggggcactaagcataatcgtaaggtgatttttttcaaaccaaagccttaagttcagtagtcagcactatctttgattctcctatatatggttgacatacattttgttttttttctccaatttggacagttcatttttagcacatttcgtgctgaaggaacggcttgagaagctaggtgttcttggttgtgtatcatgcattgtcggttcagttattgttgttatacatgctcctcaagaacatatgcctaattctgtagaggaaatc

SEQ ID NO: 3488 - DNA, 6496 bp, Oryza sativa
acacacatggctttttgttatcattgcaatcatctgtgtggtttctcagataaattacctcaataaggtaacacattttcctggctaccaattacttggtgcaagtatgttttgctcgattgcttcctcatgatctatttttcagtttttgaaaatctttgaaaaataaatttgttttttttaccacaaatgctaaaaaaccttgagtggtgcaatgtttctgtgctattctgatcattcagtgtatctcacttttcatgtaatcatgattttttttcccactttgcaggcactggatacctttgatttagctgttgtttctccaatttattatgtaatgtttacgactcttacaatagtggcaagtggaattatgttcaaggtagaaacaaatatttaaggtttagttaattgagactgatcccttggatggggctcacgacttaattcatcttactatcaaatgcaggactgggctggtcaaagcttcagtagcattgcttctgaattttgtggtctgataacaattcttaccggaacaattatgttacacacagcaaaggaggaagaaacaggcagttctgcaggtatcccctgttccttgttttaccttacatggcacttgtcagaaagaaaaaaaactgtgtgcaactggatcatttaaaccctctatttcatgaaagaaatgataaataagggctttcctgcaagtacttaacatcttatgtcattccaaattttcctaagctatcattttctgctgacaattgtgtgcggaatgacaatattgctctatttaaagccagccctaaggccctgttgaatcagttctctcgggaaatcttacttaagaaatactccctcggttgattttcatactaatcagccagccctaaggtctggaccaaaatttattgtctaaaaatcataccaatatactccctccggtttcataattcttaacgttttggacaagttttttgtcaaacttttataactttgactaacaataacttaaatatatttatttttaaggtactaaaacaacatatatagtttgccttacaaaatgctataatgaaaataaaaaaaatatgtatttattgtacatattaatataaaaatatagtcaaagatatatttcaagatcgtgttattgtctaaaacgtcaagaattatgaaaccggagggagtactcatattgtatgggtattcaatggtcaaagtttattctcaaaaagacaatgacttttaaataagatacaccttacaaaaatcgcgacggaggtagtacgctttagaccttttcctattttggagctcactggagccttgatttttcttttcctccctaagctgtagaacagaactatcatatgctaagatttgtgtgtattttcaatagattattgtagcacatggtttaaattttgaactgagtatgctttccttattttgtttcagctttgccatggcctttggatagagggtccatatcctggtgtatcagtttagggagcgacaatctactgaagaatgtcaatgaggactactttgcagctctgcaaagttctcctgcgccagtttaattgtacatttggaagtaatttccttttacttccattgacgaagaaacttatagagtgatgtacaaaatatcatgcaaattgcacaggaaccttagcagtgccaacattctggcagttttgttgtagaagattttatctgacattctttcactgtacataaggacttgtaaaatttgtgaaaccattcttggaaccacacgatgttaggaaattcttggaaccagattgtcccagttacctaatctgtttgtttgacagtgagcgagcagaattgctcgctgaatgttgtgcagtatgaatcagaaaagtgaagtatggtgcatgggcagcatggctgctgtcgtcagaaagtgaaataagatcttcaggattcgtttgaatctcgcttattttactgattcgatttacaacctcatcttttcgcttatacttatacttatcggtcaaaatttaaattttcaaccttaaatttggagttgattttggagttttttcatcgaagtttatttttcaacttttgcttttagttcgccaagaacacatatataaaagttttattcacattatttttcgtttgtaaataagccaaacgatggggccattaatttccatctaagttattttgcgtagtcctgatttgtttatacttgcaaaaggcatagtcatgatttatttatactggtaaaaagataaaggtggtgaatgcccatccgaccattcccatatgtaatgaattgttcccatatttcacaccatcactttttttcacttatatggtgaagagtcgctagtcaattttattagtttgtttttcatcaggaacggcggagagtcgccggtcaattttattagattaggagagcaaagtagtacaaatataacacaaggtgccacgagacttagaacaacaaagcaaatcaaatctagggaatacatcgttcccgtggagactacacaaactgtatggctaaatgactataataagttacaaagtgcaaggtgaaatttcgtttataactgtcttgcttcgtgcactgccacatggctagtacggcccattactaagtagtgatttctaccgctgcctgaaaatatgcatacattcattccttcttgatttagcaagatacaattataagtttcctcatggcgatctactaggcaaatccatcgtcccttgtgaatagaggacttcagagcgtcgataaaccggcatccaaatttagagagtaaaaacacatatgcttaatagggttcctttaccgtgtgtcgaatgtttgattcggccaccccattactacggattgttggccgtcaaccatatttcctaactagttaatcacatgaggaacaccataacaattctcaccatgttcaaaaactagaatgaattctcacctatcagagcaggtttaataatatcatcaacttgctggctataaaacaaccacatcatctatatcccgttagtataggttgctcatataactacggagtaacaactaatatattttttaattgatatgggtcccactaattactgcattctttaccattgttccaaccatgaaccaatctccattaggcttatttctctttcttcattgtaccgcgtgctacagctggcgataattctatcgtcgactcgtgttctctctctaccattccatcttctagcacaacagtgaagctgacatgataacactatcgtaggtccaggttggcctactagacatgctctcatatatcatcaatattttggaaagatcaaaagaaatttgccaaatttactgctttgtgatgggtgtatttagttcaagctaaaattggaagtttggttgaaattggaacgatgtgccgaaaaaatttaaaagtttgtgtgtgtagaaaagttttgatgtgatgaaaaagttggaagtttgaagaaaaagttcagaactagactcggccacagtggccacagtgtgttggctgtcctaaagcaaaacacatgaatcagtgttttgactcatttctccctttgtaaaaaaaaaaacacaactacagaagagagagagagagagagagagagaggggaagcgtcaacctcccgaatccatcgccgccgccgccgccgccggcgatgtctccgccggccgacaccgccgcgctcgcctccacgtccggcgccccgctcgcgcccctcgtcgccgcccagctcaacttcgtcctctcccaagccaacctccccatcagggtgggtacccccgcgcactgcttctctcctcctccgctcccgcctcacccccgctctctccttccttgcaggtggggcagatctggtccggatgccgcgacggccgctacgccgatcgcttcacgctcgccatccccttctgcctcgactacgtctactgtaaaccctcccgctcgctggctccaatggtttagggtttcatgtctctgatgattctgcaatcgcaggggacttcctgtacaatgcgctgtcgccgaaggtggcgccggatgtggtgttcggcccggacgacgaggggtttcagccgctagtcgatttcgatgagaccgggagtggggagaagagctgcttggcaaattgggattgccgggacacctcggccctcctctctctcatcaaagagctccggtaaggataactctgtatgctagcgatgttgctccttagttgcttactgtaatcgcgcttcgcgtgtgtgatgattggagtcagttggagctgagagttgcaaacgcaagggaattgtacgcgacggcgattgcatatgcctttattgtggatgatatattgggatcctggattgtcagtgtggaaaaaatgttctggaagttttgatcctaaactcgcttttaaactggttgctcttcacttgattttggtgcagtgaattttatattgaataccaaaagaagcgggcagccgaggttgatgacgcaagactgaaatttgaaataagcacagttctgtctaaggaggtaatgcactacattcagcacatcttccttcctatgggcattatgattatctaattaatgcaccgagcgtatatattttttaagtagaagactagcagttattctggaatattaatatcccaagaagaaccatgtattcgtaactcataattggttgatccattctacagcttatcgcctcttatttttgcctatttaactttcttgttttatgataatcgatggttcagtaacaactttttaaaatggacacattgaacaggggattgaagtctgcacggtatcgtccaatggtagagtaagtttactagtttccatatctgttctttcatgaaaattgatgtttgctcttacttatttttaatatattcacttatagccagatgaggtgaaatttgctgtcccacttctggatctggaccttgccaaactggttcctggatgtccttggaaacttcctcaaaagatccatttgcaggttaacttctaatgccattccttccatgggcatagttaaaatggtagcagtgatgatgacgaggaatccattcagcaaatttttagctggttatgatctgttgaaatttgaaatgcactaaagtaatgattgtaggaaggcctttcgtccatatcttattctggaacagcacttggtaaatctcatgtagcaaagatagtttccatcttctctaacaagatagtacacacagacggactgtctctctgttattatggttactcctgctctagaatagtcccatcgttgcatattatactgggcaaagcacaacaccagtacatgaaattcaaattgatcataagttttcctgaaaataaggatgtaaatttcacgcttaacaatcccttatatgtattaacatattttagaaatgagtgtcttggttgttatgggatctcacttggatgttaaagtagaaatacatgatgtgattatcaagtactcaatatgcacgctgcaaaaagagaagtactaaatatgcaaatgaactgaaaattctttatggaaacttcccaatcagtgccagcatatattaatttagaaatactccctctgtcccaaaatataagtatttttggacttcaacatggtctttaagatgctactttgaccaataatatctacaaaagtaagatgttttaactaaaaagaattgtatattatgatagtttgtttaatgatatatctagtaatatcaaatatacatgatcaatcttttttttttgttattaatagtcaaaatttaaaaagtttgacttgacactattctaaaaatgcttatattttgggaccgagggagtatatgatatgattggcaagggtttaaaacgaaaataaacttggtaaacttctagcaaagaaaaaaaaggttgcaatacacatcctgtgcttctgtggggcacaactgttcactgtatgtctgtatctatagtttgtacaatcttatggaacctattacttttctattgtgttgaaaatgtgttggttgctatgcaggctgtttttccaattagcagaagttactcctctgttccttctgcaccacgactcaaattagtctcaaccccagatttgaagtcatttttctcagttgatgatgttaaactccctccatggttagatggaatgtaagcttgccagacttgcacatgaagattgtctctcattgcatatattatatgtcagcacaaaccacacatatttgccagtgtttttcttcttctgttacaacatttcaaagaagtaaagtaactgtcgctgatgtgtgcttcctttcttggcctgaattgtgaaggtgcatggctgagtatcttcctaacttggaagaaaatcttaaaatccaggtactatagctttaagttttgcatgtaactgttggtcttgactgcctgctctt

SEQ ID NO: 3489 - DNA, 578 bp, Oryza sativa
ttggtaataccatgccaacttgacaagcttcaacatctgcggatttggggtacggaggtgcagatgattgaatttcatgtttcctgtcttacgcgttttgggtatagaggggaggcaatctcaatcatgcttcatggttgcccaaaatcagtgaaggcaacaatcgtatttcttgaacttaatcaacttgaccatgtgttcactgtgcttccaagtgctttacctgtcaaggagcttagcttggatttacatatgtacgactatgacctaggacaggtttgtccctttgttccaaggaattcatcttttggtttgcctttttgtatatttgtttgcttgcttggtagactgccttaccatttgtttggttgtctttcaggttcatacattgacaagaccactgtggagattatgggtatcccatatctacacggcgatggtattcgaactgggtacaggatacctaatgtagatagaatatcttatctgtatctcgggtttgtttcttaacttgtgtatcaaggaaacaccctgagacttagtcggttacgactgtattttacctttatcttcatatt

SEQ ID NO: 3490 - DNA, 794 bp, Oryza sativa
aaacactcgaaagcaaggagtgcgttatccgttatcagtcttcctggcacgaaggcactttgattaaccgagatcaactcatccaaaatcgaccgaagtctgtttaccaagcatttagagacgattttatatagaacgttgcataagctgatagggcgaaagtctttcagctccacaggctgatcaatttttgggatcaacacaatagcagtttcatttgccccttctggcatgattcctgaatgaaaaaattccttcactgccgccaccacatcagacttgatagtagcccagttcctttggtagaatctcactgggaatccgtcaggcccaggggccttcaatgggccaatctggaagagggcatcggctatctcttcatctgtaaattccttgcataagttctcattcatcgctgcagtaaccttcttctgaaacaactgggacacacttgcctgatcgagatttgggtctgctttgtaaatctccttgaagtaatcagtagccaacttttccatagttgttgccgtattatgaatagtaccatcactagccctgagcctagagatcctattcttttttgccctccacaccgctttactatgaaagaactttgtgttgcgatccccctctttcaaccaactaatccttgatctttgcagccaaagcatctcctctctatacaacagttcattcatgcggtctaaggcctgacggatctctctactgtcagcatttcattccattaacattgccagatgtttccttgccttttctagctctctaccaatggt

SEQ ID NO: 3491 - DNA, 5446 bp, Oryza sativa
cctcaaaactgtggttctatgttatgcaacgagacttagtccttcatgataagatattaaggcctaatgaaaaattcttgaatcctgattcctacagcagtttaaccgttcaataatttgaagggagaataataataataaattaatgaatcctacatcttgactccataaaaattataagtattatcaattacatacggcaaaatacagaaattatcaagtgatacatacagaagtattttgagccaaattgatcaattgctggatagtagtttccatatgctcttttgaatgatcctgaggcgcaaaatctgtcgttaatctgcacatcagaattcacagcaacagcatagtgttaagtacaggaagtgctgatatgattgtaaatagcatcttaaatgaaaagcatacttctcagattcttacttgttgaaatagcgtcctaagttatgccatgttgggtctttacacaggttaccaaatcgaattacttctcttgaaaagatgtcaagttcatccctgtagaattccatcaaatccatgtcagccaatcgcattaacaacaaaaaaaaaaaggaacgataggacaacttccttcttgaaccaatcataccttttgtcaacataagcaatatacaatagttcactggaatttgaggagaccaatatttgcactccatctgaacgcaatatttcttccttcaattcctttatactcgtgtcggagcaagatctccacaaattggaagctttagctattgtgtttgcgacttcaaatgctaaaatacagactctattgcctcgatttgttcccccagagagaaatccactgccatgatttaaatttgtcatgctactcccgagggtatctaacacctcgacagcagcaatgctggctcttcctaaaagtgtacctgtttctggtacctgtcacaacttagtatgtcagagttaatatgaaaggaaaagactactcttatcttctaatgatatagtctccgcttttgctgccttcaatttccaatagaaagacaactagttatagcacaaacaaagcaaaaggaagagcgagagaaacgtattatcccctctaagaagaataatatcagatgtttcgtcgtaacaaagaacctaagaaagaaggtatatttatttgaactagcagtgcttttcctgtcaatcttattgcaaaattatgaaacaagccaatttgaagtgcaagcttttcgatgaaaacatagactcaatgaatgaaacgggtgaaatgaaacaaaatggggaggtcactcctctaaggctattccgtagtcctttcactttgggggagatggcctcctttcatttttctgatgatatatagacgatcacccctgatgcgcattggccagatcaaagtaggctgcgcattggtgtatttcttaacccgatactttagtaaccatctgtctatatctttttccatctccaggatgactgccgaatcactgggtgcctgaattataacactagtaacatgctgagagtacataaacaaagtcagcttctttccagttatacagtctgtactttgtctcacttattagctcctgcacatttagtgttttcttccaagtagaagctaagcagatcactcatgtctttgcaagaagaaaagtgaaggatgtaatttcccaaactccatggttggcatggaaaagtggtcagcaggaaggaacaaaagcagaagctcatggttgggtcgctggcttgaccagtccaagaagtagactcaggctgacagcaacgtgaacgttaaataagcacggcagttcttcacttatctgagcaaaaggacggaatcctcctcctataggacaatagtgcttacaatatgataaaccaagggccgccaagattgactctgctgcatcctacacggacttgatgaatttttgtgtgtgtaagctgttggttttcacttgctgtatgtattgttgtgtccctctctttcccctgatccgcttaaagaattcatgcaaagatgcagtgcagattccccacggtttgtgaaattctgcatcctcagaccactgccaatctagtttgatttgagttaatcaaagcggagactgaaatacgagagagcagcttcagatgaagtccccatggaagccttgacagcgaaaggcagctcaattaaagcttcacagtgatgctcagtttgacggcttctctgaatttctgaacacggcggcgagagaagaaacgcagcaaaaaataacatcaaatcaataatacccccaacttgtgattttgaggaattggacgtggaaggcggattgagatttcgaacccaaacaaagcgctccgtttgcggcaacgcgtgtttggtgcatcaagtcgtggagaattctcaccggctggctacctaactaagcagaaacaaatcgcgaagtagagagcagcacatgcagctgtccgatggaagttgcaggcaagcagggcggagagttgagctgaagcacatctcgatggatcgatggagctcgaaaattccaacacatgcagcacatgatgcatagaaaattacggtggtagtagtagtagagtaccttgtgggaggtgagtagcttgggcggcgggatggcgagctcgccggagtcgaagtcgccagggccgtagcgaccccggcgcgcctcgtaggcggcggcgagcggctgcaccgagcgcggcgcggcgtcgtcccgaaaccgcctggagcacacgcaccccatagctctagcttagacgtacaggtgctactagtagtatctcagcacgtatcagcctcgtcggcggagcagcaagcttaggtttcgcaggtggcggaggttggagtgagggagacgacggtggtggtggtgggaatggatcggatcggcgcgcgggattggaattggaagggaagagcaagaggaggaagagggggagggaaggaagaccgagagacgagtagtcgaggagactagttgtgttgtgtcgtcctgaccatgctgctggtgctcgtcttgttgcgttcgcatcctttgacttgttctctctcccgcgcccacgccacgctcacgtacgccacgcgcctccccctctctctctgcaaggcctattcggttctccacttctccaccacagtttaccggagaaactattttcatcatctcgttgtttacatgtaactttgttatggaaaaaataaaaaaaattaagaagatgtattaacatgtgatatatcactctacaaacatgtatgttcaaatttaacttctacatctcgcaacgaaaaaacaaacgaatttatttttttttgcgagatgtagaagttgcatgtttgtggagtgatatatcacatgttaatacatcttctcaatttctttcaaattttttcataaccatttgagtgatgtgcaaacaacaagaggatatcccctcgaggggtgaaaatccactccccagtttaccactgcgctaaaaattatggggctcttttgttctctaccttacttcctccgtcccataaaaaaccaacctagtaccggatgtaacatatcatatccagattcgtagtactagaatatgtcacatccggtcctagattcgtttttatgagacggagagagtatctaccaaattcttggcatgttttggtattaccaatttttttttgtaaggtagagatttattatacatgtttggattgctactaatatgttgccaaatgttgatgatacagagaagaagactctagattagtgccaaattgatcataggaatagccaaacaatttggcttcaatccaaacctatactattactattgaaggtaccaataaattggcagggcacattttggcatcaatccaaaatggtcatatatcagatttactccttcagtaaaaaaaagtctaacctaaaatatcaaattcgttgtaataggatatatcatatcctatcttaggttggattttttttaaggagaaagtatctacttactactactgtttttgttttatattataagttgatgttgaacttctttggatttaaccaaaattttaaaaatatagtaatatttttaattaaaataaacatagacatattatcaaaatgtatatttaatgttagatttgatgaagttaatatgatgttttagatgttactttttttttacaaacttgattagaaaaatcaaaacaacttgtaatatgaaaatgaatagggtaaattaagtcgattaatttcttgaccatcatttagaaacttcaaaatattaatagtaaccaatttttttgtttcaaaagcttaatatcggcctgtagcctagtggttacaagagcctcagtagcacctaaggtcctgggttcgactccccatgggagcgaattttccaggatttatcggcgttgtgctttcagtggtaggcgacgtacccgtcaacagctaggcgcctgtggtaacttcgtcaatctctccaggatttgccggcccagtccagcctagtctttgaagatgctcataggggtagggtttacttcgtcaatctctccaggatttgccggcccagtccggcccagtctttgaagatgctcataggggtagggtttgcgtgcgtgtgttcatagggcaaaaaaaagagcttaatatataatttgttctcatagaataaaaattctctaggagatatttttactactactgcatactccttccattcaaaattaaaagaatcaatttttttattataaatctacacatagtctatatttagatttgttgttgaaattattttttttttggatgaagggtgtactgttacagatacagcaagattaaaaagtcttgctgtgagtaatactgttgctgaatgtttttcctctgttattattaatttatattattattgtcgatggtaggattagaccacgtatgctaaattgctgggtttagtctccgaacgaaatggtagttatgtgtgcatagttgaaaattggatttggcttcttcaaaaccgaaacacgcttaattttgaccttaatgcaggtaccgtcaatggaaaaaccgcacgtgtcctttgatcacaaacaaaagtcattgttctcctactataaataggactgcatatgcttgtcagatgcgtaaagtatatactatcggtttagctttctaaaatctcattaatactatgatattatcattgttattactttccctgtttcacaatgtaagtcattttagcattttccatattcatcttaatgttttttttagaaatcatcttgatgttaataaatctatataaatatatataatgtgaaaaatactaaaatgactcacattgtgaaacggaggaagtattattttaaccatcaacccaacagtactctctcatcttctggtttactcttcctcataaatttttctccccatattaatga

SEQ ID NO: 3492 - DNA, 12963 bp, Oryza sativa
  unsure (1)..(12963): unsure at all n locations
tgcgacgatatgctaacacctctctaattaaaaaagtttctgtaggtgctgaccttttcaattcagagcaagctcaaaacaaaagactaggttcctgcggtctagccttacattatgcgaacataatcaatcaaattgaaaatattgtaagttgttttgacttttgatgatccatacccatgtttttcatcccttctggatgtaccactttcaccgtctacacgtttgctatatctgatcttaagactcagtgctctcataatctactgtgtctgctggatatgccccacttccatagctcacatgcttgctatatataatcttaatattcagcatttgcataaagttttgattatgttgatgaatcattcatttattcattttccttaagttaactacaacagtcagttgtaatgaatattttatgtttggtcagtataaagtatctattagtttcttagctactgagtactagttccaacaccatagtgcataggttgtattaccaaagtctagatgtttaatccttaatctccactacagctgatacttgattgattatagagtcaaagttctcaaaacaatgtgtaattatgcaggtttctagaccactctctcttcctcctagtgctagggacaatctgtatcatggtctgccagtaacagtgaagtcagctctcagatcgcgattgcaatcagttaatgcccaagaagaggtttgtgttctctgcagccctgtggtggtaaaacggttcatttcctatattctttatgcacatggaagcagtagtagtatttagatatgactagctcaacactaataagatcttgttacatgctagtttccataagcatattttgctcctgaaaaaggtgaaagtaaaatagtccatgtagattgaaatcttaatatgataataattctgtatatatcatgttaacaaagttgaggactttatatttccagttgtctccaaagcccgcaaactgataaatgtatgctgttttcattatgtgcagcgtactgtagctcaaattaaagctgaaatgcagaaaactcttcgctggattctaccgattgctgaaaatacaataaggtgggcggaacttgttgcaaagtcctactgacttctgagcttagggttattttctccctaaaattcattcctttgtgttttcatacttttaccagagcacatcaaggttttggatgggtcggcgaatgggcaaaccttgggttagtatcaaatcgtgatttgcttatcatataccttggaatttccattgataatataacatgagataaaatagtaacaagtattgctccttgcaacataacctaacatactgctattttctagttgcgaaatgaacaagaaatcaggctcccagctcagtatcacccgtgtccagactcttcattacgccgataaggcaaagacggagcaatacatgctcgatctggtggtgctgctccaccatttagttgtccaggtgaagaacagaggctatgggagcaagtcctcaaagcacgaccagtcccgatcccgcaagggaatggatcttcaacctgaatccaagctcaacacatctccagtgaacaacgccacatatccgagcccgttgtcggagtccgaacgcgagacgctggaccacctgagcttcaagaggacgggctacggtaggagcaagagctgcgagcctccacccaatagagggaagaaggcacatcgaacctgggattcatgccggagccatggcagctcgccggcgagggaattcggtaggaactcagcttcagagcttgacaagacgatggacctggatgtaatagatgggttagatagactgacttcttaccacccaacatcccccacattttgttaggtatatgctgcacaaaaataggtattcttttggtgttcctacggttgattgatcgtatatatatcttgtaaatgtgtgtgatctacctatatattctcttacatgtacatatatacatagcttagtagtacagccctgagtttgagtggaaatatagcaagatcacaagtgatgctctatgcctcgttcccatctctccttttgccttacaatttgtgcaatgtaaaggggaagtttcagcacaaaattctacatcatagtgttacttttttttttgaacgactcgcatgagacggtgcgaagttctattgatagagcaggaaaaaattacaagattacaaccgtggagggttgtaaccaggaacaagaaaaagaaaaccatcacccacacaccgacagcgccaacacacaagtccggaagaagactatcaccggaccggccgccgctagaccaacaaaaggaacacagacgagatcgcccccgaggggatgccaaaacgacgtcttcaagaagagaagcgacggaaaaaccgccgccgccgtccgtcggggctcaaaggagccaagactgggcttacgcccagcaagcacccttgaggggtgagacagcacgacaacgccctcaggagggggaacatcgatgtcggtccggtcaaggccgggctaggttttcacccgctgctcaccacctgcgaatccacgactgacgctccgatgctccaccaccgctcaagctctgccgacatgtgggacccctgcaccggcggcccccacccgctagccttcgtgcgtcgaagaccgcgccacacccaccggcagctcctcctcgcaccgaggtcgcctcctccaccgccggccgcgcctctcgcgccaagccggcctcctccaccggacgcgcctctcgcgccagtccggcctccctccatcggccgcgcctctcgcgccaagccggcctccatctccgccgcccgcgccgagccggcctccgctgccatcggctgcgcctctctaagccaagccgatctccgacccctcctatagtgttacttatcaaactcctgtttgggggagcttcttgttagggttctctctaggatcacctaggtttagatctagtcgggtagtactcttgggtggatgaacaacattatagagatgaaacgagagggtttagagaccgaccggttgaggtgttggaggatgaagaggtgccggacatcatcgttgttgtcgcgtgctagacgtgggcggcagcaacggtgtgctcgatggtgatggcggtcgtggcagtggcggtcgtagtcgatgacgagacgtggtacagcggtgagacttcccgtcactggctacgccccctctcgatcggttagggtttgcgggtggagatggcggcggcagcgaacctcgtgtcgtgtcgccccggcctccatccctctttatatggcgcaggatgacgggggcccaccagccattgggctgggcgcccccgatcagggcgcaggtgaaggccaccttgagccgttgggttagggagggagatccatctaacacttctggcagctgcagcttctcatagaatctccagttaccagaagctcccccaaacagtccagctttttacccagattcttagaatatgtagttgtagaatctggaaaatgaactagaagccaaaagctaggttttccaacttcttcagattctcaccagctagcttctcaacaattgtttctcaggatattaagctccaccaaacaggccgaactttgtagcagctggcctcccatcgtttatcttttagattactccaactaaaatttaaattaaacttagttttaagttgattctaagggttttttttaatcttagtttattttttacagtgacttttagatcgataaaaacaaacataaaagttttactcataaactattttcagttgtttcgtataaatcttttttacggcttaataatagctgtagagcaaacaaaagagaaacgatgaagcagacaactgagaagaggtcttggccacaaattgcagccgggtccaacaagtttatccagcaagattatctttctccagtctctcagcaatcttatccagatgcagatatagcagcagcatttctcgcacaagctcattccggcgatgtccatgtccaccacccacctgtacgcggcgagagagacccgaccaccgcctcctccgccgctcgccgtcgccgtcgccgtcgccgtcgacccgcccgccgaattaattaatacggccacagcccacaggtttagtaccccgtttggatttctcctttccaagagaccaatatgccaaagccgtaagatgaatagtgtcctagagttgttctagaggaaaaggataattgacagcaacttttctccaacctggcccttgtcgattgatccccatgctgtatatgatgatgatgatacatctatgtcaattgggttctagaatgaaaatattgtatgtgaatcttgtcggtgcagatgccagccttctagaatctaagatacactaatgggattgtacaaggtcaggcatgtgcatgcatagtgcataaccccagacagctctaaacaagttataatacattaacatgcagcatatcctataggggttctatatttctctaaataagataatagcagtacatctgttctaaaatatacaagtaacttttagctatgaattttttaatggaggtatagctatgcaagcatatataaacaagaaaaatggtccctatgtccaaatagaaaaaaatgtaaaattaatctagaaaaaatgtcatgtctttgtcatcacaagcataactttcaaccgattagtgggcgaaaagcactggatccagataaccacaaagaagaagaaaatcaccctcccccaaaatcattccaaaaacatcaccttctccagcaatgatctgatccaccacagcacattggcctctcatgagatcagctggcctctgcgaaaattactgggaaaaactatgaggctacgatcctgaccgtcgatttcggatcggacggatggatcaccatggataccattcaccgtggaagaaggaaggttggtctccaccatggcgccaaactgtgaaagcaacagccatggagaaggagaaaaggacatgcacatactactctctgactcagcaaacaatcacataatcctctaagaaaataaaaaaaatgatttcttctagagataagatcaagaactcaacgtccaagtggcaccactaaaattcctcaccccctaaactccctataaataattcacctttcttttcttttctgatctcatcgactcgacgacgacgacgcattccgaattattcaagaaattcaagaagtgaacagaggaggaaaggaaacatggcttcgtttgcatccacggcggcgccttggggatgcgtcgccggagctcggcgtggcggcggcggcggcgggcggtgtggggtgcgcgcgtccgcggcgctggcggtggcggcgccggcggcgaggacgcactacgaggtgctcggggtcggggcgggcgcgagcaggggggagatcaaggcggcgtaccggcgtctggcgagggaggtgcacccggacgccggcgccacgggggacgaggacttcatacggctccacgccgcgtacgccacgctcgccgaccccgacgagcgcgcgcggtacgaccgcgccatggccggcccggcggcgtcggcgttccggcgggcgcccgcgtcgtcgttccggcggcggacgtgggagacggaccagtgctggtagggcagaagcacaactccggtgctccctgccctactgcgccgcgctctccgccgccggagctccgtcgggcacggcggtttgccggcgagtgacgtgggattctgtcggccgtcggatccatcatagaaggcccagatcgaagaggaaaagaggaagcggagcgagatatttgcagaggagccctccatttaccatctattgtcaacaaggtcctcccgcgaccatctcggccgttcgatcgacttgtgcggcgcagattgagccaaaaagagaggcgcagtgcggatgttttcctatgggaccctcaagtattcggtattatcaagcatacccccatcccgccgccggcggcggcggcggcggagcaaagtgttgccgcgccggcgagtactgcggtgatcgccggcgtttcgtggggataacaccgctaatgcatggttcttctcctgcaatcctgtgtatatgctgtaacacgaagagaggcaattttagagaactcttttgtgtgctgattagcttgtttatataataggttttagctctgtctctctcaactgtaaatgatcaagaaactattgtttcttctctttccttttcaaatcatcatcgttgagtactaatttgaagaacactcgaatgtgtatctttggtgattcaagttttttaatttttgcagttacctgaataagcatttctagtttttgcatcacttctagtgtcagagacaggatacgctgtccattctgcactctgaataagataaaatatagacatgacctagtttccaaaaaattaaaaaaaacatgacttgaactgaactgctgaagaagaagcagtatacgcctactacttaacagagtgaccagattataaaaagggattttgttcacttgaaatcatctttaggatcaaaagaattgtgtaaagaacacctgcaaattgcgattaactgggaggacaatttttcctgtgaaccataagatgggataaatgcatcccaatacaaccattttgtgatgattctgctagtgctatccacagatgatgtctgttagcacagaacagaaggcgatgcagtctcgggcttgtttgggaggcctacaattcggcccaccaggattcaggccttagcatgaatttctttcatgacaccaaattgaaatctcttgcaccaaatttttcggtttcattcgccagcagtagccgttgccatgccaagatacaggacagcatcacaacgcatcatcgcagcaagtcagaaacagccaatcacatgatgccacgtgcatatagatcgatcgggttcagagtttcttttttaattcagaccatatgcatgctattattctgagttctgaacaatattattctgcagtacaacaaacatgatagtacttgaaatcatcttgaattatataagcccagttgtttatagctactgtatatacactatacagctagctactatacagatataggtgaggtctgatgaacggctcacctcacatatacagatcataagttttttttgacgcaacagatcataagtcaaaacagaatagcattgacatctccatctctgacagagcacaactactgctcgcgtataaacgatcgagtatacaacaatttttgctgctcacctactcgcaactaaacctttcttgtactatctgtttaatgtcttaacctctctgattctctgattgattctgcaacgcatcacacgcatgttgactctttaatttctttatacaacaacttgtaggtttctcggaaggacccatccattcatttgacgaactattttccttagaaaaatgatataaaatagtgaagcccagtagaagctagcttggttatctagctgatcatgacatgaacaatcaaaatttttgcatttgatttgttcactatctcctctctgtctcttctcatccatgggagcacttctccattttctctccctactactcttcctctccttgctccaaggtaagcttagctcaaaaacaaaatcatcaagcatatgcacatttgtaatttaattcagtggacgacgcagctatctgtttttaagcttaattgttcacatgatttgcttgtaatttctctaattcagtgctcgaaatgttgtttgattaagcaagaaatcactgatcaagatgaactcaattgtgatcaatatattaccaggagcacaggctgcgacgttcaccataagcaaccggtgcggctacacggtgtggccgggcatcctctccaacgccggcgtcgcgccgccgtccaccaccggcttcgccctctccccgggccagacgctcgccgtctccgtcgccgccgcctggtccggccgcatctggggccgcacgctctgcggccaggactcctccggcaagttcacctgcgccaccggcgactgcggctcgggcgccgtcgagtgctccggccgcggagccgccccgccggccacgctggcggagttcactctcgccggcggcagcggcggcggcggcggcgatgacttctacgacgtcagcctcgtggacgggtacaacctgccgatgcttgtggcgccgtcgacgccgccgccggcgagcggcggcgcggcgagtaataacgggagcagctgccaggtgacggggtgcgtgatggacctgaacaagtcgtgcccggcggagctgcaggtggtggcggcgtcggcggcgaggagagcggtggcggcgtgcaagagcgcgtgcgaggcgttcgggacggcggagtactgctgcagcggcgcgcacgggtcgccggcgacgtgcgcggcgacggcgtactcgaggttcttcaagggcgcgtgcccgcgagcctacagctacgcgtacgacgacgcgacgtcgacgttcacctgcgcggccgccggcggcggctacgacgtcgtcttctgccccggcatgtccaggtaaattgatcacaaaatatttctgcacgcacgtcttggcatgcatgcatgcgtgctttttttttttcaatttcacattggccctatacaatggcacgtcgtgtacatgtgcatgccatttggcatagcctagacggtccacaccctctatcataatggcactaccactacagacactgacgtgtaagataatagtagggtgagacccatatatcagtgttgtcattggcagtgatattatggtagaggatcctcaccaagcttttgaccagattgacttcggcgtctcgtttctaggcttgtttctttttctttcttttcgattacacggaaatcgtatacgtgcacgcaccacttctatgaatgcgccatctaacacgtacatgagattagaggtgggagacctctcggttctgactctaataactataaaattgatgtctttatccactgataaaaatttgctggctatattttttgtctgcttttctaattttaatcaaagaaacacgctttgggtattagaaaaaaattgttcgtctgtgtcttcggttagttggcattggtaataagttttagtttctgtgactccacaggaactcgaatgacaaatcacaacctgaaaatgatcagatatttaatcaagccttgattaactttttctcgagattacataatttggatgacatagacgcctagggtcgtgacaaaaattttaaaccaaataaggttcaatcgggacattgcgtccatcttaaccgtgttgttcctgattggttttgcagcacaagttgctgatataattttttagttcaatcattttggtgcatcgatcacttgaacgtgacagccagtgctggcatgcaccacgcatcacttgaacaagtttagtatgaacaaaacagagtgtctctctctgtctctgtgggaaagaaaacttgggcgtcgtctgcagaattggctagtttatatatcgtttttggctacaagaatggcgccaaattttttttttctgtttacaattaatttttagaaagtttctgtttacaattatggttaattaatataaaactaagtacatttttatttgctaatgttgcgatgattgcaacctgatgcagcctaaaatctggtggaaatcctgaggcagtaggcttgccacctacctactcaacaatggcgttcactggaaatgcagagagcttgacgatgagcaggaattcgcttgtgatcctcctgatgatcatcagctcagtgatatcgacgctatcttggtgatgtcaattcaaacattgtatttgcgtgatgtatcccattcatgattatagatttagcagcatatttttgccagtttttcttggaggaaaacttcattctttcagagcaggcagcaggttcatccactgctaaaactataatgcacaatgcttcaagattcgcaaatatataaaacatactgtttctgaaaatgcggatccagatcaaactatttctgaaaatgttcacaaatttcaaaaactaaagcaaattacattgtaaaatactgggcgagcttcttcttcttgacctgtacttgtttaccgaagcacgctgacgtccggcgtgcccactttctgatcttcttgtcttcagcaatgtcggaaaaatcacagtgatcatcatcagccaatattgtgtggggttcaatggacataaactccagggcaacggcattctcaaggatgaaatagaccagctcctcctgaggacggtaacaccgaaacccgctcatgtagaccgtcttgaggtgatcatggcggctcaagcgatagtcctcccttgctaccttggtcttgcgaacccgacatttgtacttcttgtaataatacatctgcataattgtaaactctaagcacaaaaacatgaaagctctagctgtttaatctatgcatcacacgaaaaatactacctaacagtatctaacgcatcaaaagccacacatttaccaaaagaatttccatttagttggattcttgtttttatccctctaacaaacaatgaaagcttgatctaattcccactggttctagtgcaatgaaggaaaagaacgacagaaaaacacaattcaattttgtttttcttcaaacattgattattataggtttaaaaaacatttagtatatcatagatagattgaatgcaattgaaaccgcgctaaaaattttaacaggtgtacataatctcaaatgaaaatgagtgaaggcaaaggaattatagcgcacttaatatgactgggtaaaatggatcaatactcacatgccattctagcacctccagtagaggagtgaattccaagtagtgcgccaattgaacaactcccttacaagtattcggagcactagttaagacatatacctcacacttcagatgcctcanatgcataaacatgttgcgtggttgtcgaaactagatttcgacaataataaaagggggtggctatcaagcttggaaagtgtatgggtttggagacaaaggatttatacaggttcaggccttcttataaaagaagtaataccctactcctgtccggggatgaatccgccgagtgtattattgattgtatgattcgggaaaaatcagcatatgcccctagaggcgcccggaccccccttatatcttggaaggagtccggattacaaaagataatctatattcctaacggaatatgaagataaaggtaaaatacagtcgtaaccgactaagtctcagggtgtttccttgatacacaagttaagaaacaaacccgagatacagataagatattctatctacattaggtatcctgtacccagttcgaataccatcgccgtgtagatatgggatacccataatctccacagtagcccccgagtcctttgcagtcgaccatcgtaaccctctcaaagatgataatccgagtacttcaaactcttcaagccaaaatctgccgagtggactgtaaagggcgaaaagataaagaatatggtgcatcgaatagatgcacctaattaggtgtagcccccaactatgtgattagttaacaaactaaacatatagttgaaagacaaaataataacactattgtgcattacatgacaaaagcgtacgcggcgcctaaataggcatgctagccgactgctttttagccacaataaaagaaatccgagtggtttacactctaaaaggttcacgaatgaactcacttgacaggcatccgaataaaaaaactctaaagatacccatcaagtaccataaagattatggtaataaataagtcaaatagcctaggccatgactatttaccatgaaaactggcatataacacgccaaggaaatgactataataaaaacaagtcattcctagttaacccaaacagcttttgtagcctaaaaaagcttgcaaaaacagcataacgcctttctgtcggacacctttttaacttgcattgcaataattccaaagaattatatgaccgcataaaaaggatttcatcagcattgggcaacactgttgtgtgcataatattgccaaagcaaaatatgcctaagtccctaaggaacacaatgggccacgctgttaaaagtattgggctgaagtattgttcaggcctaggcccattagcacctccgatacccttaactgaaaaatccgatatccaagcggcgcttcgtcttccccgccggaactctcgccattttccccactccctgctacagtgcaaagctgcgccggcgaactagggttcacaactccggccaaatccacctccgaaaagtgcatcaaaatccttctcgtgatccaccgcctcaatccctcacctctcccaagccatccctcgaatcaaatcagcacatttgagtgaaaccgatggcggaagagagagaaagcttcgaaggccaatgggcgtcgtccgacgtaacggaggaggatcttaaggagatggtggcgcacggcgttctccctgccaaggagatcatcgggtggcgaccagcgcacggtgaggctttcccgtctccggatactcatgagattgtggtcttctcgcatttcttctacggcggctttgctcttccgacctcaaaatttttccgcgggatcttgaatttctatggaatcagcttgcatcacctaaacccgaattccatagtgcatatcgccaatttcgtccatgcttgtgaagcctttttggggatcaaacctcactttgccctattccgccggatcttcttcctcaagccccaaccaaacaagaacaaaccgtgtgtagtcgggggggcaggattccaactaaggggaactctgagccaaaaat

SEQ ID NO: 3493 - DNA, 1086 bp, Oryza sativa
ttgaaggaagtcgaaggtaacgccagctaacaatctgagcttctctccttataacgcaacagatgctcatcataaatgtgttttgcagatcgcaagatcaaatctcaagctcagtttgacgtcctggttggtaagatcaagaggcttgaaggagcaagggataacgtcgccaatgccgctgcaccaattatccaagctatgttcttcaataatggtggtccgagtgcactcgacgcaaccgaaatatttgacaagctgagtgttgctccggaagtatatttcaagaatatcaagaaagctggaagtatgggagctggcatggccttggcgatgacaaaatccttgtacccgagaattgaagtcgacaccattgatggatttgcagacgggacaagtgaagaagctgcccttgatcttatcagcagtgcgcaaaatgcggctgataaaattgcgagtgatgttgtagagcaatttcgcaatgacgacctccaaccgagtaatgaagactctgatgatgaaaggactgattctgactgagtttgaatgtaatacatggaggctcaatttgtacaatactggtgtatttatgctgtgcttgatgattcttgcgaagtttttgatttcttaaaagtttttgctaagctttgttgagcctaaaacccaaaggagctattaaaaactttcagtcctcgcaaactaagtagaaaaaccaaacaaggcaatgataaaccaagtaagcaaactgaattgataaaaaatcacactccattattatgatgatagcccccgactgacaacttcaaggagaaaacttgatgtttgacagtcaaaatagggaaatacaatgagaaagttaagcgtagaaacgacgaagatgttcaatgttccaagagttgtcgacgagagtgccgtcttcgcgcttgagtcgatatgaacctggccgggtaacttcagagataataaatggcccttcccatagaggagataacttgtgccgatctcgtgtggtttgaattttccgtaaaaccaggtcgccgactagaaaggcacgagatcgaacattgcgattatgataacgtcgcaacc

SEQ ID NO: 3494 - DNA, 1708 bp, Oryza sativa
acgttcccaacatatctcatagtgcaggcatttagcacggcactgtctatcactcccggttgtaaacttaactaggatgggagaatgatcagaacatggcgaagtcagatggaccacctgtgcattggtaaaaatatccctccaactttcatctgccaaagctctatccagccgaacctttacattggctgaaccttgtcgcttattatcatacgtatgaggtacccctgaaaaacccaagtctaccagctgacaagtctgtaacacatctctaaacgcctgcatttgggcattactccttttcctaacagaagtatgctcaaattgccatagagcttcattaaaatcccctacgacaagccacggcagagaggaagtctgtttaagagcatttagatgagcctacatcctgcatcgattttccactcgtggttcaccgtacacaaaagtcacatgccacaaaggaccatccgaggacagacgcacatacgcatcaataaatctttcattaatagaaattatttccatgtggatagattcatgccaaaacaaagcaagacccccgctcatcccctcatagttaacccccacaaaacccttgaggcccaatcttgatcgcagacgtttaactctatcgaccttttgtcttgtctcactgagaaacacgatatgggaacccgcctccttaaccaaggcgcaaaggtcatgaactgacgcagcgttcccgataccgcgacagttccaagccatgcaattcattgctcctgacgggacccgaccatcggtcccgtcagttgaccagcggccccagggctggttgcctcattctccttcccggttactaccccttcagtcttcctggctctcttcagtgcccgtgaagaaacgcccgattcaaacacagatttgctgctttcttccaccatttgttgatattccagcagagcttgcatgactctccctgacttctttgttgcaccctgtgtttgaggttccctcctgtcctctccactgcaatcttcagacaattcatcaccgtaggaagcttgctgacttatagtcttaatagccggtatcatctcacaagaaggtaatgaagttgtatcttccacaccatccaaccgaatctcaggtccacgtttatggcttgctccctctcttcctgggagagaaaccttctgtacttctgtctcccccaccttcattttctctgcatagcccgccaactgttcatcaatctgtgtgtccccttccttctttgcagactcaaaaccatcatgagcgtccactcttggtggaaccaagtcctccccctgatctccttgtttctgtcgtgaggacaatgaacttgcactccctgcccccctgaagaacaggttacgcaccacccctgaagatgatggtactttcaccttactcaccttcctctcaaagggttttagaggggagcatcttaactctgccgaaaacttgaagggctggtcattgttgactcctttcctattgcactccttgtcagagtgtcccagatatccacatatgaaacaaaaatgcggcaccctttcataccaaagatcaaaacgctttgtgacctctttgccctgtgctaacatctttatagccaacttcgactttaacggacgcttgacagataagtccacacgaatcctaaagaaatcatgtttgttccgcccatcgtcacccacat

SEQ ID NO: 3495 - DNA, 2360 bp, Oryza sativa
gggatcgaaatacgaaattttttcatagccaggcagtatggagagcaaagaagaataaaatctccaaactacgggatgcaaatggaactgttcacagttcgacaatgaagttggagagcatggcaactgaatattttcaggatgtgtacactgctgatccaaatcttaatcctgaaaccgttactcgtcttatccaggaaaaggttacggatatcatgaatgagaagctttgtgaggattttacggaggatgaaatttctcaggcaattttccaaattgggcccctgaaatcacctggtccagatggctttccagccaggttctatcagcgcaactggggcacaattaaagctgatataatcggtgcagttcgccgtttcttccaaactggactgatgcctgaaggggtcaatgatacggccattgttcttatccctaagaaggaacaaccagtagatttgcgagactttcggccgataagcttatgtaatgttgtctacaaagtggtatccaaatgcctggttaacagattgagaccgatcctagatgatcttgtttctgtggaacaaagtgcctttgtgcagggaagaatgataactgacaacgctctcttagcctttgaatgtttccatgctatgcaaaagaacaagaaggcaaaccacgcagctgtgcatataaactggatctatcaaaagcctacgacagggtggattggcgtttcttggagatggcaatgaataagttgggttttgctcgccgatgggttaactggattatgaagtgtgttacctcggtgagatacatggtaaaattcaatggaaccctacttcaatcattcgctccaactagaggtttaaggcaaggagatcctctctcgcccttcctatttttgttcgtggcagatggactgtcattgctgctgaaggaaaaggtggcccagaattctttgaccccttttaaagtctgcagagctgcccctggaatttcccacttactctttgctgatgataccctcttattctttaaagcacaccaaagagaggcggaagtggtaaaagaagtgctctcatcctatgccatgggcactggacaattaattaacccagccaaatgttctatcctcatgggaggagcctcgaccccggctgtcagtgaggctatatcagaaattttacaagtggaaagagacaggtttgaagatagatatctgggatttcctaccccggagggacggatgcacaaaggacgttttcagagtctgcaagctaagatttggaaaagagtgatccaatggggtgagaaccatctctccacgggtggaaaagaagtgttgatcaaggctgtgattcaagccatcccagtatatgtgatggggatttttaaattacctgaatctgttattgatgatctaacgaaactaacaaataacttttggtgggattccatgaacggccagagaaaaatgcattggaaagcctgggattcgttaacgaaaccaaaaagcttgggtggccttggtttcagagactatcggcttttcaaccaggcacttctggcccggcaagcatggaggttgataacatacccagatagcctgtgtgctagagttcttaaagcaaaatatttcccccatggttccctgattgacacttcctttgggagtaactcgtccccagcatggagaagcattgagtatggcctagatttgttaaaaaagggcattatttggagagtgggtaatggaaattcaattcggatctggcgggatccatggctgccaagagatcactcaagaagaccaatcactgggaaagcaaactgcagactaaagtgggtgtctgacctaattacagaagatggatcctgggatgtgccgaaaatccatcagtatttccataatttggatgcagaggttatactgaacatctgcatttcttcaagatcggaggaagacttcattgcctggcaccctaataagaacggtatgttctcagttcgaagcgcttacagattggcagctcagttagtgaatatagaagaaagttctagctctgggacaaataatattaacaaagcatgggagatgatttggaaatgcaaggttcctcaaaaggtcaaaatctttgcttggagggtggcctccaactgcctggcgaccatggtaaataaaaagaagagaaaattggaacaatctgatatgtgccaaatctgcgacagggaaaatgaagacgatgctcatgctctctgcaggtgcattcaagctagccagctttggtcatgtatgcataaatcgggaagtgtttcagtagatataaaggcctctgttttaggaaggttttggctgtttgattgccttgaaa

SEQ ID NO: 3496 - DNA, 614 bp, Oryza sativa
tgcccgtgcatcacgttcggccggagcgcggaatcgtgtcgaggggggagaggacgtgctgcgcggcgggcgtgatgtgcgtgctgctcggcttcttcgcccactgccactgcctctactcctgctgctaccgcggcaagatgcgcgacagcttccacctccccgaggacccatgctgcgactgctgcgtccacgccctctgcctgcagtgcgcgctgtgccaggagtacaggcacctcaagagcctcggctacaaaccctcgcttggctggctcggaaacaaccagcacgtcccgcccaagcacaacccgccgatgcgacgctaatagtacgggtggtctacttaagatgagtgcctcgtcgagtctgttcttcagcccatttcttatatatctgttgtatttgcttcaaattagctgccggccggccacatatgtttaataaacttggttttgaatgactgttttgaagtaagtgaacttaaaatatgccggccccatcgacttcctgagctcctgcctcctgatgagctcccgtcctcgccgtcgccttcctgagccctcgccgcggtcgccaaattgggcttctagtctccgctctattcgtatatacac

SEQ ID NO: 3497 - DNA, 5019 bp, Oryza sativa
accccctcggggggactaagaggagggcgaacgcatcaccctcgggcccgacgtccctcgggggtaccaggccacgtgtgcgattgtgtctgcctcaaacctctagtcatgatactcctgatcccatgtcaccgacactagtatttgctaaactgattgaaaggttctttagcggttgacaaggtattctgaggccttcttgcaggtatatgaacctcaactctgttgttctgtaacaaaatcaaatcattcaattgcgactgtagtttatgatagagtatctgcagagttttccactgatactgaacaatggcactgcataaattgtttccttattgttctttcgaaagttcgcaagttatttcctcgttaatttcagtattttgatatttgaatggctgagttatcagattagtatctgatccgatgtgttcaatttgcattgttgtatttaagcccaaatagaccccctcgctgctggagcaaacgactgccggcaggaagatgtggcaatatctggcttgctagatggaactggggagtacactttggtttacgaggattatgaaggtgacagggtgcttgttggagatgtgccgttgggggtgtgttttccgttctaccttttattttcagagtagtagacaaagttactacatttataggatactgattacgcaaatagcaatgcttaaaaatgatatgcagtctattgccttaaattttttttcagttttattgattatcaaactgggaaaaaagaattctaccatcaaactggaccatgcctcctatctgatagtctgatactccaattcatgtaggatgtttgtttctttagttaagagactgagagtactgaagacatctgacctatcttcatctgtcagtacctttttccaccttccttctgttacatcaaactcacggtaatctccgcattattctgaaatttgatcatgccatgtaatccatgcagcttataacttctggacggaaaagaacagcagctgagtgttgaccttctttttttgatctgctttgacactttcagtgacgctgttcagaagaatatgatcttctgagcttgtatcatcgtctctttctctcaatgtcttgctgtgctgagcttggaatagagtcctcgatcctgatgagattagggcaaaaggagctccatcgaagagacgaaggccatgccgtgagacattgtacacaaataaccaataaggttacttggctcacaaactttgtatcttttgtattaatggcatagttttttttattggattaatggcagcaatagctattatatgtagtgtgcaaacaggaggatttttaaccttccccaatatttttttttcggatcagctctgaaaatacatataggccacttgagcactgtatcatgtctcttatcaagccatgctatgatttacagaagtttgaagtgacttttagaagcactgtatgaaaagggggaaatgttgcactgcgcgggtgagcaagcagtgacggtgcgtgggcaagcacacggcacactacactggacgggctagcgtcgcaggcgcacggggcaggcagaggcagctcaagatggtgatatcaggccaaggagcagtggcgaatttaggaggaaatttgctacaaacacctcttcccatatacatatagaaaaaaaaggtaaaatttgctatggaacactcaaaaatttttttgtggtttttgctagtaaaaatctcgaaaacataaatttgtccaataaccttttaaaaatatggtaatttaccgtatgacactaaggtcattaaaatattattttcattagagctagagagagaaacaaactaaaattactttgctgccatgtcttctttctccatccattcctccattggtattgctgaaatcggagaatataaagcgctgcggactggggcgatggaggcgtgggccacgtcactctttttttttcgcccgccggattaggtatggatgtctgagattgaggcgcggagtgaaaatttttcaaaagagtcatccagttttcgtataattcgatatagatccctcatgaacagttccttgctccctgttattttacatgtaggccctttataaagccaaatatttcatgcaatggcaagataaaacgtgaattaggaccgcgctctaaaatgtggaagacgaggggctttttagcaaaatgacacccactaacccattcacactccaaaccctagccgccgctcacatctcctcctatctctcgtatcacgctctccctctcgtgccgccaccgcctccaccgttgccgagcgcctttccctcgcggcatgccgtcgccgtcgccgagcgcaccacctccgcctccgcctcgcgtcgctgctgtcgaccgccgacgtctggatccggcctccatgtgctcgggggacgtggatctgactgcccacgtcccctcctccctctcgcctcacagtctcactcttcctctggccaccccagtccagatcccacttcgccgccgcactccctgctcctgccgccgccgctcctggtgctgcagatcgagggacgactcaagacggcgagcttcatggtggcacacatgggcggcggcttgcgcagaccacatccatgacggcaagggctactggtggcggcaaacgagctctagatctggcagtggcggagtattccttgtggcggcggcgactacatattcccgacggtgacggcgtctttcggcgacaacgggtagccagagagaggcgcggcagcggttggccggccggtgtgaccggcgacggaggtggctgatgaggcgcggccagggacggtggaggtcggcggcgacggaggcggccgcggtgcgaggaggcttggccgccggaggcggaggccggcgttgtgctagtagaggctagcgcaggcgaggttggcgaggcgtgtgccggtgcggcacgacgaggctggccggcgtggcgcgaggaggtgcggccgacagaggaggaggccggtctactgggcgaaagcccagcctcggttctctttgagacctcgacagacggctgcggcggtgctttcgtcgtttctcttcttgtagacgacgtctagtcatcccccttaacgaaacctccgaagcattcggtgcaagctcgctctagattcttaatctcttgtgtcggcgtcctagcttctgcaaggtggccacgtcggagggcctagggggtgagcggttccattattctctctcaccctctctccctcaattccaaagatgtggatagagcgggtttttgtgtaggctgtaagggtcgggttttgggcgacctcggttatagttctattgttggcctagcgatgctacccttctcttaggtctatgtgttggtgctatcggtatgtgggtggtagtatattttttttgttttcctggttaggatctctcagggctataatcttgtaattttttttctgctatatcaatatgaacttcaagtcattaaaaaaaagaagagaaaggagaggaacttaaagtggacttattccttgcccggttgagaagtagtagtagttatttagcccatttaaacagaaagcacgtaaatggactggagtagggagtgaagggacaattttttttggcaacaattaattatttactattcgctgtatttgatatgtgggccggtccagtggcaaataattttagcacgactgttaagagtggaaaatagtaaattattgcgggagggaaacctgtcaggtctactgatgataacttgactcaggagaggctggacatcggcaagcaggagctggggaacatcgacaacgagctagaaggtgtacaggatggaggcgtactgaaggaaggcgctggctcacaaggaaagcgtgttcgtattgctaatagaaagtatgtgggctctgaatgggccgtgtaatgcgtgagttgtaatgggcttgcccagctgagaggggttggtgaggagagagagaaaacggtatatgagacactgttgcgtgttcgaacggcatcgaactggaacttggaggcgatggcggcggaagctccgatcctgttggatcgagagagttactaaagttccagataatttcgtgtgtgttcttgattggtgcttgctgtgagttagggttctaacaatctggtatcagagctcgtttccgatccactaatctcttgattcggccgtagaattactgattggggattggattccgcccttgggtggaaaccgcgaaaaggcaacttgcctcaaccgggttggctgaatttggagcggattgggagctgtgatcctggagaaaccacgctatatcaccaagcaggcagcgcagattatggcgcaggaagggaaattggatctgctgctcaagacaatggaggagaatgagaagaagagggcggaagcggaggagcggagtcggctggatctgaaggacctcaaggcggcggtagaagcaagacttccacaagtggagaagcaggtggtggatctccatgcatctctgggtaacctcagtgcgaaggtggagcagatggagagttctctgttgaagcagagccgcggagacaaggggattggagaagtgaaggaggatccgtttactacatcaccctcaccgtctccttcattgattcatggtaagagagacctaacactcaacaccagttcgccttttgcgtttgagaattcgactgctcagtttgataacatgatgggaccgggaatggtggctggaagtattcctagtatgacttgtccgcagtttagtggggagaatccacagatgtggcgtgctaactgtgaagtttattttgatgtgtatggaattcctcctgggcagtgggtgaaggttgcgacactgaattttgtgggaaatgcagcatactggttgcaatttgttagaaatcaattgattggggtgactgggttcgatctatgtgatagggtgtgtgctctatttaccaaagataggcaggagaccctg

SEQ ID NO: 3498 - DNA, 17281 bp, Oryza sativa
  unsure (1)..(17281): unsure at all n locations
aaggtcaaaggggttgtgctttacttgtggagaaaaatggagcaaggatcataaatgttctacttctgtgcaattgcatgtggttcaggagttagtgtcacttctacaagatgaaagtaacagcagtgaacaggtggaagtacaggatgaaaaggaggatttaatagccatggccatctcacagcatgctgctagtggaactgaagctgctcattccattaggctgagaggatggattcaagaaactgagttgttaatgttgattgactctggcagtaccaactcttttattgatgaacaagtggcaatgaaattgaaaggagtggaggtattgaaacagcctctgaaggtgcagatagctgatggaggacagctattatgttctaaaattattccaggatgcacttggtacatgcagggccaaagttttaagaatgatttcaaattaattccattgggaagttatgatatcatcttgggcatggactggcttgagcaacatagtcctatgcaagtggattgggttgagaagtggatagaatttcaatatcagaatagagctgtgaggttgcagggtatctctagcagtaatccttcttgttctttgatttctgtaccacagttggtggggatggcaaagtctggtgctattatgtacatgataaaaattgatgaggttgtgaacctttggaaaaaaaaggggggggaanaaccagaaatttcccagcttccntatccagcaagtaattcaacagtttcaggaagtttttgctgaacctaagggtctgctgcccagaaggaattgtgaccataagattccattggttgaaggggcacaaccagtgaatttgagaccttataggtacaatccagaattgaaaaatgaaattgaaaagcaagtttctgaaatgcttgattcaggggtaatacaacctagccaaagtgcttggtcttcacctgctctcctagtcagaaagaaggatgggacatggagactgtgtgtagactatagacatttaaatgcattgaccatcaagagtaagtaccctgtacccatcatagaagagcttctggatgaactgtccggctccaagtggttctccaaactagatctgagggcaggatatcactagattagaatgtcacctggggaggaacataagactgcctttcaaacccattatggacactttgaatataaggtcatgtcctttggtttaacaggagcaccagctacatttcaagctgccatgaacaagaccctggctccagtgttgagaaggtgtgcactagtattctttgatgacatacttatatacagtccagatttaacttctcatattaatcatgtcacacaagttttacaactgcttaaacaagatcattggcaagttaaactctcaaagtgttctttcgcacaacagcaagtgtcttatttgagacatgtgattggtgttcatggtgtagccactgaaccgaagaagatacaagatgtgattaattgggctgttccaactactgtcaagaaacttaggggttttcttggtttagctgggtactatagaaaatttgtgaagaattttggtgtcttgtgcaaacctttaactcagttattaaggaagggagttccatacaaatggactgaagaaactcagcaggccttccaacagataaaacaggccttggtaacagcaccagttctggctctaccagatttttctaaaccctttactgttgaaacagatgctagtgactatggcattggagcagtactttccgaagataatcatcctatcgcttacttaagcaaggctttgggtccacgctctagaggcttatcaacttatgagaaagaatgcatgacagtgttactagctgtggaaagatggagaccttatttgcagcaacaggaattcatcatcctgactgaccaccacagtcttgttcatttgtctgaccaaaggcttcatacaccctggcagcaaagagcatttaccaagttactaagcctacggtataagatttcttatagaaagggtagcactaattcagctgcagatgcactgtctagaaaggaaaacttattggaggatcaggtgatggctatatcagttggggtgccactatggttgcaggaagtaacagaaggctatgataaagatgcacatgcctctcagttagtcactgaattgtctcttcacccccaagccaaaaaaaactacttttttcagaatggtctaataaggtacaagggaagggtgtgggtaggagacaacccttcttacagcacaaactgatctctgaaatgcatgataatcccataggtggccattctgggtttcctgtaacttacagaaaattgaaacgtttgttcgcttggaaaggaatgaagaaacaagtgcaacatcaacttaaacaatgccaagtatgtctgcaggctaagccagagagactgaagtatccagggctgttgcagccgttaccagtgcctgaaggggcttggcaggtgttatctcttgattttattaaaggtttaccaaagtcagagagattcaattgcattcttgtggtggttgacaaattttctaagtttgctcatttcattcctttagcacaccctttcactacggcaacagtagcataagctttcatgagaaatgtatatcgtttacatggcatgccaaaggtaatcatctctgatcgtgacagaattttcactagtcagttctgggagtgtttattcactatggcgggtatcaagttacatatgagttcttcatatcacccgcaatctgatggacaaaccgaaagggttaatcaatgcttggaaattttcttacgttgttttattcatgccactcctcgcaaatgggctgcatggctgtacttggcagagttttggtactattcgtcttatcagtcgactgtgcacaaaacaccctttgaagtggtctatggttatcaacctagtcattttggtataagtatggaagattgtgtagttccggatctagctgaatggctctctgacagaaaattcatgcaccatttgattcaacaacatctgcatcgtgctcagcaacagatgaaattctatgctgacaaaaaccgcagttttagggagtttcagttacaaaactgggtttatctcaaagtgcagccttatgtgaaatcctctgttgccaaacgtgctaatcacaagctctcgttcagatattatggtccctttcaaattttgcaaaaagtgggtagtgtggcttataaattggatttgcctcctgattgtttgatccatccagtggtgcatgtatcgcagctccgagctgctactggattcagcccgccagttcagcaagctttgccatctcctttggacaagttgcaagttcctgaatagttcctggatcactgtattgccaagaaaggtaacactgttatttctcagctattgaccaagtggacaggtggtgcgattgaggatgccacttgggaagatgaggaggacttgcagactcgttttcctcgtgcaccggcttgggggcgagccggttttcaaggaagggagattgtcaggtctactgatgataacctgactcaggagaggctggacatcggcaagcaggagctagggaacatcgacaacgagctggaaggtgtacaggatggaggcgcactgaaggaaggcgttggctcacaaggaaagcgtgttcgtattgctaatagaaagtatgtgggctctgaatgggccgtgtaatgcgtgagttgtaatgggcttgcccagctgagaggggttggtgaggagagagagaaaacggtatatgagacactgttgcgtgttcgaacggcatcgaactggaacttggaggcgatggcggcggaggctccgatcctgttggatcgagagagttactaaagttccagataatttcgtgtgtgatcttgattggtgcttgctgtgagttagggttctaacaaaaccctagcctagccttgcaaggataaggagcagacgtgaagtcgtgaactcgtcgtgccttggcggcggcggcggcggcggctgaggcctcctccacctccttcctagacgagccttctccttcctcctctccaaattgcaccttcgtcttcctcctctactagaaagaagcagcgccttgtcctccgatcctcaacgcccgccgccgcttcaaaccaccaccatcactccggatgccaccgcccctccctgatcgctggggtatctctgggcaaggagctcgctcggcgaagttctcactgctccggtctctctatcggagcctcgtcgcggtcacatcctgatttttgtttcaggatttataaattatttaataaattattatttgaatttatattaaatgttcattaatttacaagtgaagttaaaggtgggaaataaaacttcctaaatataaagcatggatggatttattttttattaaattctccatggttaattatactctcttgaatattctcggatttttcggagctcaattcctaatttttaatcatacaaagagcatttcagtaattacccacatattaaattaatcattaaatggtctaattataattttgttaagtactttgagtgtccaagtattttcaggatttttcttgaaattatttgagcattggaagtatttttaacaattcaaagatcatttaagtgattattttaattggaaaaggttctaaaagtcctcttttggctttgggccgaaaatcggcccaaaaccttccctctctctcctcttcggcccagtcagcccgcagccgcccgcgcgcgcgctcggccactgacaggtgggtcccacctgtcaggcctgtcgtcgtcctcctcgcgccgtcgcccggccggaaccctagccgagctgcgccgccgtctccttccaaattcgctcgcgcctttccttctccggtgaaatctatagaggggaaatgatcttcaggatctcctctaccttttctcttttggaatcatgggctaaaatcgtttggaaatccgtggattcgagttcgattcggatcgatctctctcctccgaaccctagactttccttcgcgttgccggtcgccgtgggccttcgccgccgcctccttgcccctataaaaggacccccaagcccgccgctacccgctgccaccctcgctttcgcctctcgtcgccggtagagccctagcaccgtgtagcctcgcgccgccgtcgtcgccgccgctccagccgtgcgtcgccgttgctccagtcgtcgccgtcgttcgggaaggccgccgtcgtggtcgccgtcgcgtcgccgtcctcgtccgcccctccatcgttgctgtagaccgccagagcaccgccgtcgtcgtcaagccgatcttctccgccgccttttcctcgacgccgtctccgtccgttgatcttccgccgccgttttggtcaccggtgagttcgccgcgtcgctctctacgtgctggtgccctccgtttgtgccgtcgcgccgtcgttcgccgacgagcttgcgcgcccgagccgccgccggtggtgacgtcaccgctgacgttatcgtcgtcgtctctcgtggtccggccgtggaccggtcgatctcggctgtccgttttggatggaaagatctcggccgttcgtttctgtgagccgccaccgtgcacccggtccactgcaaaccctagccgctgacgcaataaacccctttttccttttcaaaaaaaattcattattgcgtcataattcaattaaaacccatataattgatttaatccgatttaatctttgaaaattcataactaattcatcttagctcggatttagttggttcaagtctctaaatttttctaaaattgagatctacatgttaaaaatatccacatgtacttttcatgcttatttatgtgctgttttggtgtttttgctcttttctgtttagattccgacgtttcaggagagtccgttttcgcaggagaagaatttgagtagttccaaggccagcaaggcaagtcacacagatcctaaacacaatcctttgagcatgttgatcctatatttaaattctctatttatttcaactgtgcatttattttcgaatgtcactgggtggtgtgaatctattcctttgttatggcatgtttgcattgattactttattccttgataccttgggttattataacttgactagttgagctttatatattggttcagctagatattagatatgattgcttagccatgcttagaaacattaacacactattgggataacttatgactcactattatttaatgatggcttaatgatagttcacgatggtcaatcgtgattggttaattaattacttgccaactaaaacttgataatggtgggttgtgagcacatggttttgagagtcgtgctcatgacaattaaggaccggttcacgagtttcggttgtgaaacattaaccgtgccaaccacaagccagcgtgggcaacggctttaccttttgtatagcatggttcattgcggagcaccagactgagaagtggcggagataagcccacgggggtcgctggggagtccatgccttgtttataagggggtgattatgatccaggaaaggtgcgctgtggtggattgtgttgtgcgaggggtactgtcacagctcctttccgaggtaccatggtggtattgaggcacatggtgacatgttgtggggctgtgtcttgtgggtacagtggtacacctctggccagagtaaaactattcgaatagccgtgcccgcggttaagggcgggtctaacaatgtctttcgtgattagtctcacacttctcatcataataaaagatgctataactggtaataatttgattagctcctggtttggaatggtatattcctggtttggagatagaactgtgcagccgggatggttgttcaaaatggttgggcctatgcaacagggtatgttgtatagcgttggattaatattgtttatttattacttaactgttttattaaattctgaaatgtttattaaatgttgtttatgcaaatgaaaccctactatgccatcctttgttatcctgtgcacttgcatatttgctgcgtggcttgctgagtatgtcatatactcaccttgcaatcattcatcagaggaggagttctacagtgatgctgatggtgtggaggattaggtgtagccctggtcaagctgcctgtggagtggagtcgtctgtgccgtttatcttattttttccgctgcttagatttttattgattgagaggaactatctacctctgtaatgacattttattcgcttattaattagagtaataattgtactctattaccaatttgttattgtgtgcctcggctgatttctggacaagggttcacacacatgtaagtgtttggaattttggatagaaattccgggcgtgacagtcgcctacggagacaagtaaagctccaactcagtcaatgattgttgattttgattcatggtgagggattaaatatatccatgcgttttgctgtggggaaaaagcttggattttgggggcacttcaggcagatgcgcggttccatgtttaatttcacaagtatttgcagggtcccagctccacttgtaagtgtttttggtgttcatgctaggtttgggcttccttggtaaatctgctgaatacctcgcgagggacaaagacaggatctgtccagttctttttttttacttgtgcaagacagaagattatgtaatccctattacaaaacggaaaggattccaaatacacaaactacttctgcgtaataacaatatttatccagtcaaggttcggagtcctgtgtcaaagtcggtgttggtacatatgataattactattatatctgtcttctgtatagactagatccgtgatgttctgttttgtggttgtggcctcctttgtagcagcagcttatggagaacacgatggcggccaagcggagctggatggagcaccatcgtgtgctcagcgacgactcctcctttcacatggaagacctcccggaggtaaaaaaaaaaaaaaaaaactacttttccttgatctttcgtcacctcctaatttggtttggttgggagccggacagcactgggctgttgttggcctgcagctgccttctcactcccactcactgaatgattgatttctggcgagggattgattctccgttccttttgctgaggggaaaatcttggattttaggggctgttctagccttctgctgaggcctcttagttttcctgttttgttctggggcaggtggatttctgttttctggggattattgggggaaatattgttccttgtttatttcagaagtatttgcaggggtaatacgacattttttggggagtaaaataatgctttatatactctcagaaatatactgcctaaagtttttgtggacagaaccagtccaaatttttaagtagagattacttgatccctattacagaggtaaatggttccaattgaacgaattacacaagaatatagtatcccatcgaggtttggagttcaatattggtgcaaggattggttatataatgtgtcttcctgctgcagctgtgtatggactactcatgatttgttttgttttgtcacatgccttcttgcagcagcagccgcaacttatggagaacgtggcggtggccaagcggagcaggctggagcaacaccgcacgctcagtgacaactccttccgtgtggaggatctccctgaggtaatattctttttttttcctcacctgtcctcacctcccaatttggttgggttggggaatcatgatttcatctttaggagtaaaatgattattctttgatgctttctttgtcaaccccttactttttgaacctgcacacagaatgatcaagcgtgttttgatcttatatttgattttttgctttacttttctcctctcttatctgtggctatgtatgagggatggagtataaattcagttccaccatggaggtaacaatcccacttacacgcacatcagtagtacttttaaatgcctccatctgtaacccgctcctttggagactcttctgttgcaatttgtgcacacagtacagggattttcaagtttgaaaaagatggatcattcactaggaccttccaagcaagatgctggattttttcctcaataaaatatcatgtagttttatctcctcaccttttctttcttccctgcataattttatcaaaatccccaattttctcctggtctttttctactaagggcttataagccaaaaaggctaagcctaaacaaatgatgagttttttcgttgggattttaaaagccgtaagccacccttacattgttaagttaaaagctaagtacgagtagttcttttttggcttatttgaagtggaggtaggactccaccattgaacttgaggcttaaaagccaccagctgtaagccaaaaagaatcagcttaaaatcctaagccaaaacaaagatggcctaaacattagctatctctgcatggctttgcgcttgacatcagcatttgcacccatgcccttcaattcttttattgaaattcctgaccctactcttcctattttgccatatgtaatcttaatttcttatattgttttctacactcaaaattagaggcgggtcataaattgtaagtaaataatcatctagcattctctgctttgcatgccttaaatatctagcactccttaatgttgtatgtggcataacatatactccctccgtttcatattataagactttctagcattgcccatattaacatatatgaatgtgggcaatgctagaaagtcttataatatgaaacagagggagcagttaaaatgtgcttggcttcaaatcctcatcattttacctattgggatgctgcgaattccttaacaaggttgttatcttttgttctcctatattttagaatgactttactatcagaagccaacatttatgcacaccacattgttctagatagaaccttgcaaacctgatttcaaatattatttaggatgcatcagttataaacctactgcgatggaccacaattcatcaaggggtaagaaccgccaagaggatagcggtctgtgtcagctgcttaaaatggaaggagacgtagggtggggcgacgattgatggactgggaatgggacttatccttcattgcttgtgcactaattgatgcacactatccttttatagccatatgtggtttaggggtggatgtcaagttggctcggcttggttcatctcgtctcgtaggcaagctcgagccagcttgtttagctcgtgagccatgggcaagagataaaggcactcaaggtaggagatgatctcgagttcatcgatacttggaccacgggggaggagcatggaggagatgagctcgagttcggcggcacttggaccacgggggaggagcttgaaggagatgagcttgagctcgctagttgaggagacaagctcgagctcataggcacttagaacacggggaggcgttgctgctcactggtgggtagaggcgctagggtcgggtggcggtgcaggcttgaggcggcattgggagtgggcgcttgcagcatctggtagtggcacttggtcgagtggcagtgtgggcaggtggcgagtggcgatgtcggacgcttggggttgtcatatgggtgatgctgggccgagtggtggcaccgggtgctggggacaagcggctgtggttgcctttgcctgtgaggatatggtttggtgtggtgtgatggctttggtctgggctatcacgtggtatatgtggtgtggtgggctggtccctagtggattgatgggctactgttggtggtgggccatggtttgatgggttggatgtaacctgtatgctccacgcctccagctcgtttggctcgcgagctagctcgagctggctcattatctttaacgagttaaaatgccagcttggcacgttatgaaaatgcaacgagccaagtcgagccgagcaagctaacgagccatgagctttttcgtccacccataactaggttattagcagctagggcataagatcaacaaatagatcaagtagtacttactccaatcacaaatatgaacttaatctaggctcaagtcttttttttaaaaaaactttgactagctatgtttataaatataaaaggtgtccagccaatagtgcaatacatgagttgctttggagaatgaattttgctctgtatcttttctttgcttgcctgagttgcttcctcaggaccttcgatctagaaatataatcacccaattgtttgcccttttcacaaaacattatgcattcaatgtttgttactccttcaacctctttttagctttttctctccatttagttgcccatagcgtgagtttcctcctaattgtgttttagatccctgggtcaggttctgtcatgcatttgatttccaactttctagaaatagaatcacctcattgttttgattttcttcattgtattcagtgttccatcctagctaaatttggtgttagtagatgcattatttttagtatttttggttcttctgtactatctcttatctatttcgtcatcggatttgaatgtgctaggtgactgggaaaagaagaggaaaaacccattgaagtacttttctcattgtgtcctgactcaacctattgagtacttaatgattatcacgcctgtctgtttctttgatcaaaactcaaccctcatcatcctcttgttgcaggaaattcaatctcttctattatctctgctgtcactgaaagaggctgctagtacaagcatcgtgtcgagaaactggagaaaactttggacacggtatcctaatctatgctttgatggcagcaaggacgggcctgctgatatggatagtgtgaaaatagaaagaatgaagttcattgatacagtaaattctattattcagcaacacagtggaatagggctcaataaattcagtatcaggtgcaaccttctgaaggacgactcagacattcttgataggtggattcgctttgccactgcatcaaaggctaagattatagatatgaacctgtgcacaaatagaaataataaaggaccaaccaaacatttgtatgacttccctcttgaggctttcggtgatcaagatatcccttttatccagtgcttgtttctcaacaatgtttctataaagccacactcggatattggctttacgaaactcaggagccttcatttgcactgtgttcaaataattggagatctttcaggcttgctatttaattgctccagtcttgaggacttggaggtctttgcgtgcttgggtgtgactgctctgaatattccacaccaactcaataaacttaggcatttgctaatttgtaatatgcgtatccagatgctggagtttcatgttcctggtctttctcattttgaatacaaaggtactatgattcctataatgcttcatggttgctcaaaattacagaaggcaaccctgaattttcaccagacatggcttgaagaagataataataaagtattgggccatgtattccatggaattcccagtgtttcggcagttgaggtgctcaatttacttgttgatatttgcacaaagcaatcggtctggtcctcacaggtacatcctaataattatctttgctcacttagctgttcaaatggagatgcgcttcctgatttgttctggtaatgtttcaggtgcatacgttgacagcaagaccaacaatcatgtttatgaatttgaagcatctgacttatgagatacttatttttactaaagatccaaacagccacagtggagttcttcagctggctcagtatttagcttttgcaccgcagctggagactctagaattgcatgtgagtgctctcctgcctttcttgtttttgcttatgcttctttctttgttggctatgtatagattgcaatagttagtagttacatatatttttgtttcgaaaaacagatgttgtatcattcgactcactgccgctgctggcatgagggtgcgggagtctcctacggacatatgccccatcatcacctcaagatggtctacatgagtgggttcaggtgctaccgggctcaggtcgagctgctgtttgccattcttgaaatgggtgatgagcttgagcatgtgaccattgatccaatgacgagagtaccgtatagccctgatttgatgaatttaggcatacctgaggacgagatatgtcaatgggcgaaccgtacctcacaacggtttggtaaagcaatctctgttgtaaaacctccctaggtggtgttggtagtcctgtgcatatacgacttattaccacctagataagtgtttgttcagattcagtactgaaattgctgacacaggggtttctgttttgtttccatgagtaaattgttttttattttattgtttgacaataaaaggcttggacttgtttcttaattttgtgacaactttcatatgtcagttttatttacgagtgaagtacacaattgattcttagactgcgagtgtcatctagctctctaacctctcaagatatactttttgtcgtataggtttaaaaggggttcaaccgacttctgtgtattgatctacaatgtcaatcacataaaaaaacaaaattagaaaaaaaaagcatcatcttctcttattatgttaaggtgagaaaatattaaataattgcatatttaacacaagtttgaaccggtattatggatctgccactataaaaagtgtaattggatatttaccataaaaaatggttggaatccaatatattgccatgggactgacagtttagatgaacactgttacaagattgacttctatgaaaatcaggacaagaataccccttcccaagaaattgaaagattaacacatcatatgccaaaactcacgcatcacgagcttagatggtgtttggatccagggacttaattttagtctctgtatttagacactaatttagagtattaaatatagattacttacgaaactaattacataaatgaaagctaatttgcaagacaaattttttaaacataattaatccataattagagaatgtttactgtagtatcacataggctaataatgaattaattaggctcaatagattcgtctcacgaattagttcaagattatggatgggttttattaatagtctacgtttaatatttataattagtgtccaaacatccgatgtgatagggacttaaaagttttagtcccatctaaacaggtgcggtggtggtggcgagtgcacggagatgttgcaaacttgcagaggctctgaatattttgtggcacgctctagtccattggtagtccaaaaggaaagtaatcgtgtgttatatcagattataacatgggtgattagtctgaaacatgcatgtagaaagcatgatgaagaactcgaccagaaatgagagagagagaggggaggggtgaagcaagacgcattcatggccaatacatgtaaaaatatgtagaccagtggcatattttaaattacatgtaaattgtaatggtattgatccaaatatgtaaattatagtgacatatttcaaaactgtcaaatttataatggcatgggcatgtatccaattaaccctagggctaacgggtcagtttgggctggttacacggtttagactggctgaaccagtggttagcctgcttatcaagttctgagatcctgaagggagttcactaagaattgagataccttgttatcttgatcatcaattcagagacttacaaaacactgcgcaaccattcaccaggcaattcacgacgaggtaaagattacgcatgtcaaactgatatttcagtacctcaatcagacttcaaaaggcaaacatgtattttaattgcatgcttcacatctcatttacataatcagacccgtgataaaagagtaccacttctaaatggaagcaagattaggcctgaatcacacccccaagttccctgacaaaacataaagagtatcactccgagttggaaacaacagattataattgaaatcgcaacccctcccccacacccgtgtctggtcacctcaatctcaatccagtgcctcaacctgtgcaaaattacatgccaggtaaatcaacaggttgtcaaaaagaagagtacgtaatattgatgaactatagttttctcattagtgttttttctttcaaatgcaccattggtacttgaaaaaggagtaccaaacaaaaagaaataaataccttagtgtttacgactctataaacagaagtcaagggatgcacagtatctttggaagcgctttgccctctgttcttcaggttccccttccatctccataaatttcatgatcgccacttcctcaccagctgcatagaatgacctatttcatttcatggactaacacttgacaatatccgaaatcggaccaattgtctgtctatacataccatcatctgaagaagcatcagatgcttcagctggggtagcatcatctggtacagcagttgaggcagcagctggagcagcagtagaggcagcagctggagcagcagtagaggcagcagctggagcagcagttgaggcagcagctggagcagcagttgaggcagcagctggagcagcaggtggggcagtacatgggacggcagctggggcagaagatggggcagcagctgggacagcatagaggagcagcgttagaacaaaactggatatcaaaggctcttttcaggtaccattgatggatcatctgattttttgtgatagctgtacaaacaaatgaattgacttgtacaaacttcaaaagttgttctaggaaagtcttccgacaaaattttatatagaaaattccagtgcaaaacacactatttaggagcttaggaagcatgcaaatgaaaatccaaaaatctagaatcagaaaggaagcctttatatcaccttctttcttctcatggattaccgtaatgtccaagaccccttctccagtggtgtcaccaggcatgttaattgggtagctccctattagcgacttcttgttcattagacgtgttaggacctcaagctgagacctgatatccatgacaacctgggatcttgaagtaggatctgtcatgaactgttgaatggctgcgtgtcttctcaaggacttcctggactttatgctcaaattggaagcggccgatcacaccaagcaaggaagtgcgggagttagccaaggtatcgttcgacgtaagcttgttgcccatcatgttcctgatgttctgcacgaggccatgaataatgggccatgagacggtcccatcatcattaactgccacagcatactcatctggtctgtggtgtttaaggatccaaatcatgtcagcggagtgagcagatgatgccccttcacccaatccaagcaccaagactctgttaagagcgtccaccttcatctgccgcagcagctctgtcctgcatgtgcagagctcatgttcctgagcaaatttggatctcaggttaaacatctccaccagattccccccagcctggacctgccgaagggcttcccgaaggctacagcagtagccgttcagcttggacagcattcggcttttctctttagccacatcagggttaagtacccgcatagagaatggagtacgagcaatcatatactccatgtcctggacacatctcagagaaatgaactcagagtagagaaatctaatctcatgtaagcctagagattgataatgatgtgttatatcaagtgcatcactatgagaccaaaccagcccctgtgctttgccatcagataactcccaagcagacaaataagttggaggaatggaactcagtaaaaatctcacgggcaatctatacttgtcagatagcgcttgaacaagctcactctccgaatggggtgggggtggatccacctgaacggcgacggcggtggcgacggagggggtgggaaggagactgcggtgggcgatcggcgaccaggaggcggcgccgaagatcggatggggtggatccaccggagcggcgatggaggtgggcgggataccgatcggcggtgaagacgcggcgccgaagatccgctggggtggatccatcggatccgcggggaactggcgatggatggaatgggaataatttggtgggcgatggcgatggcgatggcgatgggcgccgaggagggctagagttggaacttggaaggactcagcttgg

SEQ ID NO: 3499 - DNA, 3422 bp, Oryza sativa
cgcggtggcgcgcgggatgaaattggggacgccgtctcccgccaggatgatgggttgggaattatttttttttacctacaggcaggctcaagcagcatatccgtccgatcagtttcacatggtccagattttggcaatgtcacgttgtgacttagctaggcaatgtcacccaagctgagtccgggttggaattgatccgacgggattgtggtcttggggatttgccggcctcgtggctcgtgcacgttggacgtgtgcgcttaaccgcgtcgctgtctgggtctagtccaaactccaaactgaccgaatcgacctcttctccggtccagttgctccaacacggggtgacaactttcggattccgtacctattttcaaaaacagaatctgtcggtcagaattttttggaaacgaaaacggatttagaaatattttcttggaaacgaaatcgaaaatcgaaaatgataagggcagtttccgtcggaactcgaatcggtcagaaacttttcggaaattttctcggaatttccagaaatcacaaaataccatgtattctattttttaaagcactgaatagttaataccatagtgtttggttgctatttttttaaaaaaaatatttgttatgcaaatctaatattacataagaatatttttttcctgcattgggatttatcaacagcattactaatttattccgtagattatgttttgtgacgtaccgttgatacttaacaattagacttatatgattgtgttttatgatgaattgttgaccgttaagacttgagaattgggtttatcagtttgaggggtttttttattccgataaattttcgttaccgtattcgcgccggctcgttttcgctccgttttcagtttcgataatattcgattccattttcgtatccggggtttccgattccgatttcgattctgaaaaaaaattaaaacgaaaatgacaaagatgatttccgtccgtttccgtacgaaaatgataagggcagtttctagtactatttaacatttaacactaatgacagtaattagaaaatattttaaagatttcttttttactaacagattgaaaatttttttaagttagatttaaaaacttttgatttaaggttcaaattttaaagtcaaaatttgaaaacattcaactcagatttgaaaactttcaactcgagatttaaaaactttcaactcagattcgaaaactttcaactcgagattcgaaaaatttcaagtccatatttgaaaattctgaaaactttcaactcagattcgaaaactttcaactcgagattcgaaaactttcaagtccagatttaaaaattttgaaaactttcaagttgagatttgaaaatcttcatatccaaatttgaaaaaaaaaagttaagattcaaaaattttcaagtcatgatttaaaacttgcaaaaaaggaaaaaaaaaggaaaaaacacacaaaaaggggaaaaacacgtgggaaaaaggaaaaaaaagaaaaaaaaatgaggggatgcgacatggtgggggccgcgcgcgccagatacggactggcacgcgcacgccaattaggaattctgccaacgctgaccaggctgggacaaccttttcttctccgaaacccaaatgcaacattacctttggccaaatttatttattttaagggttaattggatccattgtaattttactagtttcgaaaaaaatatcatttgaagcatctaggcccccggtgttaattttggtaattaatgacaagcactaattgtggactaaccgttgtctttgagctatacattttaagttaggtccacgtcatatgtgcgcatggatgattatcaatggattaaaattgacggcgcaaagcaaagggaaagaagacggtaaaactagcgttttaatttagaattgatcgaggtgtagggcgatcaaatttgctagtttaattttagtttcgccgtactattaagaggggtaatgacctagcaaaaagatgattttaattgccacattaggtcatagcattttcatttgtgaaaattcactacacaaattcattgggtttggcctgaccagtggcggtcagaccggccatatagtgccggtctgaccggcgtgccctggccggttagaccggctacatagtggcggacagaccggcggcactttcccggtcagaccggcctcatggagacagagatgatgctgctcgggatggccgatacagagccgacggagccgtagtcggtcagaccgagccaatggcggtcagacggagccgaggccggtctgaccgaccaccccatgtcggtctgaccggccagaccgatggggccctctgacagggctacaacggctagttttctagccgttgcagagtagcacggtctgaccggccacatacctccggtcagaccggcagagcacagagttgggggatttcgcccccaacggctagttttggtgggtgggagtataaatactcccccaccagtagcaagggggctctcttggcacccaattcaattgcatacaccccttgtacctctctcacactcacttgagctttgtgttcatccatctagtgtgttagagggttgtttagctaagagtcaagtgcatttgcttccattgtagagctagtgtggcacttgatcatctccacaccgggtcattgcgtgttactcttggaagttgccgcctcctagacggcttgtggaggagttgcccggtgacctctccgagaagattgtggaggaggcccggcgccggtttgtgagtggtttggagttcaccaccttcggagtgaaggaagaactaccccgagtgatcgaggcttgggtagtcctctccgtgggccggctcccgccttgcccaccccttgatgaagggggcgtgcggtggcttcgtggttgagcggtggagttgggctcgcctcaacggggagtaggaaaccggcaacttaggttagatttgattaggtgttatttagttttaaatcgcctattcaccccccctctagtcgacatctcgatcctacaagtggtatcagagcttggtctctcttgattgggcttcaccgcctaaagagaagatgtcgaacgaggtgaaccatgtagggaaggctcccatgtttaatggcacaaactactccacttggaaaattaaaatgtctactcacctcaaagctatgagcttccatatttggagtattgtggatgtaggctttgccatcaccggcacacccttgacggagattgatcaccacaacctccaactcaatgcccaagccatgaatgccttgttcaactctttgagccaagaggagttcgatagagtgagcaaccttgagaccgcatatgagatttggaacaagttggcggagatccatgagggtacaagtgagtacaagga

SEQ ID NO: 3500 - DNA, 574 bp, Oryza sativa
ttgttggcgttcttggtgccagtctaatcctggaaacgccacatatatttacatagtatttttttcgtttatgtgaattttgtcttttggggatctaaatgatgcgaaactctgaaaggaaagcgtccaatctgcggattgtggcgttccatgacatttctttcatattgaataggaagatctgatagattcctcaattgatatgattttgtttaaggttatttgctttgtgatttttgttaaattctttgtgcttttttttcagatgtggatgatgaaatcacaagtgaaaatacagttatccctgtctgattccttcataagggtgctgagaatactttaatctgacacagttttgatgaacctatatctccttttaaattctatggctgttcgtgcagattaatcttttgtgagttgaatgcgaattgttggattggatctgatgcctttgatgacatgatggtttcagaactggcacacatcgttgttgccagagctatgttgatattgctcatgaactaggacggtctgaggcctttccaatccgatactatagaaaaataagagttca

SEQ ID NO: 3501 - DNA, 1520 bp, Oryza sativa
  unsure (1)..(1520): unsure at all n locations
tttgaaatcantgtgtgnnnnnnnnnnnnnnnnnnnnnnnnnnnnnnnnnnnnnnnnnnnnnnnnnnnnnnnnnnnnnnnnnnnnnnnnnnnnnnnnnnnnnnnnnnnnnnnnnnnnnnnnnnnnnnnnnnnnnnnnnnnnnnnnnnnnnctgatgaatcccctaatgatttttatcaaaatcattaagttaaggtggatacacatcttgtcatatgatcaaatggtttcgcgaaaaatcaataatcagacaacaaaatgtgcgaactcgatattttacacgactctctttaccaattctgccccgaattacacttaaaacgactcaacagcttaacgttggcttgccacgcattacttgactgtaaaactctcactcttaccgaacttggccgtaacctgccaaccaaagcgagaacaaaacataacatcaaacgaatcgaccgattgttaggtaatcgtcacctccacaaagagcgactcgctgtataccgttggcatgctagctttatctgttcgggcaatacgatgcccattgtacttggtgactggtctgatattcgtgagcaaaaacggcttatggtattgcgagcttcagtcgcactacacggtcgttctggtactttttatgagaaacgcgttccgctttcagagcaatgttcaaagaaagctcatgaccaatttctagcggaccttgcgagcattctacgagtaacaccacaccgctcattgtcagtgatgctggctttaaagtgccatggtataaatccgttgagaagctgggttggtactggttaagtcgagtaagaggaaaagtacaatatgcagacctagagacggaaacctggaaacctatcagcaacttacatgatatgtcatctagtcactcaaagactttaggctataagaggctgactaaaagcaatccaatctcatgccaaattctattgtataaatctcgctctaaaggccgaaaaaatcagcgctcgacacggactcattgtcaccacccgtcacctaaaatctactcagcgtcggcaaaggagccatgggttctagcaactaacttacctgttgaaattcgaacacccaaacaacttgttaatatctattcgaagcgaatgcagattgaagaaaccttccgagacttgaaaagtcctgcctacggactaggcctacgccatagccgaacgagcagctcagagcgttttgatatcatgctgctaatcgccctgatgcttcaactaacatgttggcttgcgggcgttcatgctcagaaacaaggttgggacaagcacttccaggctaacacagtcagaaatcgaaacgtactctcaacagttcgcttaggcatggaagttttgcggcattctggctacacaataacaagggaagacttactcgtggctgcaaccctactagctcaaaatttattcacacatggttacgctttggggaaattatgaggggatctctcagtgcatagcttgagtattagatgagcacacaaannnagcccgc

SEQ ID NO: 3502 - DNA, 10246 bp, Oryza sativa
tcaagattagctgcagacgtacgtacttttgcagatctatagatcacggccggccggcggggtggagcaccggagtttaactccggtggtccaggccgagtttcaatactccatctgccccattttttcttccgtgttctactgctacatgcaaacaaacaagcagcaatggcaatggcagtagaagaaagaaaaggggagcgatttcaattgaatgctgcctctatcttgaaactgaaaagatacacgcacagagatcaaaatcagatcagatcgatcagaccagatcgatgggtcgatggatggactgaatttattggtggtttcatggcagttatttctgcaccaagggttattgaatgtgggcatgtgaactcaccggcaagcctcgccggcgccagcttggccggccggcatccaaaccgatccttcttcaacgctaatgctctcctaaaatatataagaatttttagtctctagaatttatcctaaaatataataccttctacaaaaattttttgctcaaccaatcataactcaccacctttcaaattttccacctacctctacttcccatccaattataaccctagctttattatttttttaaaaaaagttttgttatttaattctatctactttttttaataattatgtccagctttaaatatacttatattctgaatggagggagtagtactcagcttgtcctcatctctgcacttctgcagtaaaaattaatatggttggttatagttgccatggctagccgtccagcgaaatgcaacctgattattagctgaggtagtagtagctagatgttcttttgttttagtacacctcagtgcgattgcggtccagctagctgatgatccgtatggcacggtgtctgaactgtagactgtagagtacacttttgtatgctgctctgtgcgtggcacgataatatgggtgcactcgagctgtcaacacagtcgatcgcccatgtacgtgcctgcccgtccagctctgtgtacgctacactaataatttcgtgtgtacaggttgattcaaaaagtaataatgtcaaacatggattgattcttagggatgtttagttcacaaaaataaaatttttgggtgtcacatcagacatttgaccacacgtcggaaggggttttcggacacgaatgaaaaaactaatttcataacttgcctggaaaccacgagacgaatcttttgagcctaattaatccgtcattagcaaatgtacgctactgtagtatttatggctaatcatggactaattaagctcaaaagatttccctcctaactgtgcaattagttttttaatttatctatatttaatactccatgcatatgtccaaagatttaatgtgatgtttttgggaaaaagtttctgggaactaaataggaccttagtctgttggttacagtgacctgaggcctggtttagttcccaactttttctttaaacttctaacttttctatcacattaaaactttcctacacacaaacttctaacgtttccgtcacatcgtatcaatttcaattaaacttttaattttggtgtgacctaaacacaccctgagtaacttctaaagattttgagttcaaatattcgtacaagcgaattttagattgggttatttgatggactaagttcccaatttaaaatttcagattaggttgtttgataagataagttcctaatttaaaaggttgcatacaactgattgaatgtagagaaaaaaaataccattctctaaaaaaaaaaaaagaagatggatacagttacgtactacgataggatattatcttttttgcgggaaaattatctgtcactaaaaaaattattaatgttatttcacaaaaaaatcttaatagttttttgtttaataattaatgagttaagggtttgatgatccgtatagcacggcatttgtactgttagagtaaaatttactttgtagcatgatatcatgctgctttatgtgtggcatgatatgggtgcgctcgagtacattcctagctagtacgctacactaatgatccgtatgtacatgttgatttaaaagtaataatgtcaaacaggagatggtacttgctactaatataagctttgtgttaaagttttgaccctcttcgtcaggttatagacaccgacgtatcagcggcgtagtaaggcccacaagatggataccatttcttattggctgctgtgatgattttcggttaatggcatattcaatggtagagataaatacgatctcctagacgacttaagattatttaaagaacatatttttataaaagttaagacgatgaaggctctaaccattaacttaaaaaatattacttttattattgtctctcatgcaaaacatgtttccatattataaatactagagttattgctgagctgtctttactcatagcaatgacgtctctctcttacatgtgaacaaatattcttaataattagcaacgctaagagatcagtattaacaaccattatacatgtccttagctgtagctagaatgtaatttttgaaacataagtttaaattagtttaaatgtttcttcatcgtattttctattttaccttttaagtactgctaagagtatataatgtaaagatcttattctaaaatcattttcggttgggataagtcgatctatttctctcccccctcaactatcatgccattaatctcgactttaatgtttttaattagatcgagtacatggtaacatgaaatggtacaatcatcatatatgtcatgttgctctgtatatggcgcgacatgagtgtgctcgagctatcaacacggtcgcccatgtacgttcatccaactctgtacgttcttagtacactacactaattatccatatgtgccaagttgatcaaaagtaattatatcaaacaaaaattggtactcgcttctgtgcttgtgaaattaattaaagttttgatcgttctcgagtttaggtacatgagtttacaaacagtgacgcatgcagctagcggcgtcgtaaaacctagaagagagaatagcaacatttcttgttggctgcgaccttcagcatagaagctacaacaggaatgtaaattttggaatttaaagtttagattaaatctaaattctttttttcatcgttttctgtttccgtacatactttcaaaatgctaaaattaagtagagagatgtaaagatcttatcctaaaatcttggtttgtttgttattttttttgtctttcaatcatagctcaatccattagagcgagtgcaataaaatgatgtaagagaattatacaagttagtacatcacatttatacttacgtgaataaaagagaagagaagaaagaaaaaaaaactatagatttatagccaactgcaaaataatctctactaatgaactatacaaaatagacgggagaattaggtataatgaaatatatattttaatgaactatacaaaatagacgggagaattaggtataatgaaatatatatttatagctaactaatatgtgagtgaactatatattaggttgattataaatgatgttttaatttttacatctaatagttaactattggtaacgttggaattgcagaatagcgggatgattaccatgatctggtaccatgatctggtattttgaatgaaaaaaaatatttatatttttaatttaaattctatgggctttaatttccataccaaccgattcaaacgttgtggctccgtcaaagctctaatcaattggaatccaaaaccttaattgctacacccattatttaagtcgtactttttttaatcactgttgctgcttcccaaccgtttagggaagtcgagcttctagaacgtgtggtgcgtcttttaatttttttttgacatagtaacaacttttagtctcagaatttgttccaaaatataacaacttcttccattcacttttctcacatatctccactactcatccaattacaacctccactattcacttttacatactttcttaattatcgtgtccaaccctaaaacttcttatattattatgggacggagggattacaaggacgcatcgatgaatccttgcatgttgtttaagaaagaaaaacaattggaatagtttaaggtctttttttttctctctctctcaaccatgcaaaagggtcgtgcttcaatatagtattaaaattgttggttttatgctgaaatttagtgttcttttcaatcgcagatggaagggttttcaaatgagaaaaaaaaaatcacagatggaaatcagaaatcacaccaaccatgggtaattcatcattttgaggggggaaaacaatggaagcgatctcatacttggctagcaccaagggtcataaaaaactattggaaactgtttgatttttttaaaaaatagaaggttttatgctagctggagatcatcgcttttttttttttaaaaaaagaaggttttgtgctagctggagatcatcgcatactactcgatacatctgccaaaattaaattaagtttttttttaataaaatttggtccaatttcaccagtagtgaatggtttcgaaactattcgggagcggttcttttgatagttcagttttataaaccttggctatcccacatcatcctttaattaaactgtatattccttccaaaacaaagatgcaaattaatcatataaggcagggtaaaggctatgggcgttcatatgaatgaacacatgtttacgagtatgtgtttgcaccgtgttttgcaaaaaaaactaattaacataggtatttctcgacttggaaaccaatatatatatgagcagatcaagcagcagtaggtacacttaatcctggataaaaacaagagagaaaagaaaaaagagatccactaataaaacaaaaaaaaatcaaagaagaagaagatatcaagagaacactctatttaagtaaaaatttaagacatcatctgcatatccatccatccgtccgtccatccgccatccaacggacagcagctaccgaagtatttatatcgtagtacttaattaggcggacgcggcggcgccgcctccgccgccggtggcgagctcgccgccgacgcggcgctcgacgagggcggcgcggagcgggttcttcatgacgacggtgaaggcgaaggtctcggtggggtcgggggggccctcgccggcgggcgggacccagcggaactcgcggaccatgttggcgagcatgagctggatgtggaggacgccgagggtggcggcggggcagatgcggcggccggcgccgaacggcatcatgcggagggcgcgggtggcggtgatgtcggtgtcgaagccctcgccgccctcgaggaaccgctcggggcgccacgcctccgggtccggccacgtcgccgggttctccgtcacccacgccgtgtagaactccacgctggcgtccgccggcacgcggtacccgccgagctccgtgtccctcgtcgccgcgtgcgacagcacgaagtggctcggcgggtgtcgccggaatgtctccttcaccaccgcctgcacatgcgcacgccggcgatcgagcgccgcgaatccatccatttcggttagcaattcagcatatccccaattccccatcacccgtatcttcttttttttttcatttttttttcattttattatacaatgaaatgaagcgaactgcttctctgtctcacaagaaaaacaaattataggtatgagtttggacaggcgtataaccagattcaaaactacgatacaacttttttttttaagaatggttttactcccgttgtttcataaaaaaacaaaactaatatatgatgtgatacattatagttaatacttatatagataccaagagattagttctcaacaattaatactacacgttattggtggatagggagttttttttactgtctcaatccaatctcggtgagctcctcaatccgcatcacccatgtcatttttttttaaaaaaatgttttttattcttcggattatactatgaaatgttaattactataacaattaatactagtacatgttaatggtagatggggaattttttatgttgtttaactcatggggatgcttgtttgcacgaacaatatgatggggacttatcagggttttttgcaaaaattcatggtgtaaattaaaagggcaacctcaatagctgatgaaattaatacagtgcagtgcttatcattttcagctaaacagaggagcaaatgaaagctcgttttctcagaacacaagtaacatgtccttttcatgacatttgcttgtagaaaatgccatttggactgcgccggctttgttagtgccagatcagtgccttaatttctgtggtgaacttaattagtagccgcaatcttggtttgcagctcgggatccagctcaagaacaaaagaaattaaacatggtacttaattactactgatcgattgacagtgacactccttttagttgtgacaaaagtttggttggtagctgattggtctgccaatgattgacaacaagaacaattgtccatttgactcctagtgtgagtcccactaacctttttaccataaaatttctataaacctcaactcattcaaatttttaagaaaacatgtttcattttgtccttgaacagtgcattctaatacatggccacaaaatttgagtttttttaggaaaaaaacagtcaaaattgtcagatcaagtttgatactaatatatgcagctacaattaggtagtggattaagtagtaattaaaccagaagagtagaagtaataataatttggttggttaataaataaataaatattacctgcaagtagggcatggcctcgacgtcggcctcggtgatgcgcgcggtggtgccgaccttggagacgacctcgccgtagagcttgtcctggacgccggcgtcgaggacgaggtgcatcatggcccactccagcgcggtggcgctggtgtccgtgccggcgctcatcacctcggagcagagcgtcaccagctcgtcctcgccgagcctcttcccccgccccggcggctccaggtcgaacagcgagtccacgtacgcctcgccgggcgcgctcaccatctccacgccgccgaccaccgtgttcccgtcggcgttcctctcgccgccgcccctgatgaactcccggcgcgcgcgcaccagcggcgccaggcagccgagctggcgccgccggagttcgcgcgccgcggcgagctgcttggtgaagagcggcgtgaggagcgggaggaagtccgggagcttgggcatggtcatcatcatcacgtccttgagcacctcctcgatctcgcggatgagctcgtcggggatcttggcgccgaagcagatgcagatgaggatgctgcagatggagaggcggcagttggccatcatcctgacggcgccggtggcggcgaactcggcgcggagccgccggaggtggctcccgacggcccactcgcggatccacgagaatcccttcacccgcggcggcgacacgatctcggcgacgaagttgcggcggagcgcgcgccagagcgggccgtacggcgccgagttgacggtgcacttgccgacgctgaagagcagccgcgtcgggctgtcctcggggcggctggcgaacgccgcgccctgcttgacgagcgcgtcgtggatgaggtcggcgtcggtgacgacgatgagcgtgcgctgccccatccgcatggtgaagatgggcccgtacttctcgcggaggtcgcgcaccacgtacatgaagggccgccgctggaggatcacctggaacaggttgccgaccaccggccaccccggcggccccggcgggaggccgtcggcgccgccggtcctggaacaccgccgccaccacatcgccgccagcaccgccgccgacaccaccagcagcacgtcgttcatgtccaccatcttcgacctcgccgccgccgtcgaacactcgatcgatcgatcactctcagcttcttcacctcgtagcttggtatagctcgccggagtggaggaagagtgggtgggtgggagagatatatagcggcggaggcatgtacacagtggggtggggggagtaaatgcggagccatctaccatctgaaagggagacatgaatgctcgctccagtgtgacattaatggcgagctcgtgaaagctcagctctctgccctaaccctaaccctagccgtggtagtggaaaatgggaagaaaaaccagcggcttggcccgtgatgagctaacctggctgtccaccatggccatggccgctgctgttttttttttttcttcagccgttagccatttgcttcccgcgctttaattcccgcgttcggttgggaagacgacccacacactcatcactcggagtagtactctactgacgcgtttgcaaagtagcaaactggcggctgcacacggtttttcgtttatgcacagtaaaagcatctccaacaatcacttcaaatttgactctccaaatatcgggcctgttcattttaatgttattttcaaccttaccaaattttggtaagttgccaaaaaaatggctacatttagtttgctgccaaattttggtaactatataagaaacgtaccaaaattttggcaactatatcaaaatttggtaatgtttttttttatcaatgtgaacaggcccatctatttggtcaactctccatttaatttagcaagttaaactctcttttactccaacagcctctccattcgtcctctctattctgagtctatatgataattgggcccacacgtcagtctctacacctccttctccctcatctttctccccttctctccaaaccccccttcccactcccatccgtcgccgccgccccatccccatccccaccgccgctcgagctgtgtccccatgcaccgccggtgccgctctgacggcaaattcgtgcggcaggcagggagggagctctcttcgccggcggtggtgtggcgatgcgaggaggtgggcggtcgcgtgcggtggtgcggcgacgcggggaggcgggaggcgagacgccggcgactcgcgacgacgaccttgacgccgctcggggcggagctcggcggcggcggctcgcgacgacctcaacggcggatctagaagggggcggcggcggagctcgaggcggagctcggcggtggcggtggcggtggccggccgcatgacgacggggcggcgggggctggccgcgcgacgacggggcggtggcgccctcatcattggtgcgtgccgcgtggagagagagggggaaacaggcgtgggtcccacatatggttagccggttttggctggccaactttggctagtctggtggggaatttagccagccagatggcttggagaggtatttagctagtctgttggagtagattttttgtgcaagttagccaaattttaacttggaaagccatttggctaggctcttggagatgctctaatgtattttactcatttgagtaaagtgtacgagcggtccttaaacttgtagaggtgtgtcatcttggtccctaaactctcaaaatgcatatccaaatcccagaacttgtcatagtgtgtcatctaggtcccaaatcgccacaacccctttagaatcctacgtggtattgatgtggcatgccacacggacatgacgtggcatcattttaactgacaaatgcgacccatttaaaatatttcctttttttccttctcttttttccctttcttctcctttctataagaagaaaggaaaaaaaagaagaatgagaagaaaacgaaaaagaaaataagaaaaaaaaagacacgtcacgtcaatgtggcatgccacatcagcgtcacataggatcttagaggggatgtgtcaatttaggacctagatgatacactttgacaagttctgggatttggatatacattttgagagtttagggatttatatgacacaaccctataagtttaagaaccgccaatacattttactcatttgacccgcttgtttagttccaaagtttttcttcaaacttccaacttttccatcacatcaaaactttcctacacacataatcttccaacttttctatcacatcattccaatttcaaccaaacttccaattttggtgtgaactaaacacagcctaagagtcatttgaatagtagaaactgaaaaccataggaatggaaaaaacacatgttctaacaaggggctgcaggaat

SEQ ID NO: 3503 - DNA, 2332 bp, Oryza sativa
atcctaaattaagttgtttcgggctcgtcagctggaacgcaaaaatttcacacgacaatgttttatttcgatgacatttgaaatcgagaaattttcatgcgttccaaaatggatgcaggatcttggaagcaaagagttccaaaatataggtggaacatgagaagataactggaagctttagcttggtgtcttaaatgtgtgctatcttatggttgtaagataccctttttaatgtttctcgagtctaagcgctttgtggtgaacgatttttgtgttgatgtgagtctaaatattctgtatcgttttgacggtgtacgtctggttggatgcagatgctggcttttagaaatcaatcatatataaaaaaaaggcatcgtgaaatcaattatatattaaaaaaaaaggcattgtgaggatattgctagtgtgttcggatcactgtgttttatcactcactgtctctttaaaagttgacacaaaggcggaaccacttcccaacatttcggcgttagaggcagcgagcgaaatcggttactgaacacatacacacatacacgccgtcttctcgccgtcgctgtccatggcgataaaggcgatcgactgatccatcggctgaatgaatcaagagctttctgttgcgatttgatggagatgtgggtacttgaattccaaagacaattcaggaaagaactctaattcgtttcgttagtggtaataacagcaatggagatatcagaacatgaaacagctttagtagacaaggcacggtacgagtactagcaggttgccactgtaactgtccggctgctggtagttgagtcacttgagtgcaaggggaaccggagtaacttgcctgtccttggatccagcaggcttgacgaccgagctgcagaaatgcacaaagtgctagtggtgatccttgccttgttcatgatcactggtagctggtgtgactagtgcattacttaattcaatcagttgggagtaggatttatcaacccgttttgatggggttaccgccacaccatgatttggtggttaccgtgaaaactacacggttatcgcgaggtatatcgtggtttaaaaactgagaaggttaccgcacgtggtaaccgtgcagttttataaaccatggttgggagagatgaagttttttgtctccaatccaacattgatcccaggaagcgcttctatagggttctattccctttgttccatattaaagtcatttttagttctatcctaagttaaacttcagtaagttttttaccgagtatatggaaaaattcaccaatgtttaaacatcaaactaattttgttaaattcaccataatatatgtcttgatggtacatttatatattattgtagatattggtgtatttgctttttataaaattggttaaagttagagaaatttgacttaggataaaattaaaatgacttgcaatatgaaacaaagggtagtacttgtttgtttaggagtaggggtgttagttatgctaacaagtactagtagtactagactactagtatgccgtgttatctgattcaggaccagaaaggtagtgagaatcattatggttcttgtgcccacgcaagactggccagatctgggttaagtgatgactactcagctagcctgtttcccttcctgaaaactcagttcataattcaggttattttgcaggtaataaagattcagaagaaaaaatacagttggatgtctatttcttttctggtcttctaagtaatgtttcacatgatagtatggagcttgtagttcttacttttgatcacaaatatccaatgccagcgaggcaattcagtaatccacaaattcatggtgtcaaagataaaaaaaataaagcaaaagagaagtcatacatgtgcttcagagaagcacctaaacagatacacttttcacagttcatggcattcccaaatgggaaaaaaatgggaaaattgctgaacatattaagagtatatatcagacataattcgagtaatcctgagaaaaaatggatttctagattctacaagtatactgctgttatctactttagtatgtttttcatttttgtgatgtgcagaacgaaggaaggactgaacctgaaagaatcttctacggttaagccactgactgcgcatctgaagaaccaacaccctgattatctttctcacttggtctccgcttcatcgatttcctgacttcttcttcctttttatcaacaaactgcatgagttctttgaagctaccaagacgctttggcctcctccgctgcatttcagcaacggcttcagctgcaatctcggcggtgccagcactatcgt

SEQ ID NO: 3504 - DNA, 2360 bp, Oryza sativa
aagctgttggactgtgagaatcgacgtcagactagcagtataacttgaattgatgatcagcacgacaaacagccatatgatcagcacaaaccgcccaagcgcacttacagtgttctgtcctgaagagagttggatgatatataagtccattgaaatgggaaaacatggaatagtttaacacgatgtcataaaatgcatcaaatggacttactgtgtgcaaaaaacattgttgagaaactaaacctgaaaaggaagaaaaaaaataatctgttactttcttactattaatatttacacaaattaacaagataaaaatattaaactatttgttgctcacgaataaaaaaaaagtaataaaggtgtttttttttttgcctccattgaataaggtttcacaaatgctcccagtctgagttctggttccagaaagatatgctgacctatgatataaccaaattcttttctttttaacaaaaaatagacatatccttaagaggagcaacggaaacgtaccaaaatattgttatcatctgccgtcttggagagcctcgaaactcctcattggtccgatgttcaagaatccaaacaactattccgacaaaaataaaaagaacacctgttacacaccacatttctaatgtgaagggtttaaggaaagcccaggcacttgaacttgcttctttcaccggcactactatcacaagccctgactcaatataaggctgtgagaattctgcaatctttgtcctgtttctcacaatagcaaagtcgcctacagcagcatcaagggactacaagaaaataaatacaaatcagaggaataaaatcaaacttttagaagaagaaagagcaaagaccaaggacatacattggcagcaaccatgttaataatgtcatcatagttaggattctttaaaccatccccaattactatgaattggcaaggaactggatacgggagaagtttaattgctgcgttgaatatctcaatgcagtacccagtcacattatcagggccagtatcacgtgacattaactccttaaagcttggtttatttggaacaccaactctcagaggctgcccattgtttggaaaaacccagcccttaggcttagaagcagagtgacccggccataccacatttttaagccgctgcgcactcgtagatgtatttggttgcttctcatatagaatttcaggagcagcaacagaaagtccagaataattagaccaatagccaatcaaatggggcacagaaccaccgatattaaggatatcatatgctgggcgtaccaaattgcggtctgaatcaaactggagctggcctgttaggcctgtaaagtttgtgaggagaagttgctgtagcaactgctcaccactatcaaataacttgagggctgagagacgcagtgtgctgttcattgaatcatgcaaccttggatctgcagagaaatttatctcctccccattatcgagaagttgatcgatagcacgggcaacaatccaaaccgagtcataagcataaaaaccatatgagttcaagccagaagcaatgctcctattacgagctacattgttccatttagatatgaactccctcttggtttcagaatcagggaagtgctgacgaagaacaattaatccttgcatatagctcatggttttaagatctccagacatggaggagtccatgacagcagctagccaatcggttactatccagacatagccactgtccatcatccggagcttgttagctatagaaaatattctcatccctgcgtcaggattgacgtgcacaacaaacactcttgattccatcatgtttgctctaaacagtacatcattgattgtagctgcatttgaatttggaggaaccgctgctttgtatgaaattcttgcccgacttaatgcaagcgcatcactaagggctgccaccgcacctctcccataatcatcatcaacaaaaatagcagtgacctctttccattgatagtagtcaacgatgctagcaacggcatgcatttggaagtagtcactcatggtactccttaaaaagtacggatactctgatgcagaaagtgttggatcagttgctgcgaacgataaaagaggaacatgtagctcattaacaacatgtgaaataacatggcctattccagaggattgtggaccaatgacagcaaccacgtttttctccattaactgcaatgctgtaacaaaataatgctttatgaatcagttcatggacaattcaagtgattaccggctataataattgacaaattgaagctgaatttgtatgtaaagaaagaaccggcaacagtttcattctgctcagatagtataagatactact

SEQ ID NO: 3505 - DNA, 963 bp, Oryza sativa
  unsure (1)..(963): unsure at all n locations
tgtgtttatcgccccgcgaagaaaaaaccccccgcagagggagggtattttgttaatcccgaatatttttaaaaaaactttttaccaaagggagaagggcatacccttttaaaaaaataacccccaagaggtggtgtgtgccgtgtgaaaaaatccttattaaagagtgggtccccgcgcagagggaaaacctttttaaagggagtggccccccggtgaaccccccccctataaannnnnnnnnnnnnnnnnnnnnnnnnnnnnnnnnnnnnnnnnnnnnnnnnnnnnnnnnnnnnnnnnnnnnnnnnnnnnnnnnnnnnnnnnnnnnnnnnnnnnnnnnnnnnnnnnnnnnnnnnnnnnnnnnnnnnnnnnnnnnnnnnnnnnnnnnnnnnnnnnnnnnnnnnnnnnnnnnnnnnnnnnnnnnnnnnnnnnnnnnnnnnnnncattcagggtgggcaaatgttgggaaaggggatcgggggggggccttttgttattccccaaactgcgaaaaggggatttcctcaaagccaataatttgggtaaccacaaggttttccccgtccccgcgttgttaaaccgcgggcagtgaatttgaatacgactcactttagggcgaattnnnnnnnnnnnnnnnnnnnnnnnnnnnnnnnnnnnnnnnnnnnnnnngaaaactgcaaaccagtgtaggggcaaaaatggctgcctgctgacaagttctagttcacagtcaataaagccattcaccttggaagtgactccctattctgatcagcagtcatacacaaattcatgcagtgtatgatcttggtctccatgcatgaactctgctaccccacattctgaagattaactgatgcttagatatgtgcatggcaaagtaatacactagttcgtgagtatttccttcaggacacttatgttctttctttgtttggagtactgaggcacctcaccaatgga

SEQ ID NO: 3506 - DNA, 1298 bp, Oryza sativa
  unsure (1)..(1298): unsure at all n locations
cgcgtaaactgaatgcacttcnattcgaccnnnnnnnnnnnnnnnnnnnnnnnnnnnnnnnnnnnnnnnnnnnnnnattgatgccgtggcacaggcagatgggcgccgtgctcaccagcgacttgaacccctcgcagcaggtgcccggcggcgtctgcgcagaatcaggctttgtttagttccttcaaacttccaacttttccgtcacatcaaatgtttggacacatgcatgtaacattaaatgtggacaaaaaaaaaccaattgcacagtttgcatgcaaattgcgagacaaatcttttgaacctaattacaccataatttaataatgtagtgctacagtaaacatttagtaataacatattaattaagcttaatatatttgtctcgcaatttacaggcggaatctgtaattagttttgtttatagtttacgtttaatactttaaatatgtgtcgtatacatttttttttttttccaaaacaactgatcacagcctcactacaaaagtttatatttaaatatctaaaattatttaattgacagctggattagccgagctccgtacgggtgcctacctaaccggtggaatacccgcctgtcgagaaggcagcgcgtggacggcgacaagcaccgagcccgcgacaggaggaccacgttgcaatacgattatatgggcataaataccttctttgattntcagtattggatggcgtcgaaatttaaatatacgttntactttttattattttaaatttgtnnaaataaatccangaatatatangtttgcctagaatattctcaatggtaaaccgtccccattcatacaggattaattaatantaatattattttaataagaccaattattataatatttttaagnaagatgatggtttgntccgctggaattgtaatggggtccgatatttagagaggaggaggaaaaggggagccaatttaactttgaataataaaacctaggtaaattttttaacttnnacttggggngggatctccaatctaggttaaaaaaacaaattccgcgaattttgcttggtggaaaggaaaacggcaaatatttccacaaccttaaaaaattttttaatataaaataatggaggataatacgcgggatttcccccaacccttaaactctgctgacaagaggggtattttttttttggggaaaattttcgcgccaccaccaaaatgtctccggtgctccaaaaaaaccgtccacttgtgacacaatctctgtggggggaaatacacgggcgcctcgtattttcccgttttt

SEQ ID NO: 3507 - DNA, 1389 bp, Oryza sativa
  unsure (1)..(1389): unsure at all n locations
agcggntttgttgatatnnnnnnnnnnnnnnnnnnnnnnnnnnnnnnnnnnnnnnnnnnnnnnnnnnnnnnnnnnnnnnnnntacgaaaaaaaagttcaactatagatccgattcccccttaaaaacgaaaaataaaaggcaccactccttttgagtccgatataccagccaccactcctctcagtttcaatctataccatgatatctcacctgccatctcttaaaatgcacaccggtgaatttatccggcctcagtgcatcggcaaaaccagccatagtaaaatcacagtgcctataataaggtttttggattgttgagattatgggcatataatgatttaatttattccataaataaatcatgacattacagatgaaaactagcatgaacgcatcattagatctacacatgtaaactacgtagaaaaacatgaacagatcaaatatgcgcaacatattgaacacgtaccgaggtgacgaaaagaccggctgcttggtcgaaacttttcgcaggtgtctacgaaggcacgaaacacgcgagcgaagaggaaggcgagccgtcgcgaacgaacagggagcagtcgcgcgaagcgctttccaaaaaccttattgccggcttcttccggtgcaagacgtcaaaggcagaggttccggagacctgctcttccgatcgctgtgcacgcccgcgaaccggatggagtatctacgagcgacggcgcagttcagagtaagaggcaaaccctagaatggatttcgcatatattgcgtgaagaccgcgggtcggtttatataagagaaggntcccttgatcagggggcccggacgatatctactgggcgtaancgaaccggataaagcgcgcggtactaatcggattccacccgtgttgacgcattggattttttggacgtttccaaaaaaaaacaaatttcaatttggggaaaaaaaatcttaaagagggtgcttcttccccaggggtgaggccccttttttggaaacttaacaccatagttgggcacgccccctttttttttttttgaaagaaaggaaaaaaaaccgtgttgttccttttttttcccccaaatatttaaaggggtggggggcttcttttttaaggggcccttttcaaaaaaggagggggttaaaacaaggcggctttttgggggggttgtgtatcaaaaaaataatggggggggggccctttttatcccaccggggggggggggtgggtttaaaattaaaaaaaccccccctcccaggtttttaaattttttgggggggggggggtactccttcccccgccggtgttggggtaaattttttcccccctattccttggtgttaaaaaaaaaaaaaatgggtttgttttttttaaaacccccacccca

SEQ ID NO: 3508 - DNA, 10286 bp, Oryza sativa
attggcctttaccagattgaaatcggttaggctacagtggataatgggttcaagctatgattcataatattcatatctgagttggtcgtatagtattttggggaatatttgcaagttaccaatggtcctgtcagtgaaattatttgtcctcaaaccatactgatctcgaagactgaaagtttcaagacaagtattggagcaataatttgagtacctagtctgtgtaagcaatactggtgaataatagagaggatcctgagtatctctgtgaactttttatcaccatgtttcatcgattgagcattaaaatgaagcaccatggccgggtaatctttattggacttcttttgatctctgttactctccagttgtcttgatatatttttcatttgctttattctaaaatatcaccactagaaatcttatgcagtggtgcaaaacttacatcagactacccttaaaatttattcccttgctctattgagttttacttcagttttttttttcgcatggtttgttcgatgctccttaacctgcctgctaacttcaacataaccgtgcctagcaaatatattaccttttcatacgccgaggttatttattccatattatccaaaactctgcagatctcctatgccaatgggcggtacttctgctttgctcgcgaccaggataagtggctcatctctgatgctgagactattgaggtagataacttgctcatggcctctgcagcagccatgtaggcttcttgattctgatctgctctctgattctgagctgttaattgtgtacaggcagaagattcatgggagcagttgcttgaacgcttcagagactgcaggctccaacctgaagttctttttttcgagatcatcaattagatagatggactgcctggaagaaccctgtcataatattgtattcatagcttcaagttaattttgacatttttgcaagcaacttgcttgtcattatcttgatgctaacagttttgatatatctccttgtaaaactaccatttcttaccagttttggaatgttcttgatcattgaacagcctgtatttgttccattccttctctttccagtttccagtggtgtcaaggaaagttacctctttgtgattgaaaaaataaagaggaaaaatatactctttttggttaagcagcaaggctgcaaataacgagcaaaaacaaacttgtcaatttgttccagctgcagtagctgtgtgcatgcatgtttataatctgtcaacattgaggggttcttgattatggaacttaatgaactcaaatttcagtcagaaaacattcacaaaaaggacatttaagagtacgacttgtttctttctggtgccagattatgactgttccggctcgagttaatactgatgacacaattaacagattacaaccacttgtttttttcaccaatagactatgacacaattaactgtgctacttaagatttgccaaatgcagaggatcagttcatgtctaactacaactagttttgtactccgtatttttgtttgcacgtctaatcagtgtacacaatgctagatacccagaaaatatttagtaaatgaagttttcttcattaaggattgcttatataactagtactccctccgtcccaaaaaaagacaaactctgggtttccgtatccaacgtttgaccattcgtcttatttaaaaaaattatgaaaaaaattaaaaagacaagtcacgcataaagtattaatcatgttttatcatctaacaacaataaaaatactaattattaaaaattttcatataagacggacagtaaaacgttggacacgaaaatcagagtttgtctttttttttttttaacggagggagtagactagtagcagttctttcatgttgtttgacagagtcttgggagatgctcgatttagctctgtttggcgcatgcttaaacgctcgctcttcgctgcaggtgggccccatctgtcattgtaaggttggactggtaattccaagcccaactcgttatgggccgaaaatgttgggccttattgggcatctgaggcggcaccgaacaaaaaaagttgggccggattttctcccctcggcctcttcgtctacccgtcgcttccgcttggactccgaccagtggagggcaaccagccgccgccgccggccgccgtctcgtcttgggatcgcacgcggcgcggaagaggtagggtggttgctaggtgagtcagcctcctccgatctctccctcggacgcgtcgcgatgatctggggtttcatgggaatgcctcttgctttgcgaatttgagccatttcgatcttctttgcagtgaggagggaggtggttggaggaggatgagcgaggggaggccggtgccgaggagggagagcccatggggcttgccggagggggacaagcgggagcccaaggcgcaccgctgcaacgaccgcgccgaggacgtcgtccaggttccaccccctctcaaccctaatccaaccacagctcacgacctgattgatctcttattatcttcctaccgatgaatgagtggtgatgaatgtgtaatggaaattgcggagctcagagctacccggatgatagttttgtggagaacctcttgtcgctatgcctgtttgctagtactaaatttggatcttgaaggcgcttgatagtgaaattggctgtaattgcatcgttaaacatagttgttttggcattactagcctttcttacttacaattatttcagtgtttacctaactgaatgtcttctcttcgtgttacataacaagattgcatgatgttctctgcccaccagccaccatgatcctgcatgtgcattgcgccattgctgcgattgttgttgctttcaggctgcaggtggtatttccatgtttgatcccaaaaccatgtttaggaacggcctagatggcaatcagattcttatgcttacccaggatgaaataagcctcagtaattaacccaaaaaccaatggcggagcttcatcgaaatagtgagggggccaaatgtctgaacattagatcctcagtattgatcaagtacagaaataaactcaaattggttcatttgcacttattggccatattactggtctatactcctaggtgaataagaaaagtgggaactaataggcaaattataacaacatacactactaggtgaataagaaaagtgggaactaataggcaaattataacaacatacactgctaggtgaataagaaacctcggggaggccatgaacccatttaatcacaagtagaaatggacgaattttcagtatggaattgcccctaatttcaactagcatgctggttccactcacactgaacctgccagggtccaaaattttcatcctgtctgggattttcagtaaagagttttcatcagttatcagcgtctgctatgtaatgaatgtttcccaagaatgctgaagaattttgctctgtgcctcaatgtgttgattatattatagcaaatgatgatattgttaattctgaaattcttggccatctttatgttgaactcatcctgtctaggatattcagtaaagagttttcattggttatctgcgtctgctacgtaatgaatgtttcccaagaatgctgaagaattttgctctatgcctcattatgttgatcatattagggaaaatgatgcaattgttaattctgaaaattttgtccatttctatgttgaactggttttctaatttctgttgcaggcttgctttgaggggaatcctttcaagacagttccaggtccattcaagctcttttggcaatgcatgcgttcgaaacctgggtatgtacaacttcttacaatttgtatgtttcatgcttttgttcacacatatattcccagtaatatgaggcaacatacgtttcaataggtctagcacattaagaactaatatgattgataaaggacattggaatcatctgattgaggggttttaaggagtggtcacaggatgctcatgataaggtggaccattatattgtgcctattgtttgatatgttcttctctttatgctccttcttgccggtggctcttccaccataggtccttcagcagcctaaagaaatatgtgccatgtgaatatacctagtggctgcagaaaatgctcatgatgactaatctttgcagtgtaaaaggctctagtgttgtgattcctttcaccacatggattagcatgagctttgttttctgaccaactgaacttgtaatctctgagagttgtgtgaattagattgtaaggcaactttgtatttgagaagttatatagggctattctcaattaaatacaaatccaataaaattttatgtatgcttcttggcctgttttgccatgtagttattcgttgcttggttacatgtgtcatgtatcaccttctaggatggtggtttggttgctttcttcacttccaatggcgggtagggtttcttttcaaatgaaatttgttgttgtcaaacctgggaaagggaaaggaaaatatggtctatctcaatttggctggttcagtttggtcaagttaggagcactgacactgtctggctgggagcaactgcttcaaacaggctaatgctagaaccactgaactgaccaatagccactcaagtgagaaaaagaagtattgttgctagttgctaccataccttggggtagaaatcgaggcaaccctttcgatagacattctttccccaagaagcttctgtacttcagaaaactgttgtagacaaaacgctatttacttgagtccactaaaatgtgaagctgtgagaaatgttgttatgacaaatgtacttgtgtgtgactagtagtagttagattgtaatgagcatcgtaaccctgaatatttctcttacgtttgtatctgaagttttcatgtaacaacctgttatttacagggaggagccaacggagccgtatacttacctgcagctggatcctcccaagagagcggaagtcaagctagagtaaacagcacctaagtcgtccacaagagtgtttagtttatttcatagtggtttgccttcaaaacaacgcctttatctcctagggaccatgttgtgcacaatgccttatgtttgcatattcaagaataaaaatttgacaatcctgatccagagtaatgccttatgtttgcatgtttgaaattgctgttgctgatgtaagaattccctcccgatagaatgatacctgcactttcaagatgagttactcagggccaaaagagtaaaaggccctgctcaacttactatttttttgaccccacgaaaaagagtgaaatggcttctgaaacaggttcacttattatggtgtctgagctctgtactgtacgtataagagtagcaatgtagcattatgaatgcgctactgtgtgtagatcagttgtgggattgtttactgtatttgtcagtgcatgagtcttaatgaatgagacggtactttggtacaggtccataatgataatctgcttcactacacaaaatctgacactccctaatcagcctctgattatttccttttgttctttcttgcttgcatgagtatttacacaaggctgtactgtacatgttggttgctctacagatattcttcaagagccagcacttggttgatctacagatattgttactgctactgctactactgctgcacatggtgatgggccagggaggcatcaaagctagagaccgtgccgtccacggtgagtcagtcttctctgttattattctatcgcctcaatgcacaataacaccagtgccttcatatgcacccaacctctgcattgcaaaattttgcaactgttgcaagtgactgatccaactcctaggttggttgcagatccaaagctgcaattatctgacacggatgcagatatgatcctgaactcgaaaaccgtttgtgttgcagatcccaatcacgcatcgatcgacctgggactgagctactgagctaagcttaccatggtgatcttgattcttgtaacgtagagactacaccatcttctgctacatatagcccggaatgcaccaatgcatgagtggatcagctcacctgaaagcctgaaactgaactgacctgatcacctgaccatcaatggcgtccaagaacagctgcgcctgccacggcgtcgtcgtcaccctggcctcgtgcctcctcctcgtcgccgccgccgtctccgtctctgtcctcgccgcgcacgtcgccgtcggccgcgtctggtctcctgccggcgccgccgccgccgccggccatcaccattcactctcaccggcttgggtgccatcaccgtcatcacgccatgctcatcatgccagggaactcgtgaaccgccgagtacgtacgccatgctcatgccacactcagactcaacggtgtttgtgcagtgatgatgtgatccgtaatgggcaatggatgcagaattgcagcagtgcagtttcagatgcaggaagtgtcaatgcaaaaaaaaaaaagtcagcgatgttgctgtgacatgtttttgataaatatttttgacatgtatatttgacaaatatttttgtttgtgcatgcgtgtgtgtcaggttcaggtcgggaggatggaggccgggctggtccaggcgcgggtgtccatccggcgagccagccgcacgcgcagctgcacgccggacgacggcggcgggttcatccccaggggcgccgtgtaccgcgacgcctacgccttccaccagtaagtaaattcaccactccgtattttcgttcccaaaaacacacaaatacacataagggctcaagagacggaggcaaaacgataaatcggtaacctcactaaattcttattgaaaaacatcacattcacacagttgtctcctttgccaatccgtaacctcactaaattcttattgaaaatgtcatatttatacggttgtctcctttgccactccacatctggccacgcatacccaattactcactccgttttatgttttatattattagacgctttaattttttaattaatttttttaaagtttgataaagtttataggaaaatataataacatttttaatgtataacaaacatgttatcaaaatatattaatgttacatctaattaaactaatttgatgttgtagatgtaggcaattttttttatgaatttaattaaacctaaaaaaatttgaaaaaaaatcaaaaggaattataatatattataaaacaatggggctagtaaccaagagctatatatgtgtaattaagttggccgcggctagctgctgccggctaagctaggataagcattcgtgattcgtcgacacccgatcgagggcattaacacgccttcctcgccgatttggacggcaaacggcctgaccaaatgcagccatcactaaactctacactacacggatatatgaattcttcgtacgggctcgtgcgatgactcgatgatcgatcggttgttggttgatgggtgcatcgctttggctctgctctttgtttggtgagacatgcatgctttgtgacggcaacgcctagctaatcttacaggcagagaccacactgctccattattagaggtcatcacaattcatcatcatcatcagccggcttctagatgattttgtaattagagtactcttaattatttgtgctcaatttatagatataacgtgtggacctacctaattataacctacctagtacacgtagtacttcactactttgacaaaatgcacctgtagtatactagaggtactatatacggagtatatgtaagttgtcatgtaatggtagacgatttttataaattgcatgcaattgaatttcactctacttgcgtacccagtacagtaaaattttgctactagagcattgtactgtactacatttatttttaataaacgatgccgctgattttttaatacacgtttgatcatttgttttatttaaaaaatgtaattatcatttattttattatgagttgtttgatcataaaaaatttgatattcatcaaagtttttaaataaaatgaattatcaacatcaaaggacgccgtacggaggaagcaatactatcgtaaaacaaggggaggttaattttaattgtggtcatgattaattaacagccaataattaactgttactgcatcatttgatcattgattatactatcatcaggagttacattgagatggagaagaggttcaaggtgtggacgtacagagagggcgagccgccggtcgtgcaaaagggcggcgccgccttcgccggcaacgacggcatagagggccacctcatcgccgagctggacagcagcggcggcggcggccggcaccgggcacgccaccccggcgaggcgcacgccttcttcctccccatcagcgtcgccagcatcgccggctacgtctaccgccgcgacatgatcgacttctgggacccccagctccggctcgtcgccggctacgtcgacggcctcgccgccatgtaccccttctggaatcgcagccgcggcgccgatcacttcctcgtctcctgccaccaatgggtaaattacactccacactctcctgcgctacttttcgcgggaattgagaaatactccctccgttcaaaaatataaatatttttagcatggtgtcaaagtcaacatttttaattttgactattagtagtaaaaaaaataaaaagcttaattatgtaaaattgatattactagatttatcattaaaaaaactatcataaaatacaaaatttttaaaacatattacttttatagatattattagtcaaagtaatatctcgaaaactgtatcgaagtttaaaaatacttatattttaggagagatagtatatgtaatttcagtaaaggcgttgaaattaattaattctacgaaattatggataaattaatgaatgaattaattaattccgcgtctcaaatggggtcacttgtatcgtacccgtcaagctctgcattcaaatacaaacagtctagcactctagcagtctagcttgttagttcgttaaccaggcagtttggtgatcagttgctttcacgagtttaaatgcataataattaataaaccggcaacattttagtactagctgtgatgccacaataggtaacgaaacgtatcatgtttagctatgcagagagaccatagttatagggagacatgatgacacatgaacagcatcatgtatccatttgatcgtgacacgaatcaaatatatgctgcttaattgattattgcatctttttttttaagggaacaaaagaaattcaaacttaattgactcgatcgctgcgacatgtgtgcgtgcgtgtaggccccgatcctgtccgctgccaaggcggagctacgcggcaacgccatccgcgtcatgtgcgacgccgacatgtcggacggcttcgaccccgccacggacgtcgcgctgccgccggtggtcgccagcgcccgcgcgacgccgccgcagggccgcgtggcttcggaacgcacggtgctcgcgttcttcgccgccggcggtggcggcggcggcgccgtgagggaggcgctgctggcgcggtgggaggggcgggatgaccgggtggtggtgtacggtcgcctcccggcgggtgtggaccacggcgagctcatgcgcagggcgcggttctgcctgtgcccgtgcggcggcggcgagggcgcggccgcggcgagccgccgcgtcgtggaggcgatcaccgccgggtgcgtgccggtgctcgtcgacgacggcggctactcgccgccgttcagcgacgtgctggactgggcacggttctccgtcgccgtccccgcggaacgcgtcggcgagatcaaggacatcctcggcggcgtctcggaccgccgctacggcgtgctccgccgccgcgtgctgcgcgtccggcgccacttccggctgaaccggccgccggccaagcggttcgacgtggtcaacatggtcatccactccatctggctccgccgcctcaacctcagcctcccctactgaattacagaatgaacaacaaaaaagaaagttaattaggtccctgcagtttggaacgcgagaaaatttcacgttcctacaaaatttgaactgttctatgttcgaaacgagaccggccagtgtgatggatctgaccaagctagctaagctaaccaaagtgtgcagtagaacactgtacactgcatttctgcatttatagacaataggttgtgttcgaatgagttattcctaatttctcgcccctcgttttctacacgcagg

SEQ ID NO: 3509 - DNA, 888 bp, Oryza sativa
ccggctaactacggggagtctactcgagctactaccgaaagctagggggaggagatggagcgaggaggaagaacggagggaggcatcaccgagatgaggaggggcgctgtgacgagaggccgacggcgcgggagtaatctctccggcttcgggccggggaagaggaaggagagggtgcggccgaagtccccttccgcgtccttgctcgtgccgactccttcgacacgcgcaacaacgaacggcgacggtgaacagagcacgggggcggcagctatggtgaggaggcgaaaacgagggagattggaggggaaggagctggggtttaaagggggcggcaatgtcggtttgggaaccgacttagggtggtcaaggcgcgagctggcgctcggcggtcgcggccaaagcggcgacagggaggatgacgccggcgggggaaaaaggggaaaaaggagggggagaaaggggcttgcccttttgccgattcgggaaaaaggaggaggggagcgggggcgacgcggcagagggaggaggggcgctgcctccgtcccttggcggcttgcgcgcggagtggcgggggccgggcggtgacgacggcaatgacggcggggcggtttggagcggcgcgacgacacgagcgacaggcgcggcaggcgctgacgacggcggcgaccaggcggtcggccactcggcacgcacgcgcggctcgcaacgggagggcgcggcggatggagcggcgcggctcggcacacgcgctggctgcggggccgagcggctgcaggcgcggcagggcagcggggccgggcggcgaccacgcggtgcgggcgaggaccacgcgggcgcgcgcgcgaacaacagcgcgcgggggccggctttgcgagcggggagctc

SEQ ID NO: 3510 - DNA, 9683 bp, Oryza sativa
ggtatacctgtttcctgatctttggaaagtttggaaatgttaggttgataacatataatacattgataattaatggttggtgagtggaataaagggaacatacttcctcatctgagacccatctcagtgctgttgatagagttcctgaatcagtgactatccttagacccttttgctttgtagtgtccatttgatttctttgttcctcatcgccccaaggtttaatacggtgaatggatttaaaatggcgttgcatatttcttggaatgcgcgaagctggatatatatccacaaaacctggtttgttcataacattttcactgaacctggcacagaaaaaatgagtaagttcactagcaacaagcaaatttatacattttagaacctcaaatcaacaggcatggcattaattacaattcacagaatcaattcagtgaaaagaaaggggcggtagggaaatgtactggacaggcaaagaaacaggaaagccacaatggaactgtgcagttaaatggaaaaaaaaagtaaaattaatagatatccttatagcgatcagaatgccatttgaatgagagaccatttacgaatacacttataagccacatgcatattgtgtgtgtgcaaggagattcaatatcatttctcgcatttctaatgataatggaaaagagatgggaaataaattgaacaagtgcatcattgaacagatcgatatacaccttagcctcatacttagcactagcagtctgtgcataaactaaaccatttatacattagtaatatgatgatgtgaggactactaagaattatttagtaggtaatatgatcccgctatttttaagcattgtaacagaacagctatacagcaaattagcaggcagtaagacagcttgacacacatccctatagactctatgcagtcaaacaagctaaataatgatatattttcagaacagaagcatctcccaagggttaatatgaactcaacaccatatatgttgaacatatatatcttaccaacaagcaaatgtcaccaaataatgagatcgcttgctgatagtaagttgcagtctggcagacatgcaactggaacaaggaatgcaaagctaatatgaaaagttcaacaaaaaatagtacaatgacagccactgtctattatacaattcatgtacctactttcgacccagctgggcaatctcaaggttcagatgattaacatgttcgagtttatctgccatggaagaaattatacttttagcaacactcaagtggaaaacaagaagcaccagtataactctagtaggccaacctttaggaagatgaattccccctttctcaaagtcaacacgcaaggtggtggctgcccttcgagcttcctctgtgagcatgacaccttcgctctcagctttaagtattgcattgtacaaagtagtattggtattcagatactgcatagaatcacagggaaaaaggaaatttaatggttctgacttggtcatttcactaagttctctccctcattttttcctcaaaccaactatttcggtatgcaacatccatgttatcgagcttacttgaagatgttcataaatcctcattgatgccttatctgcctcatccataaattccctggcacagaatacacatgtaattggccactcaaaactaaaacacattgctccagagtatgattttcataagaagcaaccagtaaccagtgtacactcacttatctgggtgcgtattcctgcacagctctgccgaatcaataactgagcagacctaaccaaatcatcaagtataaaacgcacatcactccctcaataccaactcaagtactaattccgcaaaaaaatcattagcagaagaggaagtaggctacagtgttcgatatctcatccatggcgcggacaatctccgcggacggcggcagctgcccgatgtaggccacgagctcgtccgacctgcgcgtttcagtaaaatctcagcagccaatggatggctccagcttccagatgagtaggttgcggttcagtatctccaccccttacctctcgatggcgtcgtcgacgaagcggcggaagcccttggccgtgcgcagcacatcgaagccgtacagcccggtctccggcctcgccgcggcggtggagaaggccgccgccgcggcgcggcggagagaggctgcgcgggagagcattgcggaggcactcagttgattcatttcgacagccacacgtctccagagtctagacctcgccgtcgccgccgccgctgctcaccggaggagcatgggcgagaggaaggggatggggtttagtgaaagtgaatgtaaaattcaattctgtgagggacctttatgagaaaattcctttcgccattctctcctggatctatcttggccgcctacggttcatcgaacggttaagacaagtccaacgtggatgcgaaaaatattcgcagggtgtaaacggaaatacaatattgtatgagggcttatagggaaaactatccctctgggctttactctcctcggtgtgggccgcgtattcttgatccaacggatcacaacgagcccaactaggatggctagggctctcatcttttggcccaatcagcatatgccaatgccaacatttaaattttttaacttaattttgaagttgtttttgagtttttttcatcatagtttcttttacaagattgtcatttaagtcgctacgaacataactgtaaaagttttaatcacaaattatattttttttactaatacgccaaatggcgtattttccgcacatagccatcggatgaggctgtaggtttcgtcgtcagtgcttggctgaaaattgaaatcctctttttcaaaaaggaaaaaaaacagagaggaagaaatccactcaaaatcgcaaggcaactttttaggaagatcaaatcacaggcaattgaagctagtattggcaaactatttgtgttggacaatcacatcgagaaaatatgttgagcaggagtagaagataaacaattcatccattacgctttgatcagcacaggtctaagtacaacacaatgtaagtcttctgacttgcgacattgatacacagcaaaacgaattctgatccaagtacagaatgatgatacagccaatcaacaaacaccgtcacatgtaaatcctctactgtggcataagcgataacatctctgatatggaaccaaaattcttatgccaatacagaccacaacgctaggaacaagctcatcaatcctggaagaccaactgacatagtgcgatgaccagcgtttttgccacctgatggagaggctgcaaacaatagaattaagaattgaggttaaaaaaaagtactctgtaaagtgttatcgtgatgttacatgcgtaatcaattcgaataaacttttaattttaactattttacatgtgagaaaaagaggcagaatgggatctttgttatcctttactttgctaatgctacatgtattcctaccgaagtaatataatgcattgtattcaaataaaatggctacactacttcttaattgtagacacttagaccccacattagctctataaaaaaaagacccagtgtttgctatccctgaacattgaacgcacgagtatccatagcaagtctggaattttgaagaatttgatacatctacttcatggctagtgtgagcgtaaaatgcaaaaatatcatcgctaaataaactgactaacagcagtaggatgcataaatataactctgtaaggcagtctgatagactgttactaatagcatgccagatgcccaggtcaacacaaactgtccgtgttaaccatttctagcctctttcaatgatgctagttagcctgatcacccatgttatttggttgatttgccgacttaaaatgtaacatctttaaataaatttgttcagaccaaactaactcctactttatgcagcatttattatctgtcttaactgctatggttttagcaccataaacattttctaaacaggtagtatcatacagcagtgatgaaccttcaaatcattgtgcttaacagtagtccacagtaatccttgggaccatgtctaatacatgtctaaccatacatattaattcattcatctatttaattggggtccaagttcacatcaaactcaagttgagggatttcttcctacagatctatctgatatgactttatcaaaatgctgctgcttccagttgaaattcatagcattaaaaattatcggaccagacaaaaagtttcaggtagtgaggtatcgcacatataacaagctaagaaaatcttaagtttaaatagccatgcatactatcttcagaaagtatatattacctggaggagagttcgtaggggaattccctgcaaaatattattgtaggacacttatcagaaaaccatacaaatatatgtattaaaattatctaaggaaaaggacggttgccaaatacaacagatatagtagcgaactggtgtgacttccaaaaaaaaatgaattttgtaatgatgtttggtaaaagttaccagcacaacaaaacagtgctaaacaaatctagattaagtttcatggttccatttcatcaggtcaaagaaattagctattttcctagttgatttataaacatcatcccaaatgtgaaatggctacaatactatatccaacggtaggctgagactaatcattcaactagtattatacccaaggcgaactggtataatctgacatcgttgcgtcttcagattaaactacgattattacaggacaggactggggaagcaaaaaacaggaatctggatgcctacaaacttctggtcgacccaaatcatggagcttggtcttatattcacacctaaatgttttttctttgtttcgttttgccctgatagagacagaaatgcaaagccaacttccctacgccacttattgacttatgcaacaaaaaggcaaaaacattcctttactttcccaaatttgtagtaattacctttttttttcgccggacaaatttgtgttaattacatcgacttgtcactagaaatatgacattatacatggcagtaagaacagtttatgcggccgtttgtttaaaacatcctaaccggatttatttcttcaaccacagtgcagtgacttcgatgtgcaaaccatcattccatcaaccaggcaaacaatgcattagcaagaacaaggcctcatatttattcagtgtaggaacagtcaaatcatgctatttgggtgagtttttggataccaatattacaaaaattaacaactcatgatcgatgccacggtgataatttctatcaaaaacaacatattctctctctctctctctctcttttgctgttaaaagaacaagggatagaaggaggaggaggagggtaaaataagttggttaccggggcacatgctggtggtctggctgatgccgcaccgcgtggagaggcggagggcgtcggagatgttgatgttgaaggccttgaagatctccggcgaggcgtagaggtcgcagaggcacttgagctcgttcttcaccgcctccttgagcgggtcgcagcacgccgccggcggcgtgtccgtcccgttcatgtactgcgcgcacggcaccagcttcgacgcgcagctcggcgtgctcggcgacgactgcgccgccccgcccgccgccagcgagatcgccacagccgccaccatggccgccaccgccgcagccatccgcgtcgccatctgtctctctctctctctctcccccacgagcaccgagcaaaggtggtgccttttttttgtgtaagctctggttacacttggtgctgtaggtgcgcccctggactctgtgaagcttttgctttatagaaaaaggaggaattttttttcttcaggtatttgagaacattcagcaattgtacttttcaggttctgactgtgtttagttttcttcaaacttccgaaaaaatccggcacataaaatgtttgaacacatgcatggaacattaaatgtggacgaaaaaaaattaattgcacagtttacatgtaaattgcgagacgaatcttttgagcctaattacaccatgatttgataatatggtgctacagtaaatatttgctaataacggattaattaggcttaataaattcgtctcgcagtttacaggcggaatctgtaatttgttttgttattagtctacgtttaatacttcaaatgtgtgttcgtatacgtcaaaaaaatttttggaggagaaactaaacacggcctctgtttggtttggggattggcaattggacatccaggaacttttaaatttctactatataaatatgtgaaaattccctccaaatcaaaccaggtttgtcaacattcatcaatttggcaatattaaaaataaaaaaggttcagctatttgaaaaggactttgcaaattgcagaccaatttatggtctccctctttaatgccggcttctgcttctactactctgaataaaggtttgaatgttttttttgtaattaagttgtacttgtacacgcaccctctgatgataaaggtttgaatgttttctgtaacacaaaagatacatgttgatgttttagaaaagtttgtggtcaaactcttagaggacatgcctgaattttcaacaatttgcaccgaagcgtagacctagaatctaataacgaagcaacacaaatccatccgaacacctagcatcggatgattatgtggtaggtaactttaatttaagcttataagcgatgagtccaaagtagttgttgtaaatggtcatttattattattatttgtaaataaaagtgcaaagttgatagaaaaaccctctatttcgcttcaaactttaactatactatcagtctattacccccgtaggcggtaaaaacacttgctagcaactgtatggaaatatagaacacgcatttatcctttccaaatcacatgattaacgatcaataatgtctagaacagttagtaaacactacttctaccaaattctacaacagctaacccaggacgctgctctgaaccttccagtcagttgacttctgaattctgaccaagtctcacctatgcctagaaattactccctccgtccttaaaaaaagacaaaccttggtttccatgtccaactttgactgtccgtcttatatgaagtttttttataattcgtattttcgttgttgttatatgataaagcatgattaatattttatgcgtgacttgtctttttaatttttttcataatttttttaaataagacggactgtcaaacgctggacacggaaatcaggtttgtctttttttttttttgacggacggagtagaatgcgaaacagcatgtcagcatcatgtggcgaagagacttctctgtttttccccatggttggagcactgagacagcatgaactccccgcaacctctcagatagtcagatcttgactagaacagttgaacattttgttcccagacaaagactccaaggcccagttcagttaaagtttttcttcgaacttctaactttttcatcatatatcaaaacttttctacacacagaaacttttaacttttccgtcacatcgtttccaatttcaaccaaacttctaattttggtgtgaactaaacacagcctaaaatgtgaattttgaccaaaaagaaacgtcacattaaatgtttggacacatacatagggcattaaatgtgagaaaaaaaaaccaattgcacagtttacatgtaaattgcgagacgaatcttttgagcctaactataccataatttgatagtgtgatgctacagtaaatatttgcttattacggattaattaggcttgataaattcgtctcgtaatttacagtcggaatctataatttgttttgttattagtctacgtttaatactttaaatgtgtgtccgtatacttaaaaaactttacacccaataaactaaacaaactcttaagttccttgtgaagatttggactgagcatttgatcaatgttgctgaacaaccatgcctgtaaagaaagtgtgaagatgtttactgtactggattcctcttgaaggtttttcatgggattgtgatgataatcatgatgattagctccaagcaatcatcatgattaaaccgagcgtgtccgaaaactttcagccgtggatttcagctactcatgttgtccgaagcttctgtaatgattccttcagcaagggaatctccatcatagtacttgccaaaagaaatgagcaaactccgtcttcaggtcgatcaagtacctgaaggaaggtagataagcatggtcattcttcattgtatgatatgcaaataaacagtgtaaagaaaactgatgtgagtatgaaaccatgaagagaatatttgtaaattgcaactgctaccaacttgctgcattaaagcaaacatagtgcatgttaccatctgtatttcactaagtgaacctagttcacatgtgttttgtgacggataggcctccaatcaccaattcaagagtaaaaacttaatttgtatgcattcactttacatgattattcatctcccaacttgcagcctaaaactgaacaatggtcaagagggtagttcatccagttaaatttaattgtaacatttttttaaaaaaaaaatgccgagcaactcaatagcagggagtggagacagctacaggaaccacatatgtagagacaactcataatcatgataattatcagctcatattagtactcacataagtactgtataccacatgggctgcatccaataaatgttcatgttgcctgcttgatcagtgtggtttggcagtctcattaatagatagctgctataagggataaaaaggatgcggtccaactatccaagtccactatgaacaaggcacagcacaatactggtaggttaggtgttgcagttcaagaaacggcacaagcaaaaacaacctgttgttttgcttctaattaaattaaggcctttcttctttttgacccccatgtgaccatgttaatagaatgaaattatgtttccgtcgattcgtcggtactattgcaaaccgtttacacaatcagtgaatcagaatcaaggaaataagttagatacaaaatttggtaactgaaaaattatatatacggtagttaacctttggattcatgtaataagctcgataaacacatgcagcgttccttatctcatctgtggtaccagttagtcctgttagatcccggaattctgttaatcgggcaaatgagaaaacagtagttagaaaatataactgaacatgataaaatgattagatgccgcaatttcagcatatctctctaagtgaaaatttaatctcaaagtgaaacgggaattagccacgtcatccaaccaactactaatagtgttgtagcagggtgcaaacaccttttcctccaattcggtcaaaacactacgaggttttgcaagacctaagtatccagaggggaaaacactcattctgagtggaaactacctttccaagaggaagaacaccttcccaaaaagaaaataccttcccagaggaagaacacttattcgaatagaaaatacctcttcgggtgaagaacaccttattagggacattacataatcgctaatacaactacacatattttggacaagttacaatttcacaggtgtttt

SEQ ID NO: 3511 - DNA, 1980 bp, Oryza sativa
aaagttgtgtttgctgttagagctcgtttttaaggataggcgggagaacacttctttccggcctatccccgatcttgttcgtacctaaaggtcacaacagtggcaccgtccgtggggacggaaagtctccattgaattgggctcaaacagtaaatgcgacgttctcaacgacagaagactgtgccagtacgctatacaggagcttttgcaagcgcgacagctgcactcgagagagagtgggaaaaggcagtggaagaaagtgacttagcaagagcaacggaaacacttgataagctgtgggcagagatggccaagacatccacagcagcaggaggtaatgaaacaactcaagaagaaagaattgctggtgcggtggtggaagaaacagggaaaacacccatgagtgatgtagagcttgctgaattggtccaagcgcaaggggctgtcatggtgagtaaaggacaatatgaggatcaagtgatcagtgtgcaataccaggggctagggaaaagcaatcagatcaggcaaaaggagatgcccagggggagaacaaagaaggagaaagtatcaaagccacccaagctcaagatctaccacgaacccaagctcccagtcaagtacaaaacccatctcaggctcaaattcccattcttacccagaatacacctcaagctcaaatcaccattcctactcagaacctagctcaaaccttgatccctagccaaaaccaaattcctattcaaacgcacatttctttccagccgcatattccaattcaaactcaaaatcctaaccaagtacaatatcctcaaacacaattacatcaaacccacccagttcttcccaatcaaatccaaatcccccaacctcatatcctacaaagtaatatcccacgaacacaactcccacaaaatgatacaccacaaatacaagttccacaaacccaaataccacagattcaaacatctttgcccaacttcacacatacgcaatcaacaaacactcaagcagctcaaaaccatcaccaagtcccccaaggtttttcccttttccatatgcaacaaccagagatgatgtttgaacaagggtacatcccacaaatggccaaccatatacaatatgcaggtcaaataccgaaccaagcctttcaattccagcccacacaaccctattttcaaccaaccagagcaatagatacaaagaatcccttaagtcaaaacctgcaaatggcaccttggccaataaacttcaagttgtccaacatcacaaagtacaaaggagacacagatcccaatgaatacctcagagtatatgagacagcagttgaagcagcaggtggagatgataccacgaaagctaagatactcccaacaatgctagaaggagtagcattatcatggtacactaccattccaccaatgacaatctattcatgggaacatatgagagacacctttcgagcaggattcattggggcgtatgaagaaccaaaagaggcagatgacttgtatgccatgaagcagcttccaggggaaacattgagaagtttcatcgtgaagttttcaagggtaagatgtcagatcaggcatgtagatgatgaaatgctcatagcggcagcaaaaagggcattgctacccggtcctcttcgttttgatcttgctagaaatagaccaaagacagcaaaagacttgtttgaaagaatggaaagttttgcaagaggagaagaagatgagttgagagtgcaagaggaagaagccgtcttgttgggaaaaaagcagtcaaagaacaagcaaatttcccaaggggaagaacaaaagggagagaataccggaaagccctggaaaaagttcaagtatgactataaataagatcagaaaaaacaggtaaattttatcggagatggatccaacaatgaaagagaaaaaggaaaacatcaatgggacaacactcgcggagggagaaacaattgggggcaatctg

SEQ ID NO: 3512 - DNA, 696 bp, Oryza sativa
tacaacatccagaaggagtctaccctccaccttgtgctcaggctcaggggaggcatgcagatcttcgtcaagaccttgactggcaagaccatcacccttgaggtcgagtcgtctgacaccattgacaatgtcaaggccaagatccaggacaaggagggcatccccccagaccagcagcgtctcatcttcgccggcaagcagctggaggatggccgcacccttgctgactacaacatccagaaggagtccaccctccaccttgtgctcaggctcaggggaggtatgcagatcttcgtcaagaccctgaccggcaagaccatcaccctcgaggtcgagtcctcggacacgatcgacaacgtgaaggccaagatccaggacaaggagggcatccccccggaccagcagcgtctcatcttcgccggcaagcagctggaggacggccgcacccttgccgactacaacatccagaaggaatccaccctccaccttgtgcttaggctcaggggaggtatgcagatcttcgtcaagaccctgactggcaagaccatcacacttgaggtcgagtcctcggacacgatcgacaatgtgaaggccaagatccaggacaaggagggcatccccccggaccagcagcgtctcatcttcgctggcaagcagctggaggacggccgcacccttgccgactacaacatccag

SEQ ID NO: 3513 - DNA, 672 bp, Oryza sativa
cagaaagcctttctgagacaggcactttcgatgatgatatagaatccatgatcatggatatagtgtactccaaaagagccatctcccaacctctggatcttaatggctgaagaaaagacatagttttcagtctttgcataaggatccgatagttgcagaattttcagagacatataagtcaccttagtgtaaccttgaatgacatgatccgtcactttgcttgggtcataccatgcattgcggacagccaatataccaaacttatccatgatcaatcttacctatgtcaccaaagtccaatcaagaaaagaattcaacctgactattttcaattcataaagaaatgtttgtgaactggaaaagtctgctattcagttagtcagtgagagttgataattcaagtttagctaatttttacttacttttgttgacacatttactaaagtatccattgaagaggctatcagctaaaacactagaattaaaaaaaacttaccagcatcacgccaactgatgatcgaagaacagcaacaacagatttataatacaaagatcgaacaacaccacctattgccctaatcatattcataagaaaccctgcaatccacaagcatagctcgaggaattttccccaaatcctattgagtggatttgtaggcaagggctgcagga

SEQ ID NO: 3514 - DNA, 4799 bp, Oryza sativa
gaggaggaggaggaggaagtcatggtggtggttcccctcgaggcgcttcccgacgacggccttcctgcagcggcggcggcggaggaggaggacgtcatggtggtggaccgcgtcgaggcgcttcccgacgacggccttcctgcggcggtggccccggtggaggcagcggccccggtgggggaggaccccatggtggtgattcccgacgacgcggttctgcgcatcatcagcttcctcccgctcgagtccgccatccgcacgacggtgctctccaaggagtggctaaggctgtggaaggaggattggggccagaaatccaggcgctacgagatccgcgcccgctgcgcaccttccgtggaggacctcctcaagatcctggaggaggagcgccgcctcgagcgcctctccgtcgtcgtccacaccatcatgaagagctctcacctgagagaaatcatcgagagatccgccgaccgccgcgtcgagcagctccacgtcgagctgaccaacccgaatgttgtagacaaggtcaggttccacttgccgatcttgagccgcgtgatcgcgctccagcacctctcgctccgccaaatcgtcgtctccaagatgcgcttcaagccgcagcagcgcttcaacgagctctcagaaatctgcttccacttcgtctccatcgagagctacatgctgagaaatgtgatcacgcgctgccccaatctccgggttctggaccttcgcagctgctttgacctcgacgccgtcgccatctcgccgggcgggccgaagctgagcagtctcaccatcgccgggtgcaagcatctcaataaggtgaacgtcgtcggtgtaaccagcctccgctccgtcttctacagcggccgcttcctctcgtccttctacctgccgcgcacaagtcgccgctcctccttcaccgacctgtacatctgctacgatggcccgataatccccatggtgttcggtaaatgggcacaggatgcactttccaaactctccaatctctccaacctcaccatctgcagcaattccctcacggcctgtttggttggagggagtttttaggagggattgggagtttagaggaatggggctattaagagttttgtttggttgggagacatgagaattttggtaggatagggatggggaattgaggaaggaactccctccttttcaataattaggtaggggcaggtaattgggaaggaattcctcctttactttttttaagcaaatctcagccatccctttttattaatgacataatctccaactaaactccctatcaatttccatcacctctatcaaacaagatattgggattaaaaatcaaatttccatcttaatctcatcatcaattccctcgtgtaaactcccaatccccttccctcgagttaccaaacaagccgtcaaggtttgttctgttctgttctgttccgttggataaggatcatgttgttcttgttttgaaatcttttggtggactcatcgatgatttgatatccttcagattgtgcctagtttgcctgatgaagaacgaactacccagttgaaatggcttggcggctttcggcgtttgaaagagttgcagttgctcatgtttgacataaagaccatcaacgtgtttgatatctatgcgttcctccagagcttccacttcccaaatctgaccaaactcttcctgcaggttaatacattgcacctcataagcatttctggaatttggatatcgcattgcttaaagtcgtttcccccttttattgcatctgatgaaatctgcatatggtgttctcatctaatcatgatactcctgaacacgattacggtctgtgcttgcagctcccaagaatcagggaagatgtgcaggaggcggtgagagaagatgtgctgcagtcgatgagcgaaggtgtgccagagtatgccttagataaccttaaggtggtaagaatgatgaacttcaacaggaccagaattgagatgcatcttgtgaggtttttcttgaggaaagcaagaaacatcaattcactgcaacttgtttctctttttcacaatgcgattccgttgggtttggctgttcaacaaggagacatcatccaaggagctttggcgagtggcgttatacaagagagcaactctggcgctggtacaacccagccgtgtcattctgaggtcttcatcgatttttagttgccagtcaccagtcagagttatggccctatagcttgtaatatccgagaaactggaaagtgctaatcgacagtatacaaatatacataattttcacctttagtttcttttctgcatcttcaattttagtatcaccagagaaactgaaatgcatgatatccattatccaatgtcttgtgcctgcctgctttgtttttgtgttaccattcgcattatatttttcatagtatatctgaaatggcatctctatgaattgaaaacatctccaatacatctttcaaagccaatttgactatgttaaagactgaattgtgatcctatttttgtagtgtacttctgaactagtcatgatcttcttttcctgtttgttatcttgggtttcagattgcactaacagcgattttggatatactgcatgtccttgtgtttatttctgatatgatctatgggattgttacctacatatttctattaatctatcttcacataatttgtcagaactcagaagtagctcactgaaatgagctgttaaaattctggagttagtagagaattagtttcaaggtttgggttactaatattagtacatagaacacactgctttttccttaacctttactggcataaaatgccaaatgacaacaagtccaatggttcctttctttgacagtgcattcttatcggtgtggtcatacctatctgatatatacagttccacaaatttctgaagttacgtctcgtattatactgtcttgctgctgttttaattctgaagctatcttttgctttatagccctttgggtgactgtatattcttattggtgtagtcatacctgtcttttttgtttatgagaactgtcatacctgtctgatatattatatatactactatacaaacatccgagcttaccttttgtaccatgttgtgttgctgctgtaagcctgtaacagttcccaaagtgtttttcgcactctgttaattactgcattaacatgaattactgcttgttgtactgtttttgtatgtcctgatgtgccaacctagtcctcctagtgatcattattttgacatatttactctttactatctatgtgctagcttaatattcttcctgcttaatattcttgcaagtaggatgaagccacaaattcattcataaacagatagggtcaattcccagatgtcacaagcaacaccatgtcattagaatgcttgagattggaggtaaggagaatgatgtcatttaggtggtgtttgaatctcctaaagatgaagatgaagataaagattatttgaggtggtaataacgtatgattatttgaggtattaattattaaaaacttgaaaaatggattaatatgatattttagaacaacttccatatagaaagttcttacacgaaacacaccgtttagcagtttgaaaagcgtaccacgagtatccaaaagtttatctaacttttgttgaagaaaagaacaaggccttaggatggtttgctgcagcttacagccttacagcagtaggacagcaaactgaggcaaagcatcaacaagatagtctcattccagagtcttaggaatgtttgagatatggtttagaatgttagttgtgataggagctccattcctagggatcaaagttagtatttgcataatggagttgattgtgttattttcagcaagaaaaagatatcttccatttttctccgttttctgtgagtactattccgggtgggaactaggaatggtgaacacaaccttagtctctattcccttgcattacttatctacaccttgaacttgtttaacttacccttgtattagatttagaaaaaatatgtaatcaacgctgataagaaaatttatgaagcaatcatacttcttaaatatggtaggtgttatccaattaatattcctcttcattaagtatcttaaacgcatcttatgataaatgtctgtgtgaatgcgcgagctacttttctagttaaatcaaatagtagataaaattgagtagatagcatgagtgcatgacgtggatgccgagctcgttgatgggccaccatagaaaaatctgctgctagcaacaggtgagatggtgtaaagatcctcgatatattggtgaagtcatgcaaatcttcgtccgctggccagggtctcccctgctcgtcgatgaggtcaaggtatagatggctaaaaggcccgtccggcacgtcccgacccaagcacggcccaccagcgccatcgggctggtacggctggcccatgggctgcacctccggtccaggcacagcccaccagtagtcgggccgtgtcgggccggcccaaagacatgggtggcccatcgtgcctttttaaaataagtctattttccctcccttctatttgggctgtgacatatatatagctaaaataagtctattttctctccctcctctttgggctgacatatatatatatatatatatatatatatatatatatatatatatatatatatatatatatatatatatatatatatatatatatatatatatagctaaattaagtatattttccctccctcctctttgggctgacatatatatagctaaaataagtct

SEQ ID NO: 3515 - DNA, 23915 bp, Oryza sativa
  unsure (1)..(23915): unsure at all n locations
ttgtgtgtcgggcctggcctgcggcccatcgtgtcatgccagcccggccgtaccgggtcggcccaacgtgttggtggagggcccaggcacggccccgacccccgttgggccatgctgtgcttgggccgggccataataccgtgccgtggaccggaccatcgggcctcgggctttttggccatctagcctcaaggttgctcatggatgctgccatgttggtgttatcagctggcatgtatccagagcccatcggagtaacagatggagtaggctgaaatgtaacattagtaatcgccatgcctccaaaccagatttcggtggccttgacaactagacttgtgaacaatgacttggggaagcgaccgatcagttgagggtcattgttaaacccgtagtacaccaaccaatcccctgaagtactgtccggtacatcattaaccaaaattaaagagaaatactaaaaatgtatgcacttcgtccaaaaaaaaacgaatttaggaatagatgcgacatatcctagtacaacgaatttggatcagattcatagtattaagatgtgttacatctagtaataggtttgtttcgtggaacggagggagtaaacaattgtcttaattctcatgtatcactcattgcctggtaccttgagggtgtgtttagttcacgccaaaattagaagtttgattgaaattggaacgatgtaacggaaaagttggaagtttgtgtgtataggaaagttttaatgtgatggaaaaattggaagtttgaagaaaaagttaggaactaaaccaggcctgagtacttttaagttgatataatgcttgtctccatttggtttatatcttatacatcttgtctccatttggtttatatcttatacatctggtttatatcttatactgcttgtctccatttgtacttttaatttatatcttatacatttacaaaatttttttgaataaaacgaattatcaaatatgtgtttaaaagtcaacatcatcatgtttcaattccaatctatactttctatatagttggtacccactaaagctaaaactcaacatgtaagcataccacatcatcactcactagcaattactattctagcctattttaaatcccatgcaaacatggcatatatcatctacaatattatattatataaatcaacaagcatgtgtcaaatcatcttcctcacattattttttcaacatttcaactttcatcatttcgacaatatttaacatatactcatccgtgaatcccgcagcaaagcgcggggtatcacctagtttcttatatagcaatgacgacaaaagaagaagagatgaccggggttgatgagtggataggcgacaaagaaacatgaatgtggcgtttgccatgggagagcatgttataaaagttagtcgatatagcggaacgacgactaaccttcctgatcgcttcagtcatcgatcacccaagacatgccagataatgacacaggaacacacgatatttgttaacgaggttcagccgaagcctacatccctcgggctctgattatgggcgctcctccccaaccaatatagctcctagccgctatgagtccatggcatcgctgccatcctctccctgcgtgtctacgctacattgtagtcgccatggttacattgtggtgcccccctctctatttaagagagatgccgggttacagagtccgactctaactccaccccctaacacctattacaactccaagtccaactgtaaccaaataggactagtatattcgacacctattctaacaaactccaccttggtgaatatacgccacctagaagtagtagaatcatcatgctgatccaccggtcctccagacttgggttgtcttctttgcagcttcaccgcaagccgcccgacgagtctgcgccaaacccgccgccaccaaaagcaattgctatcccagcaaccacttcctcctggactccacctgcaacagtgcaccctcgcagcttgtaaagatgcgactccaccttctctccagtcatcacagtcatcttgcccttcatgatctcaatggtcttcctattccgattaccgcggaatattaacccttcttcatgcaaggttccaagcgaaatcagattcctctttagccctggtacatgcttgactccctgaagaacatgttcaccttcatcttctagcttgattttgacttcactgtcacgcccaaaaattcccgaatagaattccaagcagaatgtgcaataaaatccccgtccaggaccggccagggtacacaaacgacaatgttgacattcagatccacgtcttacaaacatcataaaagtcttacataaatgcagcggaaaaacgaaagacaacaggagctaagccttgactagaactgcagcgggaacaccactccacaggcatcctcgacagcacggacgaagcctactcctcggagaaacctccatctgacacatactcgtactctggggttgggaaaaatagagcaagactgagtactacccactgtactcagcaagtcataccggaataggggtatgatgcagggaattatcaaaggagagctagagtggttcatttgcataaaacgagcatttaaaaacaaaaattgaaagatttaaacagttgtaataattaattaatattgatcatccgctgtccaacgctatcccacgttgcaacaggcctaaccatccacctatactatccaatttcattagactaaactagggtaagactaatcacggtgaatctggttgaccgcccataaccgcgggcacggctattcgaatagttttactctgattagaggtgtacaactgtacccacaagacacagccccacgacacgtttccgtgcgccgacatgccaccacgacataccggaaagaggccgtgacaggacccttcgcataaccccctctagccaagcacaccacacctcaggtttcacccccgtccccagcgggcaatgggcagtcccctctcgtgcctaggtgaatccggaagcgacagaggccgtcgcagggcccgccccgctccatcacgcccacccttgcctggatgcgtcgactagaggaaagctacactacaagcccagccgttgcctacgctggcttgtggtaagtacgataagttcttccagggcatcccgcgaaccggtccttaacttccatgagtgcgactagcaaaaccatgcacccacagcccaccatgtgatttatttttattaaccaacaccaaaacggtggtactaaaccaaccttatcaattgaacctaaaggctatgttttagtgagctttccccattgtgtgctagtggaactaagcatggctaagcaattcctagtccaaaatctattcatgttataacccaagctaacaaaggagcatgatatcaaaatggcatggctgtaacaataggtaaacacctcatagtaacattataaaacaatgcaatatttgaagaaaaacaatagagcatttgcaatataggatcaacatgttcaagtgacaagcatgacttgccttgctctgctgctggaggaacctcggcgactatttcgaagtacaccggagcgtcggaagaaccgaaatctagcgacataccaggcaaacattgcaaacaggctataagactactgaaacagggaacaaaaccattttgaatggattctacacatttttcttgatttactgagacttgaatgggcttaaacggagcacggatgaattagttatgaattttagaagattcactgtgtttattactataacaagaagtccttaaatcatttattgcgcaataaatcccagggctgacgtcatcaagggggcgcgacgccgacatgcggggcccaccggtcagcggctcgggagagagggaaaaggggcgccggcaagcgggccccactcggcagcggcgcacgggtggtcggtctaccgtggaccgggaccacgcgggtggtcccccgccggtccacgggatcgacagcccggatcggcccggggccgattggactgtgcggcggcggcctggctcggctcggctcggcacaaagccgaccggccggccatggcaagggcggcggtacgcgcgcgtccaccggcgacggcaagcggcggcgcgggcggcggcagcggacggcaccccggcggcgacggcgaccaaaggcgacggcgagtgcgggtggtggcggcgcacggggaatcggggaaggaaagggaaaggggagggagtcctcaccggaggggatggcgacgaccggcgacgaggagcgacggagggaggtcgacaagcggcggacggggaccgggacgacctaaagaacgaaaaggaaaagattagagagggagagaggggccatagaaggcgggaacgccggccaaaggcggcggacatggcgactctcaccgtcgcacggtgggaatggtgctccggcggcgaacctcgacgaaggaggggtggacggggtggatctcggccacgcgaacccgacggcggcgacggcgctgtgcggcggctagcggtgaccggagtggcgggaaaggcggcggcaggtagatgcacggtgcgggagtgatggagagcttgggagagttcggcgaaatgggaaaaagagagagggggtggtggcggagcttaaatagggagagagggggccggacgtggccgggagaggcgggattccgccggccaacgtgggggagtgggagaggagagagaggcgggattcgaaaatcgattgtcgaatcccggccgtctcgggagcgcgggcgagcgggagagagggggaagtgggcgcgggagacgcggcgcacgcgcgggcgtggccgacgtggcccggaggaggcggaggcgtgggcgcggcggcggttgcgggcgcggcggcgcggcgcgaggtgggagacgggtccgataggtgggccccacctgtcggtgaccccgggagagaggagggggcgcgggctgagctggggcgtggcctccggccggcccagcaaggcgcggggagagaggaggggaagtgggccggcggcccactaagggaaaaggaaaaagaaaaaagaaaaaggaagaaaggaatttccagggatttaaatattgcttatgctcaattttaattggttaaaattatttctagggctctgaaaattccactaaaaatcctgttagtgaatttcaacatgtagaactcaagaaaaattccacatgtcagattcgattattatttgtattactttcttagggttttctcttgatttgcaccggcattttcttagggtcatttataaattaaattttagacttgggaggagaacttcagggtgtgacaaacacctactcccacggccggataacttgtgtcatcgcctaagtagacaaaaccaaactcaccagacttatatgaagagaaccactccttccttggcgtcacatgaaacgagctagctgaatccaatattcacgcttctgcatccttagactgtgcaattgacatcgtgagaagatcacaactatcgctatccgagtcatttgaagaagtcgctgcattagccttagtttttcccttcagtgttggacactccctgcttatatgcccccactcatcacatctgaagcactgcaccatcttcttctttttgttcttctttaccttatgcccagcatgatcttctttgactagaaaaccctccacttgagatgtttcaccctatttgttctttctcatctgatcacgagccagcaacgcaaaagtgatatctttagttttgatggtctccttgccgtacgtcaaagtagtcaccacatgctcatacgattcaggtaacgaacacaaaagaactatggcattgtcttcatcgtcaacttccacatccatcttcataagatcagtgactagttgattgaaaacattcacatgtgctgtcagatccgccccttcctgcatctttagcccatacaacttctgcttcagatacagtttattggtcagagttttggacataaactgagcttccaacttttcccaaattatctttggtaaggtctcctccatcacatggtacatgacctgatctgagagacatagccttattgtcgcagccgcctgcaactgcatctcctcccaatcgtcatcctccatcttggccggtttgacacccttcaaagcctttgaaactccttgttgagctaacaaatctttgaccctagtttgccacaagccaaaatttctggagccatcaaacttcaccaaatcaaatttcatacctgtcgacgccatcttgccaacccgcgacctgactggtctgtcgccaccagaatactcgcctttctcagtaccgtatgtattcgttttcacaatctcgtcttgtgatctgatctcagatatagactagcaaacccccgttcgctataatccgatgtgactaatcttccgccctcgatgtgcctctgctccgcacgatcttgtcggcctggcttggtccacccgtacctctacacagtaggcctatagggccccttgtacaacgtttgaccaatcccgccgagccacctgcttcgcttgattgctgacgccgagatgtgtagccttcaaaaacgctgccgcttcttgttgctttggttcgtctccctccttggctgcctatttaaagcacaaccaataggaaatcaatgcggccacgagtcggtgtccatacacgactgcatctgattccgtaacaactgcggtcgaattagccatatccgactctgacaagtcgattttttccgccaactcctccagccgatttcttttggcccaccaatctctctctgtcagcttttttacatggccctgccatacaataaacacacatgcatgcagacgctagtgctgctccttgatctgtacgatagccatatatcaatgcaagccaactgcatatacacgtggcctttcgaagtatgtacaatctccaagactgcagcttccaggtccatgcgcatgtgattgttgtatcctgctcgatttggtttttcttcttgcctttgctcgttagtctttgcacgccgtacgtataagatagcacctgtgctatctgtccgtgactatgcacgtaccgcagtcgcagccctcgtgttcaccatccacgaccccgtcgtccaggccctccacgtccgccgcgccgcgccacgctcgtcggtttcgccctttcgtcactggcctcctgctgccgcggatccgcgatcaccgcgtgcatcggacgcgccgtccatggcgctacccctccaatctctccagtcgccttcggccacgcccggccccgtcttccggtcacgttctgccatcgccggtctgatcgcgagcgaggtcgccgcctccgcaacgtcctcgttgtcgccatcgatctcatcgccacggctgacgatctcctgtcgatgcgcaatccccacctcgtgtttcctcctccacatgtcttcttgatccaatgctgaaaccttatgctctgataccacttgttataaaaattagtcgatatagcggaacaacgactaaccttcccgatcgcttcagtcatcgatcatgccagatgacgacacaggaacacacgatatttgttaacgaggttcagccgaagcctacatccccggggctctgattatgggcgctcctccccaaccaatatagctcctagccgctacgagtccatggcatcgccgccatcctctccctgcgtgtctacgctacattgtagtcgtcatggttacattgtggtgcccctctctctatttaagagagatgccgggttacagagtccgactctaactccaccccctaacacctattacaactccaagtccactgtaaccaaataggactagtatattcgacacctattctaacagagcaagccgaggagtgataaagaagtaaagtggcggcgatggcaaccacgtagcacacggagctccatacaactctagccaaactaccaacgaaacaatggcgtcttttgtaagcattgtgtcaagggaaatgcctagtcttttgcaactcgtatatctgaaattctgaatgatgatggggggcctttaactcgacactaatacacaatttgttcaccacttttgctgcctgaagctattatcctttgcatgtcaccaaatgcttcgtcataacttgttaatcgaaacgttaattaatagaaacagttaccccatgaaaccaattttgcattgcacacacaatacacgaacatgaatcatgcttttgcagcacacgtcccacatatagttttgataatggttctgtacacggtataagttttaaaattgttcctccaaaagaaaagcagggaagaaaaaagaacaagtagcagctaccgtagtagagcctgcagaagaaggcaagggagagcaaataaggcaagaaagagcaatagggaaaaagatcgagtggcaacttcggctgtgttgagatctagggtgaaaagttttagtgtgtcacatcagatatacggatacacattttaagtattaaatatagactaataacaaaataaattacagattccgcctgtaaactgtgagacgaatttattaagcctaattaatctgtcattagcaaatgtttattgtagcaccacattgttaaatcatggagcaattaggcttagattcgtttcacaatttacacgcattctgtgtaattagttattttttcgtttatatttacatgcatgtgttcaaacatttgatgtgacatggtaaaaaattttgccagaggatacaaacagactcttcattgatcctctgatcatctccatgacattttgtaagataagccaaaacttgttggctctgagtctctgacctagaggagtgccattgcatacatcacacatgcatgtatattgttgcactactgcgttgtatgattggcctgttgttgttcagaacttcaggttcatggcctcatgggattgaccgagagaggagaagcagcgcagttgactgtctctctctcaggaactaccgttttttaacaaattgatccttttcaaaaacttatttcaaaactagtccatgcaaaaaattttaaccaaaaataggccgtggactcagcgccattgactttggcgctaagctataacgtttcagcgccaacgtcatttgcgctaagctctaatccgaggtggcgtgagtacgctgagtcatcatagctcagtgccaaataacttggcgctgaggtcccaacgatttaaattaatatgaagacatatctagcaaagttccactgatagcataatgctagtagaggtctactctcaccttgaggagcagggtttgattcccatccgacctttttttttctttttagttttccctttttcttctctctcactctttgtttttttctttttctctctcactcactctttattaatatgttttttctttttctatctttatttagttttccctttttcttctctctctcactctttattaatatatgttttttatttttttctctcattttctttttctatctttatttattttttcctttttttttctcgtaatactatcttcaaaatatatgtttaatatgcaaatttttttgaatttgaaaaaaatatattgaagtggtatattatatggcaaatgagaacttaaactgaaatttcaaataaaattcaaaataaaataaattatagaatctgaaaggagcatatacttctttcatattggcactcaaaatcaaattcaaaataaaacaaatttacaaacggaacagttatttttgtaaacaataagagtgagtaggcaagagataaaaacccaaaaatacaaaattcaaaataaacgagttattgacgcagataaacgagcagacctgcgcgcggcagcagcagtactgtaccagtaccctggtctctgaccggtcatccgcatcacaaataaaattaataaaaatccagatcatgtactcctacacgcagggagggaaaagagatcagagaataatatgattcctgtagctcataggtttgtcaggatgatgcttggaactaagggtgtgtttagttggaaaaaaggaaatttttgggtgtcacatcgaacgtttgaccggatgtcggaagtggttttcggatacgaatgaaaaatctaatttcagaactagcctgaaaaccgcgagacgaatcttttgagactaattaagccgtcattagcacatgtgggttactgtagcacttatggctaatcacgggctaattaggcttaaaagattcgtctcgcgatttcccccataactgtgcaattagtttttctttttatctatatttaatgcttcatgtatatgtctaaagattcgatgtgatgtttttgggaaaaatttttggggaactaaacgggccctaaatacaccatccttgtcattatcatccgtttcaaaatgttcagtggtaactaataaggtatgtgatgtatcgtctaaaaaatgtgctatggtaacctatgtgctacctcatgcatgtcgcaatacatataccatctataccagttgatgccacaatggataggcattctgagcaaaggatgtgcttgtgtcaacaatatcatacagccaggagaccaaggagcaaagactgcaagagcaagagcaaacaaccagcttgggcatctctcagcttttcgatcgcctgaggctctgagctaggacagctttttttttccttcttttttttgagcagatgacaagaacctgttgttaccttaattggatcgaacatgttggacctctgtccgtccaccagcccaactgaacaacccaacagcagcagcagcatttcgaacaatgttgtatgagaacgaaccaaccaagaaaaacggagcggtccattagtacgtgattaattaagtatttactatttttttaaaatgaaacaatatgatttttttaaacaactttcgtatagaaactttttacagaaaatacaccgtttaacagtttgaaaagcgtgcacgcggagtacgagggagaggggttggtaaccatgggtgtgtttagttcctgaaaaaagttggaagtttgaagaaagttgggagtttgaaaaaaaaaatttaagtttatgtgtgtaggaaagtttttgatgcgatatgatgtgattgaaagttggaaatagggaggaaactaaacacggcccatgggttgcaaacacagcccaagtgttatctgagtctgactggtggacccacccgtgggacgagcccattttgatgatggccaatatcagagggcactagagcagagctgggctgggcagcagctcacaagacaatcgctagctagctttgagactttgagagtgaaacgagaaccaaccgacacacaaagctcagagacagagagagagagagagagagagagagagagagagagagagagagagagagagagagacatggagtactccggcgccggcggtggcgcgcctccccctccacctccctctccgccgagcgtgtacccattcctccctccggccaccttcattccaccaccgccgccggcggcaacagccgagccgtacgctccaccatccttgatcatctccccaccaccatcaccatcatcggtcttgcattactgggggttggctgttgcggttgtcttggtcgcatgtaccatctccatctggatgggatacatgctcgcaaagttcgagcgccgccgccggaggaggaagaagaaggaggagaaggagaatgcggcggccgggttggcggcggcggcggcggcggcgccctgcagctgcaactgcgcctgctgcggaggtggttcttgtgctgcccgtgttcatatccagcagcagaacattttctcgggggcagccgcaggcgccggcgccggcgacgagtacgacgacgaggatcgctgctgcgaggtcgggctcgcgatggtgctcgtcgcgacgacggtgtgcggctgcagcatcatgtgatgtgacaccgaggcgcggcggcgggcagagagcttcgaggcgtagacggcgaccacgcggcggcgatgcatgatcggtggaaggaagggcgccttcgtatcatctccctaccagtagactagactactctaatttattgcggtttctagtgtttcttagatttttctcttgtactataaaaaataaaaatacccgtgcgttataacgggtgaagtctattttaatcttattattgttatatggtttaattaaaataaaattcactgctagagttcgcttggatatatatatttttagaaaatcatgagctgcatttaggagtcctatcgtctcaagttagcttgagagttcttttaaacagatttcttatgcgatttcttatgtattaccaaaagtgaacgatcttaaaaaccgacgcaaatacgaatatgtatttacaaaagcaagcgaacttaaaaacagactcatacacggatgacgtaccaaaatactaataaaaatatcttcaatttttataacagtagagatctagttgctgcaatgatgaaaaaaaaaacgttctgcttattgagtcccccttccctacccgacgaagctgacggcaagaacgcggcacgccggcgccgccccggcgagacgccatggccgcgagtcgcgagagcgagatgtgttgatgggccacagatatgattatgggccattgcccattgggcttttcacatactttttgtctgtttgcggaaaaagtacaccgaaggtccctcaacttgtcatcgagttacaaaatcgtccctaaccacaaaaccggatatccagtgtcccttaactaatcaaaaccggtcacaatagttacttcagtgttttttgacccgattttatcctacatggcagttgagttagcgtggaacccacatattaggctgccacgccatctctctccctccctcctctctctctctctcactcttctctcctgttgcaagccggccggcggcgaacacggtggcgcggcggcgccatccgggagggtggtgcccggggggggggggtgcacgcggcagaggtcggcggcgccggtgccgaggaggaggaggtggtggcgctgttgtcgtcgtcgtcctcggcgccggggaagaaggtgggcactgcggtggcggaggcgagggggttgccgcggctggtgcggttcgcggagttgccggactatttgaaggacaacgagttcatcctgggacactaccgctgcgagtggtcagtctgcgacgctctatgcagcgccttcgcctggcacaaggagaccctacgtctggacgtaggtcgccgccgccattgctatatttttgtcagtggctactttcaaagagttctaaacttgacgtaatggtgacacttgatacattactccatagaatgaaacaattaatttcaagtccattgtaaattactaaattctataaactacaaaaattactgttgtattacataaaaatcattgttccttttttcagtggataaaaggaatcattgttcctaatatgccatcactaaaaaagccaataagtaaacaaaactagtaaaataataaagtacatattatgagtgcacgatgtggctaccgagcttggagttggtgactgcaaggggacaccgtagaaaaactggtcgtcgacaatacgggtgtaggaatagtacttgggggtggaggaatagccacccaaatgttaaacccgtagagcaccatccaatctcccgaagcaccgtcctatacaaatatatgtcaattaaggagatatatatattaaaatgaaacattacattcgttctcttatttataaacatgagagattaatttgaagctacttctctgttttataatgtaagagtttctagcattgtccatattcatatagatgcactaatatctatatgaactagaaaagatacccgtgcgttgcatcgggtagagaaaatttaatttgtacatatgtgttgcaatggataaataattacatcctattgtttcatttattcatgtgcttatttgaatcacttattaccaaataaaagactatttgtgcgtgcaaatcttgtatatacatgttcttagcgacacaaaagcaaatgttgtaaaataaagtataataaaaaaaaccaaaaagtcgaattcaaggttaagttctaaaatttaaaatttgacttctaggaataagaataagccaaacaattaggccttcaaacacgagctcgatttgtcatccagcttgatctcaagtcggatagaaattgatgacggacagaatcagctggcctcattggttcattgttgctgaggctgattctcaacaaaagcccatcagttcatttattgggctaaataagcatcagccattggtagtggatacaatcattcccgactctttttctacggctgatggaaatgattatgccgataagcatcagactgcttatgatgaaaagcaacatcataagccaattgatggatccgagcaatttcgattatcctttattttaattggcatgttcttttcaaaagtaaaataatcacggcgacacgcaaaggcgcgcgtggaaaacggactcagagggacactacatcgtaagaaaaaagaaaatgatttgacaaaaatataaaattaaaaccgattcaaatacggacgacgcactaaaattctggcggaaacattttcaatttttataatagtagagataataataattattattagttataataatttttaagtaatagttactttaaacattgaatatattatcatatcactctttacgaacattagctctacaatttttaaaaataaattttacacccactatattatattgtgtacccattattatagactaaatttaataaaaaatatttatatatatatattcacttaaatcggtattggaccatcatatctatcttttcaaaaaaataaacaaagccttgaaatgctagaaaatttgagaaaaaacacatatcccttgatttttcaattaaatcgatagatgaccattggattagacttgaaaaatcctgttaatcactctttctaaatcctaatcattccggctaatcaatcttcctatctctaatgcgtaagtacggttcgtatgtaggtgttacatgtaaaaaaacgtatgaccggcaaatcccctctcactgaattagattaaaaagatctaatcccacctgatctccaagtatgtacgtactgttatgtgtgcgtgcacgatcagcacctcctaccggctaccacagtccgcgtactcttggcccgcattttatttacctcctttttttctagccacttctttttccaagtatgaatcggactttttttttcgctgtttttttaacacctttttgctgtttatctttggctttctttacggggcggttttttttcgcgtgatttttttcgtcaaaatcacagacgacggtaacctctggctaaaaatcggaaggtaaagaatgccagagagactacgcgattttttacatgggcctagacgccacatgatttggaacgcgtgggaagagaatcggatgaagaaaaaaaatacggcacgacatacatgcgcggtgaaaaagaaatcgaacaaaaaaatacggttaggtggatgaatcagacgacgtacgaaaatcatgggtaaaaatatcttaaacttttataatagataaaaatataagtaatgatagaaattcttacaatataaaatagagggagtaacaattatgcaagttaattagctaaccttgaatacattgagtgcgatgtattgccttgttccgtttagctcggagatgctagggataacgtcgccgggtcgtgtggatgcgtccttcttaggttgaaagccagggcagtatacgtctacacctgttgttggtgcaccagcagcggacatctgtttttcgagataacttatcagtatttatcagtatatatacaaacgacacatatatatatatatatatatatatatatatatatataaggaattaacaaaaaggataagaaatggaagtagctaaaatactatcgtaagttttttgagtaaaaaactttgtatagttgaagtgtaagggattcacccaccgtacgagcgaggtaaaacacagggcgttcatcgcctggtagaacctacacgatattaagacgatcaactggggattaattcacatcatggcatggtcgttaagagaaaaaaactgcagggatgaattaaacaagtgacctacacgccaaccaatctgaatgccgtcgaaactggactctttgttgagaatataggcatataataatttaatatattccataaataaattatgatattacatatatatatatatactagtattaacgcattattagacatgtaaactaagcagtaaaatatgaacagatcaaatatgcgcaacatgtcgaacacgtatcgaggtggcggaaagaccggttgctcggcaggaactactcgcggttgtgagcatcgacgaaggcgcgcagcacgcgagcggagaggaaggcgagccgtcgcggacgaacagggagcagtcgcgcgaagcgcttcccaaaaaccttattgccgccttctccctgtgcaggacgtcgaaggcagaggttccggagacctgctctcccgatcaccggtgcacgctagcgagtgggatggagtagtccacgagcgacggcgcaacacagaggaggaggcaaaccctagattgatttcgtgtattttgcgtgaaggtggcggctcggtttatatagagataggtcgcttgatcagggcgcccgcacgatctccactccgcgtaaccgaaccggataagtcgcccgtaatttacccggacgatttttcggaatgtttccaaaacaaaacaaatccgaattttcctgcagcaaaacaaaactgcaaaatgaggctgcatctgtgtaagggtgaggagccaattttacggaccattcaacacgtacgtcgtgcacgcacgccgcctgccaggccaggcgagcgagtgttccccctcttctctccaccacacatgcttcaagtggctagaagagcctcctcccttttaaggaggtccccctctcctagaataaacaatgtggtactaaactccatatgcatgccatcccatgaggtgggcttttatgattttctaaagaattaatcttcgaatgggccttagcccatctattaattccaacgctctttgccatcatcattattattatcagtttttacccaaactccggcataactgttcaattggccggggcttaaattgaagccataaacatccatcgttactataaatccatagtagccatcttcttttggttgtgttatataccctaccatctgaaaaaaaaacatggggcagatagataaataagtatttcataaatttatagtaggtgaaaaatgattgattcgtaaataaaccactttacggtgagtataagaaattaccatactaatagaataagaaaaaaaggaaagcactatgtttattgtggtattgggattatattggcatatactccctccattttataatgtaagccattctagtattttccacattcatattgatgttaatgaatctagacatatatatctagagcaattttacggtctttgaggagggtacctcatagtacttaggtaagtactaaatttataatagaaaaagtggtaccttatgatatctcctcaaggaccgtaaaattgctcatatatctatctagattcattaacatcaatataaatgtaggaaatgctaaaatgaattacattgtgaaacggagaaagtattaatgatcaatataaactaagtgtataagaaattatatactacttcctccgtctcataaaaaaccaannnnnnnnnnnnnnnnnnnnacggagggagtacgtacttacagaaataacgtacttacaaataagaaacaagagttatataccaaatgcaaaactgtttctaaatatcacgtcaaaaaaaaactgtttctaaataaactttggtcttgctccgtggaaaattcaacagtagtaagctttgaaaagaaaactcacgtgaacagcctcgctgtcaacagcagcacggttcaatggctgcacccagtttgatctgtgaacaagctctgcaccacccctctcctgatgaaccattaatcccaaggttacatgacttgtttcgaaaacgaaacaaaaaacgtatgttgaaaaataatcctttttttcgaacgaatttgcatcagaatgcgctcatggctatagcatacacctaaatccactacgcaatgacgatgcaccagcaatgtattgcttaccgatcggttcgtcgaaagcacaggaagaatcatcagcaagcagatcagaaggaggccggggattgtcgccatctcgtcgatctcaatagttagcaataggatttgtagcgatatgtagcaaatgcaataggtcgccgcgtggcttatgtaataatatataggttgccgtgtttgatacatatggaatgtgttcttttggaagaaaaatatgggaaatatggaaatcattttgaatgaaatatggaaggcgactcacgcttcaaggtatagatggtcatatggcccgaggcccaacgacctagcccaaggcacaacaatttggcctgcccaagcacaacacggcccaactgggatgtgctcgtgccggcccgacctgacagcaaggccgtgcctaggctgcttcctcggcacggtgggccagcacgaccaaagaaaaatagttgagggatccatcgtagacttaatttagccatttgaggtacaacccaaagacaagaggtatacaaaatagacttattccagccatataagatacaacccaaaagagaagagggaggacaaatagacttattctagccatataagatagcccaaagagataagtgagaaaaaatatacttatttaatagagaagcacgatgggctatcatgccttcgggcccgcctagcacggcccgagtcttattgggctgagggtgcaacctgtgggtaggcatggcctggcccgatgtattggtcgggccgtggctaggcccggtcatggctggaccaggtggcccatttggccatctatacttcaagggggctgataggcttcaagaggcctgataggtgggttttaaagaggcactacactggaccttcaatgtgtcgtaccacgtagttgaaagtgattaaaaaaaggagggacatcttatttgttccagtgaaaaaaacagagaaagccacaaaaaggagggacatcttttatcaaacatcagatgtccgcgtactctactacatgcatgtagacccaaacacactcgtggtgtgcgctggcattttcttagaaatattattattttaataaaaagtcacaaaaacaaaagttggtatccggatttatttgcaaaaatagggacctgttgaactagcttagtttgacaagccaggcaatcgaatggagcgcattcgacgggatcctatcaagtggagcacattcgacgggatcctgtcgatccagccctgagctcgtgctgctgccgtcgtcatcgtcatcctcgcagtctccaccatggtcgtcgcctttcttgccattgtcatggcgcaccccactgcctgtgtgctgcttgctgccgcgttgacgcctgctagcctcccactgctcctcagcgagaagtagctgcccgccatggacctccgtttgatcttcaacgtcggcgtccaccgccacttgcagccgcccgacgagctcctcaacggacatatcatccatgtcctcgagcatctcaattgccaccgtgacttgcttcaacctcttcgggaccacgcgcaggaccttcttcaccacgtggctgtcttctatctcctccccaaggtcacgcaggctcgcggtgggcccgttgatgcgcatcgcaaagtcgccgacggtctccccgtcgcggaacatcatgttctcaaactccttcatgaagcgttgcacactcgctgacttcacgcggtcgtcgccggctcgcatcttcttcaccgagtcccacgcttccttcgccgacgtcttcacggcgagcccgaccttcatcttcggtggtaccgcgtgcaagatggtggccaacgcccgcctatccttggtgaccgcttccaccgcgtcccacaactccagcgcctccaagctcacccgcataaccaaggcccactgatggtagttggccctggttagcagcagcagctccatgacgctggaattgggcacgacgcgctccacggaggcatcggaggtcgagccatctccgatcttcatctccaggctctgataccaaatgttggcttagcctaggaacactctcacactcatgaacacaaacaaaataacaaatgaaggagtatagaggcttcttatagtccggggacacaccaggagctagcctccatgccggccattacgccacgttccacaggacccgcttgatgtcgccgtgagccacacgctcgcccagacgacgcggcttccttcccgaaccatgcgccacgcacaccactcctctaacaaactccgaccgagcgctctgcagcacccctgcactcgcgatcatgactcgatcgacctaacaagacgcacacaacgcacactacacaacacagacacacacacacacacacgcacaggctcactcacgccatgaacataccatggcgagtttatttccagcaattatgagctcataaagtaattccaggccgcttggggagcctggcactcgccgtcgccgtcgccgtcactgtagctgtagccgtcgccattgccgtcgccgtcgccgtagccgtagctgccgacgtcactgtagccgccgacgccgccgtagttgaagacgttgacggtgtatatggggccggtgaagtggggcccagacggcggggccgtcgccgtctccatcgttgtcggctgcttgctgacactctgcttcttcttcttcagttagctgatgcaccaatggattacgcttctgacgccgacgaggagcagtgcggcaacggcgatcgtcgccaccatatacaacagcgattccacactcatcttgctgccgttggcctttgggttggtgttggagtcgacagatgcatgagtgtagatgccgccggcggcaatgatgagtgccaccgccggaggtggaagtggaggtggaggaggaggttgcagagccattgtgtgtagaaagtgaaagtctgtgtctcacattcgcatcgactattcatcatatagcctgatcgaggttgattccatggaatcattgggcttgttgtgaggtaatactagcattgtagtctgtcacgccccgaactagtcccgaccggaactagcccgtgacgctccaaattaacctgttaatcgataccagtcccaggaaacagtgctggtatcacagggagacagaatatcacagcaacagaggtctctttattatagagtagatgtacagtcatgttgggctgcggacagatcccgagctcacaactgcattacaaaaggaaagcggaagccaggacttggaccaatcaacacaggcgcgacttgggaactaggctgaaaccctaaaactcatcgtagccggcatgctcctggaagaactcctcatcagcaggatccgcttcatcttcttcagcaactgggggggattatttatatagagcaagggtgagtacgggagtactcagcaagccatgggaagtaagtgtttaatgcaggcttcaaggaaaggctggtgtttttgcaattaattttatttgaactcttttctgaaacaactaagtgagtgcttctcaaacgacacggatgagacagtgcgtctcgtccggtcggagtatgtgcaatgtatcagtctttagaatttaaacaaggttggcacctggccaacagctttttcaacggccacccgggccaacaacttttcaaacggccacccgggccaacaacttttcaaacggccacccgggcctagctgatcccatcagctacagatttttcaaacaccgaaccccttttcacacagcaatttcacaagcagtagtcaaaccaaactacgctaggaatcacctcacatccgtccatgaccgtgggcacggctgttcgaacagtttgttaacctctgcagagggggtacactttacccacacgacattactaacccggatcacccagcccgtggggatcagccacgtcgggagacctccaagctttcatgacaaggcatttccaaagccgacacaggtttaccatatgccgacgagaggggtcccagaccaacaacaggttaggtcccagaccatactgtgccaggaagcccaggggtcctccccgacaccaccccggcgaatccacatgtctctcggcatcaaggctcccctgataagctagttactcagccaggggtgtcccattcgacccatgtggtcgtacttgtcttatgtttggatgaaattccaaggaattggtccttaagtgcgagagcgggaaaccgtacacccggtacgttccccggtccgcggttttggaaattcatttagtttgcaagcaccgacccaggtgtcgggttttccaagtcttttgtaaaactccagttttacccaagttgttactcagattttaagtttgaaggcgaccgtcgatactggcacagggtgcacgaatatcgaggcgtagctggatggttacaaggggacatggtatagcaattaacaatggaaggatcaaatgcaacaagttaggtaggtctgccaatctgccttgcagacggaacaacagattaagtgcaatcctatcaatgcataatattttgcaagcaatataattagatttcaaatataggctcaaaatgttcaaaggtggcttgccttgctcgagatctggagcttgatcctcgaaatcctcgcactgcgggtcttcgggctccgaaactacacgcaaaacgggacaactcaacaaacggcgaaaataaagccctattaatgacctctaagcgtgccattagatagatctcgagatttgagaaattttggaatttgaacggagtcaaacggatttacggttggaaagatattgaatttctaagattattggatttttggtctaaaggaaaaggatttaattaaatccttttttttggaaaagaaaagaaaagaaaaggggagagggagggaatatagacttccctcgggcggctagggcgcggcccgagagaaagggcggctcggccgagcttaacgggccggccggcccaagaaggtggcccagagcggcccaagacgcgcgcacgcgggagggaggagagagagagccggtggaccgggctcaccatgcgcggtcccgggtgggacccgcttgtcagcggctcggctcaccgtgcggagggagtacgtggctcatgcgcgcgggcgggggagggacgcggtgcacgcgcgcggttcgcggtggacgcggatgcagcgggcccacgcgcagcctcacggctcgcggtggaacgcgcgcacggggagggactgaccggggtcggctcgacccggtctaggctgagctggcgccgacgtggcgcctacgtggctgccacgcgggccggcgggaggtagacgacgacccggccgcgaatggacggcgggcgggcggcggcgagcggcggagcgaaccacggcgatacgggcaaaagctagcacacgggcggttgttcgtgatgaggggagacgagccaacggctcggattcgccagagggagttcaacggcggcgaatcgcggcggcgacaaccggcggggagggaagagggaaacgccgacgaggtcacgaggga

SEQ ID NO: 3516 - DNA, 667 bp, Oryza sativa
gtggattccttctggatgttgtagtcggcaagggtgcggccgtcctccagctgcttgccggcgaagatgagacgctgctggtccggggggatgccctccttgtcctggatcttggccttcacgttgtcgatcgtgtccgaggactcgacctcgagggtgatggtcttgccggtcagggtcttgacgaagatctgcatacctcccctgagcctgagcacaaggtggagggtggactccttctggatgttgtagtcagcaagggtgcggccatcctccagctgcttgccggcgaagatgagacgctgctggtctggggggatgccctccttgtcctggatcttggccttgacattgtcaatggtgtcagacgactcgacctcaagggtgatggtcttgccagtcaaggtcttgacgaagatctgcatgcctcccctgagcctgagcacaaggtggagggtagactccttctggatgttgtagtcggccagggtgcggccatcctcaagctgcttgccagcgaagatgagacgctgctggtccggggggatgccctccttgtcctggatcttggccttgacattgtcaatggtgtcagacgactcgacctcaagggtgatggtcttgccagtcaaggtcttgacgaagatctgcatgcctcccctgagcc

SEQ ID NO: 3517 - DNA, 23154 bp, Oryza sativa
gtagtactttacaccgaaatcaattaatgtaccgcatgattaattaattagtaggaatataattttttttgggaaacaatctcatataactaactgttaaaaaatatatatttaaaacttaaagtatcatcgaacaggttccttttaattcgcagacaatgagacaagacgatcaagtcccacagtgagttatatgctgcttttgggtgtgcaacaactaacctatataatgacccatcctaaactaggccatagctaagttgtttagtagttttttcatattacaagacttttttctagtaaacatgtatatgaatgtgggcaatactaaaaagtcttgtaacctaaaacggagatggtatatactactcctactacattactccctccgtttcacaatgtaagttattttagcatttcccacatttatattgatgttaataaatttagatagaacatcaatataaatatagaaaatgttaaaatgacttatatatattgcgaaactgatgaagtagtattcatatgtatgcatagtacgtagttaatttggtacactcatctattgtggaatagtcaaatgtatatagtgtgtggaagtggaatagtcagatgtatatggagtgatctgccaattaaagtttgtgtgtgtacgtgtatcaaacatgcaggcgtcatctatccggccctgtctgcctgaaaatatatcactgatgcaaagcatatatgctaagattcgggacaaatatgtgaacatgttatttactacagtaaacacggtgtacgcacgtacgaatgtacgagcccaatatatttgcagtaggcttgagatattaattaatttgtataataattaagttatgttcggatcttagttcattaccgttctctgtactgcatgaatatatcccccaaagatctcactgcctcatgcaagcatggtgatataatgcatgcagatcgagtgatatatattttcactggcaatatatatctaggttattttccctcaaaacaattgagaatttgctctatatatacacagtttcaagatttatgacatatacattaagtttccaagcacccttaaaatttctaacattgttaaggctctaaatcaaacacatccaacgttgaaatatgggtatgggcgttaacaaagtaaataagtccttaatttgattttttttctgttaatactcatgcggccattattggcaaatctctatcttaattcttacccctgcaggtaacgcctatagttaattcaagcattatatacctggcctatattaaaccatagtaccctgcttggtcccaactgtgcatgtacgtactgctgcaatgttaatcgaaagatataaaactgtactaaagaactgcgatggcagctagaatgcagagaggcttctgcacgtatgattggtcactggctacaattactggaccagcagctaattgatcaacatgtacatacttcatctgttccagaataaaacgaatgtaagtaagaatgtgatataatctactagtataataaatctagacataactttatctagatttattttcctagattataactcatcttaatgtaggccttgtttaattagattcaaatttttttcttcaaacttcgaacttttccatcacatcaaatgtttgtatacatgcatgaagcattaaatgtggatgaaaaaaaccaattatatagtttgtatgtaaatcgcgagacgaatcttttgaacctaattacgccatgatttgacaatgtgatgctacagtaaacatcgcaaataatggattaattaggcttaataaattcgtctcgcagtttacaggcggaatctgtaattttttttgttattagtctacgtttaatatttcaaatatgtgttcgtatacttcaaaaaattttcgcacacgaactaaacacagccatagattgttttttttaacggaggaagtatatatgatactataatatatcgtccgtacacgtacggtgtatatatgtcagtcttatatactactaaggttgtgtttagttccacgccaaaattgaaagtttgaagaaattggaacgatgtgataaaaaagttagaagtttgtgtgtgtaggaaaattcgatgtgacgaaaaagttaaaaatttgaagaaaaaagttggaatctagacagggcctaatatactatgctcgcatagttgcaccagcagcttggtagctatagtactccctctatcccctaatataagacgtggccaaagttggcacggtctccaaaactaatctttaacttataatttctcatatattataaggtttgtagaaataaaattataatcatatgaaaataaatttaaatctcaatctaatgatataatttttaaccaataaaattcatttcatattataccaagtgttggttaaatgttttaaaggttgaatcttaaaatgtgtgcacgatttatattatggaatggagagagtaataaattaagggagagcaatgcatgcaactacgtggtaattaattaagccagtaaaaatgttatagttgcctggagacataataatgcaacgtacgtacgtgcaggccgggaactagctctcacagtctcactagctagtcattgcatgcccccgtgtactccagccgtctaaaaaataaaataaaccctaggtttccgtgtgtactccttccatctaaaaaataaaataaatcctgagtttccgtattcaatgtttgactgtccgtcttatataatttttttttataattagtatttccattgttgttagatgataaaatataattaatactttatgcgtgacttgtctttttatttttttataatttttttaaataagacgacggtcaaacgttgaatacggaaactcagtgtttgttttttttacggaggaagtacgtacgtagtactacacgtttgcaataatatattaatcagcaaggaaatattcgctgtaaattaatacagctatagctggctagctgctcctactatacgcgtacgcatgcagcgtacagtaccatatttttgttttcagaaaaattaagggtacatataggtgtatatagtagcgtacagtactgtaaatgtaaggagagcaatggatatgatcaaattgtcaattgaatggtaccatgagtacaattatgggagtgatgaagtattaatttgagcatgcatgcaatgcaacggacgtaggagaggaaagaaaaacacttactgaaacctatgtcatgtatgatcttggaagacatacgtataattatatagaagacgtatttacacatacaccactatgcacgcaaccaacttgcgagtgtgccctctctctccccacgcccacgtgggtttgtaaattaaatggacataaacctgctgcaaatttctacctcactaattaaatacctattgaaattgcgtttgtctaaatccacaaatccgattttgctgccacaccaacccagccaacaacaattgtcagaaaatggatgatttaattttgcagaaaatatatggcgactcatgggggtccattgtcctttttccactgccttgtccagatgcaattcaacatccacgatccaacaagattctcatatttgaaataagtattatcccattttcaatctattatctaaaaaatgtgaatagatcatgtgtgtttatcgatctatgcatgcgcattggcggatctagaaatctagatgaatgaatgaaaattactatcatccatgcatgccacagcaatggtcgatcaattgtcgaattgtcatgtaatattttaataaatatgaatttttttccacataggaggtataacttctgaccaggttctaaattttatggatgaagttataaattccactatcaccacaacaatagtacatgcataaagaaaaacaaatgcatggtctattggttttacacaattaatagcttgtgcaaatcgtatagtatcgatccaaggacttagaaatatataaacttatatagtagagctagtactagcaatacaaggatacgaacttctcatgctgtcatgtaagtgtgatataatcagatcgaatatacatacaatgtacaatgaagtacgtgggtccgaactgacatggacagattaatgcatggttgtgatcaactttaaaattgttaaactctaaggaatggaatgcaggaaggaccacgatatatatacacacacacagagcaccagacaaagtctgtttaatgccaacggatattctgcttctcccgtatatttcatccttcctgcatcgatctttcatgcaatatatctttcatgcttattatatagctactccaagaatatgtagttagatccctaatctagattgtgtaatttgatagaaatgatatgtaaaatccatgcatatagaagtctcattcagagatacaatcaattaaaaatacttatattttagaacgagtagaaggttctcatcagctgctgaacaaagcaatatattatttttcgagcggtgaaatgaacagatcaagcatatatcatttttttttcactcggtgaaatccccagatggagcccatgtatatataccgtatctctgtggtgccaaacacgtagggccctagttaatttcttgtcgtccaaatggcgagtctttatatcattggcgccaaattaaactagattggccccagttagttaattaattaattaattaattttgtttttggaatggtccctatcaattacttaattagttgacacatgttaagtttgatatatgttatgttgttccataattcagttggtcacttattagaggagctagggatttgtttcttttccaacaaacataacttaatttattgctgttgtgcacacatttgtgctagcttgatggcagatgccagggatgtaaaatatttttattgtcttaaaaaacaaatgcataaatatatgctactgtattgggtagtacagtctcatatggaccaaaattaaataagctattgagctactagcggactagaactagatgaaacttagccatccttgtttaattaccgtaaaaaaaacgcatatattaatcggtaggtgaaatatactccctccggtaaaaaaagttactttggttagtgtgaagtcttaaaacaatgaatataaatatctattatattttaaagatatttagatttcatgcacatatgaaaataacattctcacggattattatttcaccaaattaagatgctatatatcataagagttgtagtttaccaggtttaaactttaaacataaaacttgtttaaaactccctgctagaaatgcttgtatggtttagtagtagaaacgtggacttgatccggatatataggctgccaataatgcaatgacctgcaaacagagctactactagtgcagaccatgcgtgccgattagacatgccctacccattctgggaaacaggtttgcatggttggtgatcccatgcctgcttgcttgttgcatcatcatgtggatcgatcgatggatcgaattcttaatcctgattaattaattttgcgtgtactttggagttgggatcatggggatccgagcactaaacttcctcatgtcgttgactccatgtggcactggattacattttttcactttgggatcatcagcttagccccacggcaagcaagcaactagctcgatcgggtgaataataataatctctctttctttggacttctcgaaactgaatcgagttacaagtccaacacaagcatgaagaattgcaatgggctatcgcaactttcagttaaaaagttcagctaatattctagcttgggcagctggttaatttagtactccgatccctctcttcctaaaaaatatatataggttgtttacgaaagataaaaaaaatcccttttaatcagctaataatcaaaatttaagttttgaattgttggattcccctcttaagcacctaattggttaaaaatgcttaaattttcgtgtattgaaatcattgttccagaaataatgatatgtgtacaaattaaatttaaattgtagaaatagttatatttggggatggagtagctctccggcttaattacatttatttaactgcattgagacaaaattaattcagactactacagcttaattacattgattaattgcattgtagacaaaattcagactctgggccaacgctagattgagttttattttttattttttttgggggggaatgggtaggagctctaccatttttttaataggagagaaaaaaacaatagttcacctcaaggattgagttggatcgatcagatatcattccgaccaaaacaacttgctcgatcgatccagacgggccatcgatgtctgaccggttgtcgacagattcgtcaggaaactcgctctcgcatgcgtgctcccgttactccattgctgggatgcaaactgcaaactcgcaatggcgaattaatcctgacgcgattcatcctctttacagcttagcactactccctccgtcccatgataattcaactcctggattcccaatgcaaacttagtacaaccatgaaaataccgaaatgccctcaacaacaacattacacaggattgtactgggttctctgcactgtcctcactgaaaaaaaaggtttaactggattctctgcacgcatcaattacacaggtatccagcaaaaaaaatgaagttttaaattgaatatgttaacaaaaaattaagaacctctagtctgaaaaaagaaatcgtcaaaaaaaatactactccacaatctacaagatggtttgcatccataatctgttaaaaaatacttctccacaatctgtaaggagtaggaattaatctgcaagaactagaaagaacaaagaaatgtgtttgcatccaccaaggtggcctgtagtcatgtgtgtatttatccagattgaccctgcaagaagtcatcaccaaaatccaagaacttagtatagttaacaaggtgaaagggcagaaataaacaccagagaagaaagagtgatggaaaaagagtggtggaaaagtgtacttgggtttattctaatggcaaagcttctcgaaccacctcagcgctgggagacacaaaatcgttggctccttcatcagatccgccattgcaaaagcttgtgcatcaggctccctgcaacagatccactggcgctggagaccataggcttgcgcctccgccgtcgtagccaagcagcacctacatgttgcgttcgccttctcctgcatcacaatcgcaagaccctacctctgccgccgtactgctagtgcctcatccgagccatctcaatccgccggggctggcgccgcccccgccgacctgtcgtatccatgacatcacgggaggtcgcagggagggagagatggatggagcgtggagggaggggaaatgactcatcgccgtcgagggataagtgaaggtcgtgaggagagggaggagatgagaccgggcggtggtggttttttttttagcgcggttgtgtggtgggcgagaggagagagacgggcagggataaggatcattgaatatttctcgagtgttacgcagaagtcggttttttctgggacaaatcctcaccccgatttctttctgggacggagggagtatgtctgcaggcaatgcaattctctgccgatgcaaccaactgcagcctgcaggattgcaggcacacacgacggaacaaggctgcgcgcgtcttcctccggtggagatgattggttgcgcaagcgcagtacaggcggcgacggcgatcgatcgatctggatatcaacttgcgcagtggcaggaaggcggccgggctgcggcacgcgtgttgcaggttgctgtcagagtcggaagtggcgaaaatattaagcacacgttactgaactttcaataagattttgatgagatcgtagatacatcgttagttttcgtctatctagcatgcgttagaagatactcccttcgccccaaaaagaattaacttagaagaaaaatgtatgtggacacctcatatatccacatacatcaacttaggaggggacataggttaattctttttgggacggagggagtgcattcgtagatgagtatagtattacgtctgtagtaatgtgtgtgcgtctgtcgtgtactccctccacggctaaagaaacaaatatagaaacggatataacatattctaattaatgaatctggacaaaagtttatctagattcgttgcaccaagtttagaccctgtttagtttcaggggtgaaaagttttgatgtgtcacatcggatataggacacacatttgaagtattaaatatagactaataataaaacaaattacaaaattcgtccgtaaactacgagacgaatttattaagcctaattaatatgtcattagcaaatgtttactgtagcaccatattatcaaatcatagaacaattagacttaaaagatttgtctcgtaatttacacgcaacatgtgtaattagtttctttttttaatctatatttaatactttcttcgtttcataatgtaagtcattctagcatttccacattcatattaatgttaataaatttatatagatatatatatctagattcattaacatcaatataaatgtggaaaatgctagaataactaatattatgaaacggagggagtattttatgtatgtatctaaacattcgatgatagggtagaaaatttttacgtgagaactagacatggccttagtaattgagaagaaaaaaaaagttaggcaaggcgatcgatctctccgacatggggagtgattgggaacacctggggccggaaggtgtccgtgcctcggcgcctcagcctattggaatcttcatctttagggatggttgattggttgcttcttggttgcctccagcttgcagcaccggccaccggcccatcccgactgagtttgagcctgccactgccactgcccaggcccacccccccttgagcatctccaacccacacgactcaaactgaaccaggccccccctgtacttgatgatggcaattgcttcgaaacgccactaaatttcacccgaatttcgtcactttcgtacctcattccaaacataactcacttccaacacgagtaattttggatggagattcataaatagaattcaataattttgtgaacttctcatgttgtatgtgtctttattagttggtgtgctcctgtttttttaatgactatatttctttattttgttgaattgctgtaataattggttgtagctccctgaggaaaggtcgggattctattccattatcctaaaaaaaaataactcacttccaacacgagtgctcaatggaatattctatatattctcgcaaaaaaaaaaagagaaaaggatagagtaatatatattcaataaatgagccactttcaggcgtgatcgaacgacacaacattgatgggtgccatacaggcagccaaaaagaatgataaaaacactgaaagagagatcaacgaacgcattgccgcgtgactttacaagcaagtgatcacgccactatcattgacgttacagcacgctaaaaagcgcccaaaatggatcacgaaaagagcgagagagtagaggattagggctaaagttacaacatacatggcccacacggagtatggcgactgtatatgtacagcgacaggtataatcatacaggtgagactcttcagaataccgaatcattgtcatacagtgctccatttcatctcgacgtgtaccatcccgttcctcgagttgatcagatggtatttttcgttgatccgtccgttgttcacgacgtccactaggtttatatccacatgccccaatgattcctgaaattttcggagaaatgagaggttgattttagaaggcactatgaactggatgtgattatattctctctgtttttttttaacaactggttgtgaatatcattatcagaagagatggttttgcaatcagcaggtaacaacagtgactgactgaccttattgcggaagggaagccggagcccacggcgtttgcttactacttcgatgtggatcttatcatccacaggagcctcatcaaccatgaactgaaactcttcgttccatcttggatctcttgttttcttgattatctgaaatgccaagttaaacattttaggttcacataaaagtattaggtagtactactatgttcttaagcgcttttagttggggtataacgtggaactacaacataaagttagtgtggcaaaactaattccaaaaataaaataccttcgtttccttcctttctcccctaaaatgaaccacggcatacggattagtatgacgctttccctcgacgtcttctgcattttctactgaaaccaacagcaaccctccactaggtgggacgtccctttttacactgacattgccttcaccatctgacatcagaatggtactgttgctgtcatctctgaagggatcaaatgtcagctctacgacaagctttcctctgttcttcttgttatgaggatcatttgggtccatgcttttcagaaggtcaagtgtgaacagtttactctcataaggagtaagcaagcggaggggaactacttgcatacccagtttatcatgcattttaacctgcacaaacagaaaaaggaaaaggttattgttatttcctacctatgccaagcaggaaaagagcatagaaataacaattactgctcttacaaatgacaaaccaacttatcagaagaaaagttgcatacagcaaagctaaaccttttcccaatcaaacatgcggagctcaaggatttgtgtttcaggatccttgactataaatctgaagtgttcattccactcaggattcaggttgctcatcttaatagacgtcttctttgaaggcagtttctcaccactcaaacggagcttgacatagggatcagattttccaagcaagtccatcttgagaagattcatggctcgaattacctttacatgtaatattccaactggtttctttgtcgcaccactgcaaatgttccacaccggtaatatgagaaagatcaaattaaactggagtacattcaaaactaaaacaaccttgtttcagctatagaagccccattaacaatgttatttcttttgcactaaatgaataacaaaattatgtttttcccaacatttaatttccttcgccacgtacaaatgcacttcctttttaaacgggtccaaggatagcaatgtttattgatgctaatatgttttctgggagactcttatttccaaattatcttggcaatatatgtctcaaaaagttcatgttgaatgagaatatactcgagatagaagattatcaagatgaagacaggatagacatatgcaactcggcatgcaaatttggaattaataaactcatccaacaacttctcattgtgatccttacaataaaaaaaatatggatgtcatttgtaaagaaaatcacctcgcttcatctaaaataggaatttgtataagcttaggccagtgatacaagtttgcgatttgctttgatattttctcctgtcagaaagcaaaaaccactaataattaagaagtccacaagctaggaacatagtactggtacccaagatagtgaaataaggaatcgtagtagtaattaaatgggtacaattaaactacaagagtccatcaggacgttcaaattcagtgtcctctgtgggaatataaatgttaaagagaaaattagttacccggacaaaccgatgcaagccaggtattgccatgacatctccacccaacaatttgaatccaaagtcgatatgtggctttataataaaataagagttagttttatttacagagttgttttaacattgaagaaacagattaataccttctccatcagtgaaacacacaagtttgcaaagcagggaaagcttggcacaagaggcttcagagtcacacgtggtgtcagcattatatgtaaatctaaaagctgaaacagaaatatgatcagtcagaggactaatagtccattctttagaacgagataagagaaagctaacctgagccgacacttggaaagaatgcaccttcactttcacaattacatttgctatgctggcccaccgaatcacaggttcaattaccaactctttttctctcatttcataaactttaattcctgcttgtcaaaatatcgagtagtataagaatcaatcaatcttaacaagagttgactgacagcgtaagtgcagactacagattttgaactgctctaccaatctatattatttacaacatagacttgagttatacaaggatacagaaacactgtacttataatgataatcatgatttgaggatacaaggtctgtgtcactgaacaaattgcatcattacagaaagtactcttacagaaatcaacagaccttggaacgtaggaggaagagccccaagtgttaagtgcccaaattcaattgattttattccatattgtccaacatattgatcaaatgttggtctgattacacttcttattgtgttgcagattgcctgatcaatgagtcaattgagtcttaaaaaaatgaatcaattgaattacccaagctgacaatggttcgagaagaactctcaacgctcagatgatgaagcactgaatattacactaaaacttggtagcaaacaggccatataagacttgaaaataccttatcaaggaagggccacatatcaaaaataaacttgttaatccagtcaacctgcaaaaacataaaatgaattctccatttcatgaattgagtattgtgtctttaaatgaactatatgtaatgtagcatttatggtgtggataaaaagaaacaagaacacaaaaataaatacaaagtaccagcacacattctctcatatatgtgcctcagtcctcaagagcttggctatttagcaatttatcataccgatcaatatgatttcttgaccagattgctaagctaaaagaaatggaatcctacaatagattaggataatggaagctgtcaccaccaacagcgtaatcctctctaatttcatttgtcaaattttggtattaacatattgtatttatctctctatgaaatattttttttttaaaaaaagaaatactctgaaaaggggataaccaaaagatttccaaataaattgttgatatgtgaaggtgtattctaattttttttcttttcatgggaaatacaaagatgctaagataattaaatttccataaaagttacaaagactccatatataatatcctacactcatgttactcaggggcctgttatacatacttctatattatcatgaatgctcacgccttgttgtactgttgacatttgacaactaaacagagattgatttacgacacacataatcccaaagcaacaaattataagtcgtttaaatagtagcgcgccatgtttatatacccacccgttcataatctggacacttcacccacaacggaatatctggtatagttgtctgtaatgtctcagaatccaagtcgcgtagtggtctaataataggatcctgcaaaagtcaacagtcagtttccctcaaaaaatgttgagatcaaatttgtactatagtatttactatttgggtttgtgtaagattttgaatattaatttatgttgaaccctgcttgatagtagtatgtagtaaagcagtggagctcaagaggatcaaaccgtctgaatctaccatagttttctggaccctggagaggcaggttgaaaatgcttatacagctccatccagtattgaccattggttgcaaagtgaaatagtggatatccaacttgactttcagtcagattaatgtcaccaaacactggtggttatgacttttcttttacttagcatagtggatttgattatttcttttcttatgaagtaagtaatccaattttcgttagtctcaacataaaagggtgcatcggagtaggctatatacattaagcaaataaccaagttggatttttgctctgtcgcatctaaccatgtcgttctcattccaatgggctaacccaccctgtaactagctgaaatgattctaaccatatcagacaaatatcatatgtactactaggctaattaaataacacgccgtgcactacaaaatattctgtattcatatgcaccaacccgtttcacattgctaaaccaaattaattaacaaatgcatataaaatacatcttgtgtttttcatgtatttggaatattcgttcagtaatcccatagcaatcccacttgtcccaaataatcccaagcaaactcccccagtacacatcaatatatcgcaatctaataaaatccccagtgtctagctggcgcatcgaaattagtcaattttattgaaacaatctcactaaggaagcatatgtcagctcacggaggcatcgcaattggcaagccggaatcggatacgcaagctagcaaagcaaagctgttcaaagctggaactgaaaagtgagtactggacggcgaaactggtaaagagacgtgcttagtcagagctgagaaatggcactactccagcaggggaagacaaggactttggagcacacgtaccacgtcccgttttccccacgtcgcatcctgaacaatccggtagtctaatcgtacgggcagaagaaatcaagcacgtcccaatctcggatttaatttctacaaccattttgttgggttagttggtgtgcacaaaacctcgatcgaaatccatcctgctgctgttcatgagtaattttgatatgataaaccgcacacaaatcaacaaagtgacagtacacagataacgaattgctaacgatgaatgcgttcaactaaccactaaattgctaggattagtacaggacgggaaggatcgagaaggaaggaggcgatggatggactgacctggagacggcggcgaggggcgaacaagcggaggtagacgaggtaggcgacggcgatgccgagggggaggccgacgccgaagccgaggaggccaccgacgagccccatcccgttcccgcccgctcccgcgaatgcagcggcgcccgcggcggcaaccgcatgggaaaccacaagacgacgatgggttggtggccggccgcctcccctccctccccagctacccgccgcggataaagtaatggccggccggcgaggcggcgagctcgagctcctcgcctcctcggagacgtcgagcgagacgaggcgtgagcgggagccagcaacgcgccaaaagcttagtttattgggaggtagcggagaagcggatgcgggagagacagcggcgtgggtggtttagcttagcttatatgggtcgctcgccgccgcggcaaaaatccgcggaaatcctcgcgtttccggcctcgccgcggcggcaaaaatccgcggaaatcctcgcgtttccggcgatgggtttcgcatcgcgcgtgggcttttgcttagctaacaaggctactacggctcagggagggggaggaggaggaggaggaagcccagtttcttgtctcgtaagaaatctccggaagcttcgtgggtttagtgggcctggcccatgtagggtgaaggttgggcccacgctggtaccaggattgcgagacaagctgcctttaaaacggctggccttctcggcgcttctcttcttcctcctcctcatttcaaattcgaatcagggcgagttggcttctcggagaaggcagaggagagagagagagagagagaggcgggatggtgaagcggcagcgggaggaggagccggcgacggccagccaatccggcgacgacgattccaactccgacgagtggaaggactttctaaacctagatggtggcgaagaggcggcggaggtggacgacgactgcaacctggcgccgccggagaaggatgcagaggcggcgaaggcgagccaatccggcgacgacgattctaacaccgaccagtggaagggctatctaaatctagaagatggcgaagaggcggcggaggtggacgacgaccgcaacctggatcagccgccggagaaggatgcggaggcggcgaaggtggacgtcgaccgcaagctggatcagctgccggagaaggatgcggaggcggcgaaggtggacggcgaccgcatcacggcgctgcaggagaaggctcgggtgcgcatcctcgacttcctcccgatcaagtcggtgatcctcatgggttcgctctgcaaacggtggcgggagatgtacggcctctactggagggatgtcgccgtcgacgtcgagctccccaccgacggcgatgcgctgagcaagctagaggaacgcgcggggcagcaggagccgaaacgccgcctccgctacttcttcctcctcgtcgtcgagagaaaaaatgttcagagagaatacttcaattcctgcctcgaatacgccggcaagtgctctcccgaggtcatccacatcagtgatcgaggaggagcgggccgcaagtttaagatgcacctgacgagcaaacagctcgtgcgcctctcgataatcggcgtcgcgttgggtcatttccagggcaagttttgtgaaggcgtctccttccccacgctcgaggaaatccacatcaagaactccactatcaataaaatggacgacctcaagaatctagtcggcgcgtgccccatcctccgcgtcctcgacctgcgcggatgcaaaaccatcacccaaatcgacgtcgacaccgctggagagcacctgatgagcctcaccgtcatggactgcgaacgcgtccgacggctgaccgccggcaaacacctgcgctcctttcgctacagcggtaacttcctgacgtcactgtcccttccggacaacgactcgcttgccgacctcttcatcggcttcccgagaagccaatctaccaccccggggcccgaaaattcgttcaaacgcctcccagatctctcgaacctcaccttcctcaccctgtgcagcacttctctccgggttcgttctttttttttctctcgatcatgttaatttcatctgatttcattttcatctcaatcgtgttgtttccacttgattcacaaggttgtttgctacttctgattttcaggctgtaactgtggcgggtaataccattcagacaaacttgaggagtttaagagagcttcagttgctcatgttcaaattggaaccgatcaacctcagtgacgttcgtcgattcctgaacacctgcggctactaccctcagctgacgaagctctttgtgcaggtcaccactcaccacctgctattccattgcttgcattgcgtctcgatctgttactgtttgactattttgtctgttcgagtggagccaatgttagtatagtttcttctttctgatgattccaaattatccctttgtgatttcagctcccagaaagagattgcacatacacggagaacactagctcagagaatgtggagggggaacaacaggatggcttcgaaaagcttgatgtggtaaagatgacgaacttcaagtacgactggaatgagattcggctgctgcagtttctgttcaagaaggccaaactcctccagaagctgatactagttcgtcccataccagtaccggtagatcgccccttccgactccaggttcccgcaaatgtccagctaactgattgtgctgatgattctacagtcaagtcatttcattcagaactccttacctcgaagacgaactagtgttcagtcaatagtcgagctgcttatagttctacagatctggagcattaataggttggaaaagagatacaggacaagataacatgtgcagaaacaagtacagtctcgtcataccttgatttcttttttccttctgttttacttgaaaaaaggtgattgaatgacttggtatttcactgtcaatttatgatgtatttggcattttagcaactttagctatacatatgagtttacagtgaaatatgttcttacctacttctgtggaaaaaggattagtacaaaataaacttggatgcagaatccttgggcactgaagtggttcctttctgtgttcttttgccacaatgcgagttacaactgaaattttaatcatccatgtgtaaattgactttctgtggatgtgatagctagatattggatattgtcatgtcagttatgaggtttactaattgtttcttgtcaatctgaaaagagtttaggagtttacctgaatgtaatttgttctgcattagcatagtttagttatggagattgatgcggaagctgttatgttaaacctgaaagttgatcctgtaatgtaaactgaactttgtggatgccatagctagttttgaatatttctattgtcggttatagggattactgtcctcctcaatttgacaagattacctgaatgtttgttctgtgttagcataatttaatataggcagactgatgggatatatcaaatgggagattctgccattgtacctcatagattatttgtttactgatactagttcaagttatgaaatgcttgatgtgatcctcatgagccatgatactagtactgaagagtatagcaaagtatgaaatgctagatgactctgcagatttttgaagatttgtagattctcctctgcctgttctttccatttagcagtacaagtcaacatatttgtttcggcatatgtttgcatcttaactgacaccatataccttgtctttttcaaatggtgagttccataatggagtaacagattaccagtattttcacctgtagtttcatagttatttgatccatgtttgcaaagatcaaaatggacaaaaacaagagcagtgttgtagctagtaatttcgagatttttaactatttggacgggttagtgtctttgtttttatcgtttggaagggtttggatttcattcataagcatgaaacttagcatagacttgcacattaaaacatgacatgagaatgccatatccagctgcttggattgtgcagttgttttagctaaagtattatgtgtctgtaacgtaattgtgatatgtgatccctgccgttggaagcatatggactcactcaccctacagcaccactcgcaagagaataaaatgctacacaacctcatgtgttatgcaaatcaaagaaactgaaatgaaaacggaaacccagtaaatgagtataaattggggaagtggatttttgtcccttgaggggacatcccctcgtcttgtgcatggcgtttaaaagttatcattttttttaaaaaataatgtcaagatagatcaatatatggtatatcttttcgcgaacatgcaagttaaaattcgacttgtgcaattgaaagcaaaaagtaacaaatttgatcgtgaattaccgttctatttatagtcaaatttgttattattgtttctacttgtataagttgaattttaatatgtatgtttgtgaagtgacatcacatattgatctatcttactatttttttcaaattttttaatggatttttaagtgacatataaaaataaggggatatcctcttgaagaattaatagagttttccataaattcgtgacaaactgaaacataccacatgattgcaattctgcatgccctcttccccttgcaactcccatcaaacccgtataaccaccacaagttcactgtcatattcaccggcgtattctcacttgccccttttcacttgtttaattgagtataacccctgtgcacctctattcttgtgtgactaagtgcaggattgcagttcctgcattaggggatcacactgtaacatctggattcgagtgaaattccccccaaaatgatgaaaacgttcagcaatgtagcaccctcaaacgctaaaaaaacaatggctatatataatcccccgaaatttccactcatcataagcacaaggagtccacaaccgccacaaccatcacaagcactactgccatgacaatctgcccgaggctcgccgccgcggcggcccgccggtgcgcgctcgacggcttgggtatcgtgtccgggagcgcgcactcctcgccgtcgaagtagagcctcttggggaagccttcccccttggcaatgttgacgttcggcgcgtccttccgcgagaaggagatgacggactgctgcttcccgggcacccttgggtcctccggcgtcctcccgtcggtgatcggctcgaggtaggtgagcccgggcaacccctgcatgaagatgctgttgttgaacggcgcccccatcttggtgccgttgaaggagtagacgttctcgtagccgctgtagtggtcgcgcatggtgacggcggcgaaccagtccttgaacgtgtagtcctgccagttgaagatggtgatccgcgccgcccacccggacttgtagttgttcatgatgtgccagttgacgctgaggccgcagttgtcgccgcagggcatcgggttgggcacgcggcggtgcttgatcttggcccaggcgcgccccttggccgtgcggttgtcgaacgggatgagcagcgcctcgggcggcagcggcgtggcgcgtgcgtccgcgtcgcacgtcgccgtgtcgttgccgccgccgcagccgccgcagctcgcagtgcgcaggtgttgcacggcacgacggagtcgtcgtagtaggcggagaaggagacgcagcacttggcggcgcgcctcttggggcgggtgatgttgcacgccacctgccacgacgcgacggccggggtggacgacatgagccccgtctggtcggggaacaccacggggctcaccctcaccggctgcctgcacgcgtactgcgggttcagcttcccgatgatcttccagttctgcggcgggtacagcgccgtccggttgaggtccggcggcagcttgaacacctgcatctggaacacggcccgcgacttggactcgtccatggtgggcggcagcagcgtgccgttcttgcagcagaaggggatgttcccgacgtccttgtccttctcgcgctccggcgggaggtccacgacgatgggccgcttctcgcagctgtacgccggcgtgaagtcgaagtccttgtagtagccggcggcggggctgtacacgcaggcggggccttccttgttgagcgtgtacgcgccgcgcattttgtagatgaactcgccgcgcttccactcccaggtgaggttccagttgtcgagccggccgatggggctccagttgtcgatggtcacctgcaccatgtagttgttgccgaacgcttggaggacgtcgtaggcgatggtcaggtcggccttctgccgcggcaggtagcgggtggtggtgttcaccttcttggccttgaattttgggtccttgacgcagcacacgtacatgacgctctgcttgtgtgtgggcttggggcaacggaacccggggttggacagcttgatggtcctgggcatgggcgctgtgggcggcttgacgccgaactgggtgccggtgatgtcgatctgggcctggatctgcgtcaggtcgccggcggtctcgatggagttgaggaggttggccatggggtacccggcgaaggtgacgccgccggagacgttggcggggaggtcggtgccgtcgaggagcacggcgccgccgacggtcacgaggatctccttgtgctggaacccgacgaacatctgccacgccttgaggtcctcggtcatggtgttgagcaccgtcgccgtcgccttgaacgcgaacgcctgcgccgtcgcgttcttggtccgcgggtactccttctcgcgctccgtgaacgtgtacgtcaggaacgcgccgttgcacgcctcctgcgccttgaacgacggcttctcctcctcctcctcatcctcgccgtctccgccgccgccattgttgtagtcctgcgcacgcgcgccggcggcggcgacggcaaggacgacggcgacgcctaacaaaagcgccgcccaccgccgccgaagcggcattggcacccccgtcctctgcccagctaagcgcgaacggaggagaggcaacaagcgttcgccggctcgctcgaccgatcgaccgacgggcagtggtgggaagcaaaggcgttccagcggaggaggaggaggaagaaggtataattaggcatgcactgtccgtggtggcagctcgctaaaatcgaggaggcctctcgtgcatgcgcgcgtgtccgtcgcgttgcctcgccgttgatggttgcagatggccgacgctggtttcgcgtggctcgtcggacgaccgagtcaaattgaccggatttggacaccgtcgttggcgctggttcgtctcccccgtgtcaaccgggcacgagccatatatattctaaagttattcaactggataacaaacacagaggaatatttttgtttcttttcaagaacacagaggaatgattttgcctaggatgcgaattttcgaatatttttttaagaaataatacttttttaaatagaggttgacaaattaaaattgcaagtttaggccctgtttagtttccacataaaaattttacatcctgtcacatcgaatatttaaacaactacatgaagtacttccttcgtttcacaatgtaagttattttagcatttcccgacataaatattatgtctatattcattaacatcaatatgaatgtgggaaatgttagaatgacttacattgtgaaacggatggagtattaaatataggctaaaaaaataactaattgcacagattgcgactaatttgcgagatgaatcttttaaatctaattgcttcatgatttgacaatgtggtgctacagtaaacatttgataataacggattaattaggcttaataaatttgtctcgtggtttcattgacggattctgtaattagtttttttattactatccgaaataccccatgcggcaccctatataatacccgatgtgacacaccaaaagtttacacccctgaatctaaacacccctttagcaccccatcgaacaaccaaaattcgataggcgtacatatcgatcaacacctgtggaaccacaattgttcgataggggataaaaaattaaaaaaaaagaacaaccactatgtgccactgtgcatgcagcacatatagaacatccacaattcgattggccccttgccatgacctttc

SEQ ID NO: 3518 - DNA, 3942 bp, Oryza sativa
caggtaaatcgtgtcgggacaagctatcagtcgaatccaccagtatactcaaaaacggtaatttcctttgggcctgaagatgcagaaggaatatttttccctcatcaagatcctttagtggtctcagtggaaatagcacaatgcgaagtgcaaagagtgttaatcgatggaggaagttcagcggatgtgctgttttacgatgctttcaagaaaatacaaataccagaagataggttaacaaacgcaggagtacctttacaaggttttggtggacaacaagtacatgcaattggaaaaatatctttacaagtggtctttggaaaaggcactaatgtgagaaaagaagagatagtatttgatgtggtcgatatgccatatcagtacaatgcaattcttggaaggtcaacaatcaatatttttgaggccataatacaccacaactacatatgtatgaagctcccaggaccaaggggagtaataacggtccgaggagaacagcttgcagcaagaaagtatgagcttcaaggaacaccaagtgtgaaaggagtacatgtggttgaccaaaaacagggagaatacataaaaatacaaaagccaattcctgaagggaaaacaaagaaagtacagttggatgaacatgaccctggaaagttcattctgataggagaaaacttggaaaaacatattgaggaagaaatcttaaaggtagtaaaagaaaacatggctgtatttgcatggtcaccagatgagttgcagggagttgatagaagtctaattgagcacaacctagcgattaagtcaggatacaagcccaaaaaacaaaaattgagaagaatgtctacagatagacaacaagctgcaaaaattgaacttgaaaagttgttgaagacgaaagtcataagagaagtgatgcacccagaatggctggcaaatccagtgttagtaaagaaggcaaatggcaagtggagaatgtgcattgactttacagacctcaacaaggcatgcccaaaagatgattttcctttgccacggatagaccagttggtagatgccacagctagatgcgaactaatgagtttcttagacgcatactctggctatcatcaagtttttatggtgaaggaggatgaggaaaagacatcatttataacaccatttggaacttattgttttatcagaatgccatttggtttgaagaatgcaggagcgacttttgccaggctcataggaaaagtcttggctaagcagttaggacggaatgtcgaggcatacgtagatgacattgtggtaaagagtaaacaagcatttacccatggcaaagatttgcaagaaacatttgaaaacctgagaaaatgctcagttaagcttaatccagaaaagtgtgtttttggcgttagagcaggaaagttacttggtttcttggtgtccaaaagaggaatagaggcaaatcctgacaaaatcgcagcaatccatcaaatggagccgccaaaaaacacaagagaagtgcagaggttgacaggccgaatggcatctttgagtagatttctatctaaatcagcagaaaagggattacccttcttcaagactttgaggggggcaaacaccttcgagtggactgctgaatgccaacaagctttcgatgacttgaagaaatacttgcatgaaatgccaacattagcaagtccgccaaaaggtcaacctcagttaatgtatgtggcagcaactccagcgacagttagcgcagttttggtacaagaagaagaaaataggcaagtgccggtatactttgtctcagaagcattacaaggaccaaaaacacgatactcagaagtagaaaagttgatttatgcaattgtgatggcttcaagaaagttgaggcattattttctgtcgcatgacataacaataccatcggcatacccgataggagaagtgttaacaaacaaggaagtcgcggggagaatagcaaaatgggcaatggaactcttaccttttgacctgaaatacatatcaagaacagccataaagtcacaagtactagcagattttgtggcagaatggactcccaatgaggtagaacaacaggaagaagtcgaaaaaccatggatagtattctccgatggagcatgcaatgccgccggagcatgagccgctgcagttgtgaaaacaccaatgaagcaaacgttgaagtattctgttcaattagcttttccttccacaaacaacacagcagagtatgaaggcgttttgttggctatgagaaaggcaagagcgctaggggctcggcggttaatagtcaaaactgactcaaagttggtagcaggtcacttttccaaatcttttgaagcaaaggaggaaactatggctaaatatctggaagaagcaaggctgaatgagaaacatttcttgggaataacggtaaaagccataacaaaggaagaaaatggagaagctgatgagctagctaaggcagccgcaacaggtcaaccattggaaaattcatttttcgatataatcacccagccaagttacgaaaagaaagaagtagcatgcatacagagagaaggagattggagagaaccgatcttgaaataccttgtcagtgcacaacttccagaaaaggaagaagaagcaaagagaatacaactaacgtccaagaaatacaaagtggtagagggacagttgtataaaagtggagttactgctcctttgttaaagtgtgtaacaagggaagaaggcatgaagatggtggtagaaatacatgaaggcttgtgtggagctcatcaagcaccacggtcagtggcttcaaaagtcataagacaaggaatctattggccaacaattatgaaagatacagagaaatacataaagacgtgcaaagcatgtcagaagttcggtccaatgacaaaagcaccacccaaagaactgcaaccaattccgctggtttggccttttacagatggggaatagatatagtaggtcctcttccaagagcgaagggagatctgcgctttgtcgttgttgcaattgaatacttttcaagatggattgaggcagaagcagtggcaagaataacttctgcagcagtacaaaagtttgtttggaagaacataatatgtcgatttggagtcccaaaggaaatagtatgtgacaatggaaagcaattcgaatctggaaaatttcaagacatgtgtaaaggccttaatttgcaaatcaactttgcctctgtaggccatcctcagacaaatggagctgtggaaagggcaaatggtaaaatcatggaagctatcaagaagaggttagaaggatcagcaaaaggaaaatggcctgaggacttgctatcagtgctttgggcactaagaactacggtagtaaggtcgactggcatgacccctttcagattggtttatggcgatgaagcaatgactccaagcgaagtaggggcacattctccaagaatgatatttgaccaaaaagatgaagaaggaagagagataactcttgaaatgctagatgaaataagggttgaagctttggagaagatggcatcatacacagaaggaacaaagagctattacaaccaaaaagtaaagacaaggccgattgaagaaggagatttagtcttgaagaaagtgctcaatgaggtagctgttggaaaactcgagtcaaagtgggaaggaccattcatagtcaaaaagaagacagaaacgggagcattcaagttagcatatcttgatggtgaggagttaaagcatacttggaatgctatttctttaaagaaattttatgcctgaaaaaaaaagaagagaaaaaaaaagaaaaaaaagagagagagaaagagaaaaaggagaacacgggagctcgagtttgtagtatactcactcagatgtaaatacgaatgatatccaagttaatgtatataaacaggacgtagggttttta
